United States Patent Application Publication US 2025/0333767 A1 - sequence listing, part 7

SEQ ID NO: 32909 - protein, 978 aa, synthetic construct
  REGION 1..978: note = engineered CasX variant
QEIKRISKIRRRLVKDSNTKKAGKTGPMKTLLVRVMTPDLRERLENLRKKPENIPQPISNTSRANLNKLLTDYTEMKKAILHVYWEEFQKDPVGLMSRVAQPASKKIDQNKLKPEMDEKGNLTTAGFACSQCGQPLFVYKLEQVSEKGKAYTNYFGRCNVAEHEKLILLAQLKPEKDSDEAVTYSLGKFGQRALDFYSIHVTKESTHPVKPLAQIAGNRYASSPVGKALSDACMGTIASFLSKYQDIIIEHQKVVKGNQKRLESLRELAGKENLEYPSVTLPPQPHTSEGVDAYNEVIARVRMWVNLNLWQKLKLSRDDAKPLLRLKGFPSFPLVERQANEVDWWDMVCNVKKLINEKKEDGKVFWQNLAGYKRQEALRPYLSSEEDRKKGKKFARYQLGDLLLHLEKKHGEDWGKVYDEAWERIDKKVEGLSKHIKLEEERRSEDAQSKAALTDWLRAKASFVIEGLKEADKDEFCRCELKLQKWYGDLRGKPFAIEAENSILDISGFSKQYNCAFIWQKDGVKKLNLYLIINYFKGGKLRFKKIKPEAFEANRFYTVINKKSGEIVPMEVNFNFDDPNLIILPLAFGKRQGREFIWNDLLSLETGSLKLANGRVIEKTLYNRRTRQDEPALFVALTFERREVLDSSNIKPMNLIGVDRGENIPAVIALTDPEGCPLSRFKDSLGNPTHILRIGESYKEKQRTIQAKKEVEQRRAGGYSRKYASKAKNLADDMVRNTARDLLYYAVTQDAMLIFENLSRGFGRQGKRTFMAERQYTRMEDWLTAKLAYEGLPSKTYLSKTLAQYTSKTCSNCGFTITSADYDRVLEKLKKTATGWMTTINGKELKVEGQITYYNRYKRQNVVKDLSVELDRLSEESVNNDISSWTKGRSGEALSLLKKRFSHRPVQEKFVCLNCGFETHADEQAALNIARSWLFLRSQEYKKYQTNKTTGNTDKRAFVETWQSFYRKKLKEVWKPAV

SEQ ID NO: 32910 - protein, 978 aa, synthetic construct
  REGION 1..978: note = engineered CasX variant
QEIKRISKIRRRLVKDSNTKKAGKTGPMKTLLVRVMTPDLRERLENLRKKPENIPQPISNTSRANLNKLLTDYTEMKKAILHVYWEEFQKDPVGLMSRVAQPASKKIDQNKLKPEMDEKGNLTTAGFACSQCGQPLFVYKLEQVSEKGKAYTNYFGRCNVAEHEKLILLAQLKPEKDSDEAVTYSLGKFGQRALDFYSIHVTKESTHPVKPLAQIAGNRYASTPVGKALSDACMGTIASFLSKYQDIIIEHQKVVKGNQKRLESLRELAGKENLEYPSVTLPPQPHTSEGVDAYNEVIARVRMWVNLNLWQKLKLSRDDAKPLLRLKGFPSFPLVERQANEVDWWDMVCNVKKLINEKKEDGKVFWQNLAGYKRQEALRPYLSSEEDRKKGKKFARYQLGDLLLHLEKKHGEDWGKVYDEAWERIDKKVEGLSKHIKLEEERRSEDAQSKAALTDWLRAKASFVIEGLKEADKDEFCRCELKLQKWYGDLRGKPFAIEAENSILDISGFSKQYNCAFIWQKDGVKKLNLYLIINYFKGGKLRFKKIKPEAFEANRFYTVINKKSGEIVPMEVNFNFDDPNLIILPLAFGKRQGREFIWNDLLSLETGSLKLANGRVIEKTLYNRRTRQDEPALFVALTFERREVLDSSNIKPMNLIGVDRGENIPAVIALTDPEGCPLSRFKDSLGNPTHILRIGESYKEKQRTIQAKKEVEQRRAGGYSRKYASKAKNLADDMVRNTARDLLYYAVTQDAMLIFENLSRGFGRQGKRTFMAERQYTRMEDWLTAKLAYEGLPSKTYLSKTLAQYTSKTCSNCGFTITSADYDRVLEKLKKTATGWMTTINGKELKVEGQITYYNRYKRQNVVKDLSVELDRLSEESVNNDISSWTKGRSGEALSLLKKRFSHRPVQEKFVCLNCGFETHADEQAALNIARSWLFLRSQEYKKYQTNKTTGNTDKRAFVETWQSFYRKKLKEVWKPAV

SEQ ID NO: 32911 - protein, 978 aa, synthetic construct
  REGION 1..978: note = engineered CasX variant
QEIKRISKIRRRLVKDSNTKKAGKTGPMKTLLVRVMTPDLRERLENLRKKPENIPQPISNTSRANLNKLLTDYTEMKKAILHVYWEEFQKDPVGLMSRVAQPASKKIDQNKLKPEMDEKGNLTTAGFACSQCGQPLFVYKLEQVSEKGKAYTNYFGRCNVAEHEKLILLAQLKPEKDSDEAVTYSLGKFGQRALDFYSIHVTKESTHPVKPLAQIAGNRYASAPVGKALSDACMGTIASFLSKYQDIIIEHQKVVKGNQKRLESLRELAGKENLEYPSVTLPPQPHTSEGVDAYNEVIARVRMWVNLNLWQKLKLSRDDAKPLLRLKGFPSFPLVERQANEVDWWDMVCNVKKLINEKKEDGKVFWQNLAGYKRQEALRPYLSSEEDRKKGKKFARYQLGDLLLHLEKKHGEDWGKVYDEAWERIDKKVEGLSKHIKLEEERRSEDAQSKAALTDWLRAKASFVIEGLKEADKDEFCRCELKLQKWYGDLRGKPFAIEAENSILDISGFSKQYNCAFIWQKDGVKKLNLYLIINYFKGGKLRFKKIKPEAFEANRFYTVINKKSGEIVPMEVNFNFDDPNLIILPLAFGKRQGREFIWNDLLSLETGSLKLANGRVIEKTLYNRRTRQDEPALFVALTFERREVLDSSNIKPMNLIGVDRGENIPAVIALTDPEGCPLSRFKDSLGNPTHILRIGESYKEKQRTIQAKKEVEQRRAGGYSRKYASKAKNLADDMVRNTARDLLYYAVTQDAMLIFENLSRGFGRQGKRTFMAERQYTRMEDWLTAKLAYEGLPSKTYLSKTLAQYTSKTCSNCGFTITSADYDRVLEKLKKTATGWMTTINGKELKVEGQITYYNRYKRQNVVKDLSVELDRLSEESVNNDISSWTKGRSGEALSLLKKRFSHRPVQEKFVCLNCGFETHADEQAALNIARSWLFLRSQEYKKYQTNKTTGNTDKRAFVETWQSFYRKKLKEVWKPAV

SEQ ID NO: 32912 - protein, 978 aa, synthetic construct
  REGION 1..978: note = engineered CasX variant
QEIKRISKIRRRLVKDSNTKKAGKTGPMKTLLVRVMTPDLRERLENLRKKPENIPQPISNTSRANLNKLLTDYTEMKKAILHVYWEEFQKDPVGLMSRVAQPASKKIDQNKLKPEMDEKGNLTTAGFACSQCGQPLFVYKLEQVSEKGKAYTNYFGRCNVAEHEKLILLAQLKPEKDSDEAVTYSLGKFGQRALDFYSIHVTKESTHPVKPLAQIAGNRYASVPVGKALSDACMGTIASFLSKYQDIIIEHQKVVKGNQKRLESLRELAGKENLEYPSVTLPPQPHTSEGVDAYNEVIARVRMWVNLNLWQKLKLSRDDAKPLLRLKGFPSFPLVERQANEVDWWDMVCNVKKLINEKKEDGKVFWQNLAGYKRQEALRPYLSSEEDRKKGKKFARYQLGDLLLHLEKKHGEDWGKVYDEAWERIDKKVEGLSKHIKLEEERRSEDAQSKAALTDWLRAKASFVIEGLKEADKDEFCRCELKLQKWYGDLRGKPFAIEAENSILDISGFSKQYNCAFIWQKDGVKKLNLYLIINYFKGGKLRFKKIKPEAFEANRFYTVINKKSGEIVPMEVNFNFDDPNLIILPLAFGKRQGREFIWNDLLSLETGSLKLANGRVIEKTLYNRRTRQDEPALFVALTFERREVLDSSNIKPMNLIGVDRGENIPAVIALTDPEGCPLSRFKDSLGNPTHILRIGESYKEKQRTIQAKKEVEQRRAGGYSRKYASKAKNLADDMVRNTARDLLYYAVTQDAMLIFENLSRGFGRQGKRTFMAERQYTRMEDWLTAKLAYEGLPSKTYLSKTLAQYTSKTCSNCGFTITSADYDRVLEKLKKTATGWMTTINGKELKVEGQITYYNRYKRQNVVKDLSVELDRLSEESVNNDISSWTKGRSGEALSLLKKRFSHRPVQEKFVCLNCGFETHADEQAALNIARSWLFLRSQEYKKYQTNKTTGNTDKRAFVETWQSFYRKKLKEVWKPAV

SEQ ID NO: 32913 - protein, 978 aa, synthetic construct
  REGION 1..978: note = engineered CasX variant
QEIKRISKIRRRLVKDSNTKKAGKTGPMKTLLVRVMTPDLRERLENLRKKPENIPQPISNTSRANLNKLLTDYTEMKKAILHVYWEEFQKDPVGLMSRVAQPASKKIDQNKLKPEMDEKGNLTTAGFACSQCGQPLFVYKLEQVSEKGKAYTNYFGRCNVAEHEKLIKLAQLKPEKDSDEAVTYSLGKFGQRALDFYSIHVTKESTHPVKPLAQIAGNRYASGPVGKALSDACMGTIASFLSKYQDIIIEHQKVVKGNQKRLESLRELAGKENLEYPSVTLPPQPHTSEGVDAYNEVIARVRMWVNLNLWQKLKLSRDDAKPLLRLKGFPSFPLVERQANEVDWWDMVCNVKKLINEKKEDGKVFWQNLAGYKRQEALRPYLSSEEDRKKGKKFARYQLGDLLLHLEKKHGEDWGKVYDEAWERIDKKVEGLSKHIKLEEERRSEDAQSKAALTDWLRAKASFVIEGLKEADKDEFCRCELKLQKWYGDLRGKPFAIEAENSILDISGFSKQYNCAFIWQKDGVKKLNLYLIINYFKGGKLRFKKIKPEAFEANRFYTVINKKSGEIVPMEVNFNFDDPNLIILPLAFGKRQGREFIWNDLLSLETGSLKLANGRVIEKTLYNRRTRQDEPALFVALTFERREVLDSSNIKPMNLIGVDRGENIPAVIALTDPEGCPLSRFKDSLGNPTHILRIGESYKEKQRTIQAKKEVEQRRAGGYSRKYASKAKNLADDMVRNTARDLLYYAVTQDAMLIFENLSRGFGRQGKRTFMAERQYTRMEDWLTAKLAYEGLPSKTYLSKTLAQYTSKTCSNCGFTITSADYDRVLEKLKKTATGWMTTINGKELKVEGQITYYNRYKRQNVVKDLSVELDRLSEESVNNDISSWTKGRSGEALSLLKKRFSHRPVQEKFVCLNCGFETHADEQAALNIARSWLFLRSQEYKKYQTNKTTGNTDKRAFVETWQSFYRKKLKEVWKPAV

SEQ ID NO: 32914 - protein, 977 aa, synthetic construct
  REGION 1..977: note = engineered CasX variant
QEIKRISKIRRRLVKDSNTKKAGKTGPMKTLLVRVMTPDLRERLENLRKKPENIPQPISNTSRANLNKLLTDYTEMKKAILHVYWEEFQKDPVGLMSRVAQPASKKIDQNKLKPEMDEKGNLTTAGFACSQCGQPLFVYKLEQVSEKGKAYTNYFGRCNVAEHEKLILLAQLKPEKDSDEAVTYSLGKFGQRALDFYSIHVTKESTHPVKPLAQIAGNRYASPVGKALSDACMGTIASFLSKYQDIIIEHQKVVKGNQKRLESLRELAGKENLEYPSVTLPPQPHTSEGVDAYNEVIARVRMWVNLNLWQKLKLSRDDAKPLLRLKGFPSFPLVERQANEVDWWDMVCNVKKLINEKKEDGKVFWQNLAGYKRQEALRPYLSSEEDRKKGKKFARYQLGDLLLHLEKKHGEDWGKVYDEAWERIDKKVEGLSKHIKLEEERRSEDAQSKAALTDWLRAKASFVIEGLKEADKDEFCRCELKLQKWYGDLRGKPFAIEAENSILDISGFSKQYNCAFIWQKDGVKKLNLYLIINYFKGGKLRFKKIKPEAFEANRFYTVINKKSGEIVPMEVNFNFDDPNLIILPLAFGKRQGREFIWNDLLSLETGSLKLANGRVIEKTLYNRRTRQDEPALFVALTFERREVLDSSNIKPMNLIGVDRGENIPAVIALTDPEGCPLSRFKDSLGNPTHILRIGESYKEKQRTIQAKKEVEQRRAGGYSRKYASKAKNLADDMVRNTARDLLYYAVTQDAMLIFENLSRGFGRQGKRTFMAERQYTRMEDWLTAKLAYEGLPSKTYLSKTLAQYTSKTCSNCGFTITSADYDRVLEKLKKTATGWMTTINGKELKVEGQITYYNRYKRQNVVKDLSVELDRLSEESVNNDISSWTKGRSGEALSLLKKRFSHRPVQEKFVCLNCGFETHADEQAALNIARSWLFLRSQEYKKYQTNKTTGNTDKRAFVETWQSFYRKKLKEVWKPAV

SEQ ID NO: 32915 - protein, 978 aa, synthetic construct
  REGION 1..978: note = engineered CasX variant
QEIKRISKIRRRLVKDSNTKKAGKTGPMKTLLVRVMTPDLRERLENLRKKPENIPQPISNTSRANLNKLLTDYTEMKKAILHVYWEEFQKDPVGLMSRVAQPASKKIDQNKLKPEMDEKGNLTTAGFACSQCGQPLFVYKLEQVSEKGKAYTNYFGRCNVAEHEKLILLAQLKPEKDSDEAVTYSLGKFGQRALDFYSIHVTKESTHPVKPLAQIAGNRYASYPVGKALSDACMGTIASFLSKYQDIIIEHQKVVKGNQKRLESLRELAGKENLEYPSVTLPPQPHTKEGLDAYNEVIARVRMWVNLNLWQKLKLSRDDAKPLLRLKGFPSFPLVERQANEVDWWDMVCNVKKLINEKKEDGKVFWQNLAGYKRQEALRPYLSSEEDRKKGKKFARYQLGDLLLHLEKKHGEDWGKVYDEAWERIDKKVEGLSKHIKLEEERRSEDAQSKAALTDWLRAKASFVIEGLKEADKDEFCRCELKLQKWYGDLRGKPFAIEAENSILDISGFSKQYNCAFIWQKDGVKKLNLYLIINYFKGGKLRFKKIKPEAFEANRFYTVINKKSGEIVPMEVNFNFDDPNLIILPLAFGKRQGREFIWNDLLSLETGSLKLANGRVIEKTLYNRRTRQDEPALFVALTFERREVLDSSNIKPMNLIGVDRGENIPAVIALTDPEGCPLSRFKDSLGNPTHILRIGESYKEKQRTIQAKKEVEQRRAGGYSRKYASKAKNLADDMVRNTARDLLYYAVTQDAMLIFENLSRGFGRQGKRTFMAERQYTRMEDWLTAKLAYEGLPSKTYLSKTLAQYTSKTCSNCGFTITSADYDRVLEKLKKTATGWMTTINGKELKVEGQITYYNRYKRQNVVKDLSVELDRLSEESVNNDISSWTKGRSGEALSLLKKRFSHRPVQEKFVCLNCGFETHADEQAALNIARSWLFLRSQEYKKYQTNKTTGNTDKRAFVETWQSFYRKKLKEVWKPAV

SEQ ID NO: 32916 - protein, 978 aa, synthetic construct
  REGION 1..978: note = engineered CasX variant
QEIKRISKIRRRLVKDSNTKKAGKTGPMKTLLVRVMTPDLRERLENLRKKPENIPQPISNTSRANLNKLLTDYTEMKKAILHVYWEEFQKDPVGLMSRVAQPASKKIDQNKLKPEMDEKGNLTTAGFACSQCGQPLFVYKLEQVSEKGKAYTNYFGRCNVAEHEKLILLAQLKPEKDSDEAVTYSLGKFGQRALDFYSIHVTKESTHPVKPLAQIAGNRYASHPVGKALSDACMGTIASFLSKYQDIIIEHQKVVKGNQKRLESLRELAGKENLEYPSVTLPPQPHTKEGLDAYNEVIARVRMWVNLNLWQKLKLSRDDAKPLLRLKGFPSFPLVERQANEVDWWDMVCNVKKLINEKKEDGKVFWQNLAGYKRQEALRPYLSSEEDRKKGKKFARYQLGDLLLHLEKKHGEDWGKVYDEAWERIDKKVEGLSKHIKLEEERRSEDAQSKAALTDWLRAKASFVIEGLKEADKDEFCRCELKLQKWYGDLRGKPFAIEAENSILDISGFSKQYNCAFIWQKDGVKKLNLYLIINYFKGGKLRFKKIKPEAFEANRFYTVINKKSGEIVPMEVNFNFDDPNLIILPLAFGKRQGREFIWNDLLSLETGSLKLANGRVIEKTLYNRRTRQDEPALFVALTFERREVLDSSNIKPMNLIGVDRGENIPAVIALTDPEGCPLSRFKDSLGNPTHILRIGESYKEKQRTIQAKKEVEQRRAGGYSRKYASKAKNLADDMVRNTARDLLYYAVTQDAMLIFENLSRGFGRQGKRTFMAERQYTRMEDWLTAKLAYEGLPSKTYLSKTLAQYTSKTCSNCGFTITSADYDRVLEKLKKTATGWMTTINGKELKVEGQITYYNRYKRQNVVKDLSVELDRLSEESVNNDISSWTKGRSGEALSLLKKRFSHRPVQEKFVCLNCGFETHADEQAALNIARSWLFLRSQEYKKYQTNKTTGNTDKRAFVETWQSFYRKKLKEVWKPAV

SEQ ID NO: 32917 - protein, 978 aa, synthetic construct
  REGION 1..978: note = engineered CasX variant
QEIKRISKIRRRLVKDSNTKKAGKTGPMKTLLVRVMTPDLRERLENLRKKPENIPQPISNTSRANLNKLLTDYTEMKKAILHVYWEEFQKDPVGLMSRVAQPASKKIDQNKLKPEMDEKGNLTTAGFACSQCGQPLFVYKLEQVSEKGKAYTNYFGRCNVAEHEKLILLAQLKPEKDSDEAVTYSLGKFGQRALDFYSIHVTKESTHPVKPLAQIAGNRYASSPVGKALSDACMGTIASFLSKYQDIIIEHQKVVKGNQKRLESLRELAGKENLEYPSVTLPPQPHTKEGLDAYNEVIARVRMWVNLNLWQKLKLSRDDAKPLLRLKGFPSFPLVERQANEVDWWDMVCNVKKLINEKKEDGKVFWQNLAGYKRQEALRPYLSSEEDRKKGKKFARYQLGDLLLHLEKKHGEDWGKVYDEAWERIDKKVEGLSKHIKLEEERRSEDAQSKAALTDWLRAKASFVIEGLKEADKDEFCRCELKLQKWYGDLRGKPFAIEAENSILDISGFSKQYNCAFIWQKDGVKKLNLYLIINYFKGGKLRFKKIKPEAFEANRFYTVINKKSGEIVPMEVNFNFDDPNLIILPLAFGKRQGREFIWNDLLSLETGSLKLANGRVIEKTLYNRRTRQDEPALFVALTFERREVLDSSNIKPMNLIGVDRGENIPAVIALTDPEGCPLSRFKDSLGNPTHILRIGESYKEKQRTIQAKKEVEQRRAGGYSRKYASKAKNLADDMVRNTARDLLYYAVTQDAMLIFENLSRGFGRQGKRTFMAERQYTRMEDWLTAKLAYEGLPSKTYLSKTLAQYTSKTCSNCGFTITSADYDRVLEKLKKTATGWMTTINGKELKVEGQITYYNRYKRQNVVKDLSVELDRLSEESVNNDISSWTKGRSGEALSLLKKRFSHRPVQEKFVCLNCGFETHADEQAALNIARSWLFLRSQEYKKYQTNKTTGNTDKRAFVETWQSFYRKKLKEVWKPAV

SEQ ID NO: 32918 - protein, 978 aa, synthetic construct
  REGION 1..978: note = engineered CasX variant
QEIKRISKIRRRLVKDSNTKKAGKTGPMKTLLVRVMTPDLRERLENLRKKPENIPQPISNTSRANLNKLLTDYTEMKKAILHVYWEEFQKDPVGLMSRVAQPASKKIDQNKLKPEMDEKGNLTTAGFACSQCGQPLFVYKLEQVSEKGKAYTNYFGRCNVAEHEKLILLAQLKPEKDSDEAVTYSLGKFGQRALDFYSIHVTKESTHPVKPLAQIAGNRYASTPVGKALSDACMGTIASFLSKYQDIIIEHQKVVKGNQKRLESLRELAGKENLEYPSVTLPPQPHTKEGLDAYNEVIARVRMWVNLNLWQKLKLSRDDAKPLLRLKGFPSFPLVERQANEVDWWDMVCNVKKLINEKKEDGKVFWQNLAGYKRQEALRPYLSSEEDRKKGKKFARYQLGDLLLHLEKKHGEDWGKVYDEAWERIDKKVEGLSKHIKLEEERRSEDAQSKAALTDWLRAKASFVIEGLKEADKDEFCRCELKLQKWYGDLRGKPFAIEAENSILDISGFSKQYNCAFIWQKDGVKKLNLYLIINYFKGGKLRFKKIKPEAFEANRFYTVINKKSGEIVPMEVNFNFDDPNLIILPLAFGKRQGREFIWNDLLSLETGSLKLANGRVIEKTLYNRRTRQDEPALFVALTFERREVLDSSNIKPMNLIGVDRGENIPAVIALTDPEGCPLSRFKDSLGNPTHILRIGESYKEKQRTIQAKKEVEQRRAGGYSRKYASKAKNLADDMVRNTARDLLYYAVTQDAMLIFENLSRGFGRQGKRTFMAERQYTRMEDWLTAKLAYEGLPSKTYLSKTLAQYTSKTCSNCGFTITSADYDRVLEKLKKTATGWMTTINGKELKVEGQITYYNRYKRQNVVKDLSVELDRLSEESVNNDISSWTKGRSGEALSLLKKRFSHRPVQEKFVCLNCGFETHADEQAALNIARSWLFLRSQEYKKYQTNKTTGNTDKRAFVETWQSFYRKKLKEVWKPAV

SEQ ID NO: 32919 - protein, 978 aa, synthetic construct
  REGION 1..978: note = engineered CasX variant
QEIKRISKIRRRLVKDSNTKKAGKTGPMKTLLVRVMTPDLRERLENLRKKPENIPQPISNTSRANLNKLLTDYTEMKKAILHVYWEEFQKDPVGLMSRVAQPASKKIDQNKLKPEMDEKGNLTTAGFACSQCGQPLFVYKLEQVSEKGKAYTNYFGRCNVAEHEKLILLAQLKPEKDSDEAVTYSLGKFGQRALDFYSIHVTKESTHPVKPLAQIAGNRYASAPVGKALSDACMGTIASFLSKYQDIIIEHQKVVKGNQKRLESLRELAGKENLEYPSVTLPPQPHTKEGLDAYNEVIARVRMWVNLNLWQKLKLSRDDAKPLLRLKGFPSFPLVERQANEVDWWDMVCNVKKLINEKKEDGKVFWQNLAGYKRQEALRPYLSSEEDRKKGKKFARYQLGDLLLHLEKKHGEDWGKVYDEAWERIDKKVEGLSKHIKLEEERRSEDAQSKAALTDWLRAKASFVIEGLKEADKDEFCRCELKLQKWYGDLRGKPFAIEAENSILDISGFSKQYNCAFIWQKDGVKKLNLYLIINYFKGGKLRFKKIKPEAFEANRFYTVINKKSGEIVPMEVNFNFDDPNLIILPLAFGKRQGREFIWNDLLSLETGSLKLANGRVIEKTLYNRRTRQDEPALFVALTFERREVLDSSNIKPMNLIGVDRGENIPAVIALTDPEGCPLSRFKDSLGNPTHILRIGESYKEKQRTIQAKKEVEQRRAGGYSRKYASKAKNLADDMVRNTARDLLYYAVTQDAMLIFENLSRGFGRQGKRTFMAERQYTRMEDWLTAKLAYEGLPSKTYLSKTLAQYTSKTCSNCGFTITSADYDRVLEKLKKTATGWMTTINGKELKVEGQITYYNRYKRQNVVKDLSVELDRLSEESVNNDISSWTKGRSGEALSLLKKRFSHRPVQEKFVCLNCGFETHADEQAALNIARSWLFLRSQEYKKYQTNKTTGNTDKRAFVETWQSFYRKKLKEVWKPAV

SEQ ID NO: 32920 - protein, 978 aa, synthetic construct
  REGION 1..978: note = engineered CasX variant
QEIKRISKIRRRLVKDSNTKKAGKTGPMKTLLVRVMTPDLRERLENLRKKPENIPQPISNTSRANLNKLLTDYTEMKKAILHVYWEEFQKDPVGLMSRVAQPASKKIDQNKLKPEMDEKGNLTTAGFACSQCGQPLFVYKLEQVSEKGKAYTNYFGRCNVAEHEKLILLAQLKPEKDSDEAVTYSLGKFGQRALDFYSIHVTKESTHPVKPLAQIAGNRYASVPVGKALSDACMGTIASFLSKYQDIIIEHQKVVKGNQKRLESLRELAGKENLEYPSVTLPPQPHTKEGLDAYNEVIARVRMWVNLNLWQKLKLSRDDAKPLLRLKGFPSFPLVERQANEVDWWDMVCNVKKLINEKKEDGKVFWQNLAGYKRQEALRPYLSSEEDRKKGKKFARYQLGDLLLHLEKKHGEDWGKVYDEAWERIDKKVEGLSKHIKLEEERRSEDAQSKAALTDWLRAKASFVIEGLKEADKDEFCRCELKLQKWYGDLRGKPFAIEAENSILDISGFSKQYNCAFIWQKDGVKKLNLYLIINYFKGGKLRFKKIKPEAFEANRFYTVINKKSGEIVPMEVNFNFDDPNLIILPLAFGKRQGREFIWNDLLSLETGSLKLANGRVIEKTLYNRRTRQDEPALFVALTFERREVLDSSNIKPMNLIGVDRGENIPAVIALTDPEGCPLSRFKDSLGNPTHILRIGESYKEKQRTIQAKKEVEQRRAGGYSRKYASKAKNLADDMVRNTARDLLYYAVTQDAMLIFENLSRGFGRQGKRTFMAERQYTRMEDWLTAKLAYEGLPSKTYLSKTLAQYTSKTCSNCGFTITSADYDRVLEKLKKTATGWMTTINGKELKVEGQITYYNRYKRQNVVKDLSVELDRLSEESVNNDISSWTKGRSGEALSLLKKRFSHRPVQEKFVCLNCGFETHADEQAALNIARSWLFLRSQEYKKYQTNKTTGNTDKRAFVETWQSFYRKKLKEVWKPAV

SEQ ID NO: 32921 - protein, 978 aa, synthetic construct
  REGION 1..978: note = engineered CasX variant
QEIKRISKIRRRLVKDSNTKKAGKTGPMKTLLVRVMTPDLRERLENLRKKPENIPQPISNTSRANLNKLLTDYTEMKKAILHVYWEEFQKDPVGLMSRVAQPASKKIDQNKLKPEMDEKGNLTTAGFACSQCGQPLFVYKLEQVSEKGKAYTNYFGRCNVAEHEKLIKLAQLKPEKDSDEAVTYSLGKFGQRALDFYSIHVTKESTHPVKPLAQIAGNRYASGPVGKALSDACMGTIASFLSKYQDIIIEHQKVVKGNQKRLESLRELAGKENLEYPSVTLPPQPHTKEGLDAYNEVIARVRMWVNLNLWQKLKLSRDDAKPLLRLKGFPSFPLVERQANEVDWWDMVCNVKKLINEKKEDGKVFWQNLAGYKRQEALRPYLSSEEDRKKGKKFARYQLGDLLLHLEKKHGEDWGKVYDEAWERIDKKVEGLSKHIKLEEERRSEDAQSKAALTDWLRAKASFVIEGLKEADKDEFCRCELKLQKWYGDLRGKPFAIEAENSILDISGFSKQYNCAFIWQKDGVKKLNLYLIINYFKGGKLRFKKIKPEAFEANRFYTVINKKSGEIVPMEVNFNFDDPNLIILPLAFGKRQGREFIWNDLLSLETGSLKLANGRVIEKTLYNRRTRQDEPALFVALTFERREVLDSSNIKPMNLIGVDRGENIPAVIALTDPEGCPLSRFKDSLGNPTHILRIGESYKEKQRTIQAKKEVEQRRAGGYSRKYASKAKNLADDMVRNTARDLLYYAVTQDAMLIFENLSRGFGRQGKRTFMAERQYTRMEDWLTAKLAYEGLPSKTYLSKTLAQYTSKTCSNCGFTITSADYDRVLEKLKKTATGWMTTINGKELKVEGQITYYNRYKRQNVVKDLSVELDRLSEESVNNDISSWTKGRSGEALSLLKKRFSHRPVQEKFVCLNCGFETHADEQAALNIARSWLFLRSQEYKKYQTNKTTGNTDKRAFVETWQSFYRKKLKEVWKPAV

SEQ ID NO: 32922 - protein, 977 aa, synthetic construct
  REGION 1..977: note = engineered CasX variant
QEIKRISKIRRRLVKDSNTKKAGKTGPMKTLLVRVMTPDLRERLENLRKKPENIPQPISNTSRANLNKLLTDYTEMKKAILHVYWEEFQKDPVGLMSRVAQPASKKIDQNKLKPEMDEKGNLTTAGFACSQCGQPLFVYKLEQVSEKGKAYTNYFGRCNVAEHEKLILLAQLKPEKDSDEAVTYSLGKFGQRALDFYSIHVTKESTHPVKPLAQIAGNRYASPVGKALSDACMGTIASFLSKYQDIIIEHQKVVKGNQKRLESLRELAGKENLEYPSVTLPPQPHTKEGLDAYNEVIARVRMWVNLNLWQKLKLSRDDAKPLLRLKGFPSFPLVERQANEVDWWDMVCNVKKLINEKKEDGKVFWQNLAGYKRQEALRPYLSSEEDRKKGKKFARYQLGDLLLHLEKKHGEDWGKVYDEAWERIDKKVEGLSKHIKLEEERRSEDAQSKAALTDWLRAKASFVIEGLKEADKDEFCRCELKLQKWYGDLRGKPFAIEAENSILDISGFSKQYNCAFIWQKDGVKKLNLYLIINYFKGGKLRFKKIKPEAFEANRFYTVINKKSGEIVPMEVNFNFDDPNLIILPLAFGKRQGREFIWNDLLSLETGSLKLANGRVIEKTLYNRRTRQDEPALFVALTFERREVLDSSNIKPMNLIGVDRGENIPAVIALTDPEGCPLSRFKDSLGNPTHILRIGESYKEKQRTIQAKKEVEQRRAGGYSRKYASKAKNLADDMVRNTARDLLYYAVTQDAMLIFENLSRGFGRQGKRTFMAERQYTRMEDWLTAKLAYEGLPSKTYLSKTLAQYTSKTCSNCGFTITSADYDRVLEKLKKTATGWMTTINGKELKVEGQITYYNRYKRQNVVKDLSVELDRLSEESVNNDISSWTKGRSGEALSLLKKRFSHRPVQEKFVCLNCGFETHADEQAALNIARSWLFLRSQEYKKYQTNKTTGNTDKRAFVETWQSFYRKKLKEVWKPAV

SEQ ID NO: 32923 - protein, 978 aa, synthetic construct
  REGION 1..978: note = engineered CasX variant
QEIKRISKIRRRLVKDSNTKKAGKTGPMKTLLVRVMTPDLRERLENLRKKPENIPQPISNTSRANLNKLLTDYTEMKKAILHVYWEEFQKDPVGLMSRVAQPASKKIDQNKLKPEMDEKGNLTTAGFACSQCGQPLFVYKLEQVSEKGKAYTNYFGRCNVAEHEKLILLAQLKPEKDSDEAVTYSLGKFGQRALDFYSIHVTKESTHPVKPLAQIAGNRYASYPVGKALSDACMGTIASFLSKYQDIIIEHQKVVKGNQKRLESLRELAGKENLEYPSVTLPPQPHTKEGVDAYNEVIARVRTWVNLNLWQKLKLSRDDAKPLLRLKGFPSFPLVERQANEVDWWDMVCNVKKLINEKKEDGKVFWQNLAGYKRQEALRPYLSSEEDRKKGKKFARYQLGDLLLHLEKKHGEDWGKVYDEAWERIDKKVEGLSKHIKLEEERRSEDAQSKAALTDWLRAKASFVIEGLKEADKDEFCRCELKLQKWYGDLRGKPFAIEAENSILDISGFSKQYNCAFIWQKDGVKKLNLYLIINYFKGGKLRFKKIKPEAFEANRFYTVINKKSGEIVPMEVNFNFDDPNLIILPLAFGKRQGREFIWNDLLSLETGSLKLANGRVIEKTLYNRRTRQDEPALFVALTFERREVLDSSNIKPMNLIGVDRGENIPAVIALTDPEGCPLSRFKDSLGNPTHILRIGESYKEKQRTIQAKKEVEQRRAGGYSRKYASKAKNLADDMVRNTARDLLYYAVTQDAMLIFENLSRGFGRQGKRTFMAERQYTRMEDWLTAKLAYEGLPSKTYLSKTLAQYTSKTCSNCGFTITSADYDRVLEKLKKTATGWMTTINGKELKVEGQITYYNRYKRQNVVKDLSVELDRLSEESVNNDISSWTKGRSGEALSLLKKRFSHRPVQEKFVCLNCGFETHADEQAALNIARSWLFLRSQEYKKYQTNKTTGNTDKRAFVETWQSFYRKKLKEVWKPAV

SEQ ID NO: 32924 - protein, 978 aa, synthetic construct
  REGION 1..978: note = engineered CasX variant
QEIKRISKIRRRLVKDSNTKKAGKTGPMKTLLVRVMTPDLRERLENLRKKPENIPQPISNTSRANLNKLLTDYTEMKKAILHVYWEEFQKDPVGLMSRVAQPASKKIDQNKLKPEMDEKGNLTTAGFACSQCGQPLFVYKLEQVSEKGKAYTNYFGRCNVAEHEKLILLAQLKPEKDSDEAVTYSLGKFGQRALDFYSIHVTKESTHPVKPLAQIAGNRYASHPVGKALSDACMGTIASFLSKYQDIIIEHQKVVKGNQKRLESLRELAGKENLEYPSVTLPPQPHTKEGVDAYNEVIARVRTWVNLNLWQKLKLSRDDAKPLLRLKGFPSFPLVERQANEVDWWDMVCNVKKLINEKKEDGKVFWQNLAGYKRQEALRPYLSSEEDRKKGKKFARYQLGDLLLHLEKKHGEDWGKVYDEAWERIDKKVEGLSKHIKLEEERRSEDAQSKAALTDWLRAKASFVIEGLKEADKDEFCRCELKLQKWYGDLRGKPFAIEAENSILDISGFSKQYNCAFIWQKDGVKKLNLYLIINYFKGGKLRFKKIKPEAFEANRFYTVINKKSGEIVPMEVNFNFDDPNLIILPLAFGKRQGREFIWNDLLSLETGSLKLANGRVIEKTLYNRRTRQDEPALFVALTFERREVLDSSNIKPMNLIGVDRGENIPAVIALTDPEGCPLSRFKDSLGNPTHILRIGESYKEKQRTIQAKKEVEQRRAGGYSRKYASKAKNLADDMVRNTARDLLYYAVTQDAMLIFENLSRGFGRQGKRTFMAERQYTRMEDWLTAKLAYEGLPSKTYLSKTLAQYTSKTCSNCGFTITSADYDRVLEKLKKTATGWMTTINGKELKVEGQITYYNRYKRQNVVKDLSVELDRLSEESVNNDISSWTKGRSGEALSLLKKRFSHRPVQEKFVCLNCGFETHADEQAALNIARSWLFLRSQEYKKYQTNKTTGNTDKRAFVETWQSFYRKKLKEVWKPAV

SEQ ID NO: 32925 - protein, 978 aa, synthetic construct
  REGION 1..978: note = engineered CasX variant
QEIKRISKIRRRLVKDSNTKKAGKTGPMKTLLVRVMTPDLRERLENLRKKPENIPQPISNTSRANLNKLLTDYTEMKKAILHVYWEEFQKDPVGLMSRVAQPASKKIDQNKLKPEMDEKGNLTTAGFACSQCGQPLFVYKLEQVSEKGKAYTNYFGRCNVAEHEKLILLAQLKPEKDSDEAVTYSLGKFGQRALDFYSIHVTKESTHPVKPLAQIAGNRYASSPVGKALSDACMGTIASFLSKYQDIIIEHQKVVKGNQKRLESLRELAGKENLEYPSVTLPPQPHTKEGVDAYNEVIARVRTWVNLNLWQKLKLSRDDAKPLLRLKGFPSFPLVERQANEVDWWDMVCNVKKLINEKKEDGKVFWQNLAGYKRQEALRPYLSSEEDRKKGKKFARYQLGDLLLHLEKKHGEDWGKVYDEAWERIDKKVEGLSKHIKLEEERRSEDAQSKAALTDWLRAKASFVIEGLKEADKDEFCRCELKLQKWYGDLRGKPFAIEAENSILDISGFSKQYNCAFIWQKDGVKKLNLYLIINYFKGGKLRFKKIKPEAFEANRFYTVINKKSGEIVPMEVNFNFDDPNLIILPLAFGKRQGREFIWNDLLSLETGSLKLANGRVIEKTLYNRRTRQDEPALFVALTFERREVLDSSNIKPMNLIGVDRGENIPAVIALTDPEGCPLSRFKDSLGNPTHILRIGESYKEKQRTIQAKKEVEQRRAGGYSRKYASKAKNLADDMVRNTARDLLYYAVTQDAMLIFENLSRGFGRQGKRTFMAERQYTRMEDWLTAKLAYEGLPSKTYLSKTLAQYTSKTCSNCGFTITSADYDRVLEKLKKTATGWMTTINGKELKVEGQITYYNRYKRQNVVKDLSVELDRLSEESVNNDISSWTKGRSGEALSLLKKRFSHRPVQEKFVCLNCGFETHADEQAALNIARSWLFLRSQEYKKYQTNKTTGNTDKRAFVETWQSFYRKKLKEVWKPAV

SEQ ID NO: 32926 - protein, 978 aa, synthetic construct
  REGION 1..978: note = engineered CasX variant
QEIKRISKIRRRLVKDSNTKKAGKTGPMKTLLVRVMTPDLRERLENLRKKPENIPQPISNTSRANLNKLLTDYTEMKKAILHVYWEEFQKDPVGLMSRVAQPASKKIDQNKLKPEMDEKGNLTTAGFACSQCGQPLFVYKLEQVSEKGKAYTNYFGRCNVAEHEKLILLAQLKPEKDSDEAVTYSLGKFGQRALDFYSIHVTKESTHPVKPLAQIAGNRYASTPVGKALSDACMGTIASFLSKYQDIIIEHQKVVKGNQKRLESLRELAGKENLEYPSVTLPPQPHTKEGVDAYNEVIARVRTWVNLNLWQKLKLSRDDAKPLLRLKGFPSFPLVERQANEVDWWDMVCNVKKLINEKKEDGKVFWQNLAGYKRQEALRPYLSSEEDRKKGKKFARYQLGDLLLHLEKKHGEDWGKVYDEAWERIDKKVEGLSKHIKLEEERRSEDAQSKAALTDWLRAKASFVIEGLKEADKDEFCRCELKLQKWYGDLRGKPFAIEAENSILDISGFSKQYNCAFIWQKDGVKKLNLYLIINYFKGGKLRFKKIKPEAFEANRFYTVINKKSGEIVPMEVNFNFDDPNLIILPLAFGKRQGREFIWNDLLSLETGSLKLANGRVIEKTLYNRRTRQDEPALFVALTFERREVLDSSNIKPMNLIGVDRGENIPAVIALTDPEGCPLSRFKDSLGNPTHILRIGESYKEKQRTIQAKKEVEQRRAGGYSRKYASKAKNLADDMVRNTARDLLYYAVTQDAMLIFENLSRGFGRQGKRTFMAERQYTRMEDWLTAKLAYEGLPSKTYLSKTLAQYTSKTCSNCGFTITSADYDRVLEKLKKTATGWMTTINGKELKVEGQITYYNRYKRQNVVKDLSVELDRLSEESVNNDISSWTKGRSGEALSLLKKRFSHRPVQEKFVCLNCGFETHADEQAALNIARSWLFLRSQEYKKYQTNKTTGNTDKRAFVETWQSFYRKKLKEVWKPAV

SEQ ID NO: 32927 - protein, 978 aa, synthetic construct
  REGION 1..978: note = engineered CasX variant
QEIKRISKIRRRLVKDSNTKKAGKTGPMKTLLVRVMTPDLRERLENLRKKPENIPQPISNTSRANLNKLLTDYTEMKKAILHVYWEEFQKDPVGLMSRVAQPASKKIDQNKLKPEMDEKGNLTTAGFACSQCGQPLFVYKLEQVSEKGKAYTNYFGRCNVAEHEKLILLAQLKPEKDSDEAVTYSLGKFGQRALDFYSIHVTKESTHPVKPLAQIAGNRYASAPVGKALSDACMGTIASFLSKYQDIIIEHQKVVKGNQKRLESLRELAGKENLEYPSVTLPPQPHTKEGVDAYNEVIARVRTWVNLNLWQKLKLSRDDAKPLLRLKGFPSFPLVERQANEVDWWDMVCNVKKLINEKKEDGKVFWQNLAGYKRQEALRPYLSSEEDRKKGKKFARYQLGDLLLHLEKKHGEDWGKVYDEAWERIDKKVEGLSKHIKLEEERRSEDAQSKAALTDWLRAKASFVIEGLKEADKDEFCRCELKLQKWYGDLRGKPFAIEAENSILDISGFSKQYNCAFIWQKDGVKKLNLYLIINYFKGGKLRFKKIKPEAFEANRFYTVINKKSGEIVPMEVNFNFDDPNLIILPLAFGKRQGREFIWNDLLSLETGSLKLANGRVIEKTLYNRRTRQDEPALFVALTFERREVLDSSNIKPMNLIGVDRGENIPAVIALTDPEGCPLSRFKDSLGNPTHILRIGESYKEKQRTIQAKKEVEQRRAGGYSRKYASKAKNLADDMVRNTARDLLYYAVTQDAMLIFENLSRGFGRQGKRTFMAERQYTRMEDWLTAKLAYEGLPSKTYLSKTLAQYTSKTCSNCGFTITSADYDRVLEKLKKTATGWMTTINGKELKVEGQITYYNRYKRQNVVKDLSVELDRLSEESVNNDISSWTKGRSGEALSLLKKRFSHRPVQEKFVCLNCGFETHADEQAALNIARSWLFLRSQEYKKYQTNKTTGNTDKRAFVETWQSFYRKKLKEVWKPAV

SEQ ID NO: 32928 - protein, 978 aa, synthetic construct
  REGION 1..978: note = engineered CasX variant
QEIKRISKIRRRLVKDSNTKKAGKTGPMKTLLVRVMTPDLRERLENLRKKPENIPQPISNTSRANLNKLLTDYTEMKKAILHVYWEEFQKDPVGLMSRVAQPASKKIDQNKLKPEMDEKGNLTTAGFACSQCGQPLFVYKLEQVSEKGKAYTNYFGRCNVAEHEKLILLAQLKPEKDSDEAVTYSLGKFGQRALDFYSIHVTKESTHPVKPLAQIAGNRYASVPVGKALSDACMGTIASFLSKYQDIIIEHQKVVKGNQKRLESLRELAGKENLEYPSVTLPPQPHTKEGVDAYNEVIARVRTWVNLNLWQKLKLSRDDAKPLLRLKGFPSFPLVERQANEVDWWDMVCNVKKLINEKKEDGKVFWQNLAGYKRQEALRPYLSSEEDRKKGKKFARYQLGDLLLHLEKKHGEDWGKVYDEAWERIDKKVEGLSKHIKLEEERRSEDAQSKAALTDWLRAKASFVIEGLKEADKDEFCRCELKLQKWYGDLRGKPFAIEAENSILDISGFSKQYNCAFIWQKDGVKKLNLYLIINYFKGGKLRFKKIKPEAFEANRFYTVINKKSGEIVPMEVNFNFDDPNLIILPLAFGKRQGREFIWNDLLSLETGSLKLANGRVIEKTLYNRRTRQDEPALFVALTFERREVLDSSNIKPMNLIGVDRGENIPAVIALTDPEGCPLSRFKDSLGNPTHILRIGESYKEKQRTIQAKKEVEQRRAGGYSRKYASKAKNLADDMVRNTARDLLYYAVTQDAMLIFENLSRGFGRQGKRTFMAERQYTRMEDWLTAKLAYEGLPSKTYLSKTLAQYTSKTCSNCGFTITSADYDRVLEKLKKTATGWMTTINGKELKVEGQITYYNRYKRQNVVKDLSVELDRLSEESVNNDISSWTKGRSGEALSLLKKRFSHRPVQEKFVCLNCGFETHADEQAALNIARSWLFLRSQEYKKYQTNKTTGNTDKRAFVETWQSFYRKKLKEVWKPAV

SEQ ID NO: 32929 - protein, 978 aa, synthetic construct
  REGION 1..978: note = engineered CasX variant
QEIKRISKIRRRLVKDSNTKKAGKTGPMKTLLVRVMTPDLRERLENLRKKPENIPQPISNTSRANLNKLLTDYTEMKKAILHVYWEEFQKDPVGLMSRVAQPASKKIDQNKLKPEMDEKGNLTTAGFACSQCGQPLFVYKLEQVSEKGKAYTNYFGRCNVAEHEKLIKLAQLKPEKDSDEAVTYSLGKFGQRALDFYSIHVTKESTHPVKPLAQIAGNRYASGPVGKALSDACMGTIASFLSKYQDIIIEHQKVVKGNQKRLESLRELAGKENLEYPSVTLPPQPHTKEGVDAYNEVIARVRTWVNLNLWQKLKLSRDDAKPLLRLKGFPSFPLVERQANEVDWWDMVCNVKKLINEKKEDGKVFWQNLAGYKRQEALRPYLSSEEDRKKGKKFARYQLGDLLLHLEKKHGEDWGKVYDEAWERIDKKVEGLSKHIKLEEERRSEDAQSKAALTDWLRAKASFVIEGLKEADKDEFCRCELKLQKWYGDLRGKPFAIEAENSILDISGFSKQYNCAFIWQKDGVKKLNLYLIINYFKGGKLRFKKIKPEAFEANRFYTVINKKSGEIVPMEVNFNFDDPNLIILPLAFGKRQGREFIWNDLLSLETGSLKLANGRVIEKTLYNRRTRQDEPALFVALTFERREVLDSSNIKPMNLIGVDRGENIPAVIALTDPEGCPLSRFKDSLGNPTHILRIGESYKEKQRTIQAKKEVEQRRAGGYSRKYASKAKNLADDMVRNTARDLLYYAVTQDAMLIFENLSRGFGRQGKRTFMAERQYTRMEDWLTAKLAYEGLPSKTYLSKTLAQYTSKTCSNCGFTITSADYDRVLEKLKKTATGWMTTINGKELKVEGQITYYNRYKRQNVVKDLSVELDRLSEESVNNDISSWTKGRSGEALSLLKKRFSHRPVQEKFVCLNCGFETHADEQAALNIARSWLFLRSQEYKKYQTNKTTGNTDKRAFVETWQSFYRKKLKEVWKPAV

SEQ ID NO: 32930 - protein, 977 aa, synthetic construct
  REGION 1..977: note = engineered CasX variant
QEIKRISKIRRRLVKDSNTKKAGKTGPMKTLLVRVMTPDLRERLENLRKKPENIPQPISNTSRANLNKLLTDYTEMKKAILHVYWEEFQKDPVGLMSRVAQPASKKIDQNKLKPEMDEKGNLTTAGFACSQCGQPLFVYKLEQVSEKGKAYTNYFGRCNVAEHEKLILLAQLKPEKDSDEAVTYSLGKFGQRALDFYSIHVTKESTHPVKPLAQIAGNRYASPVGKALSDACMGTIASFLSKYQDIIIEHQKVVKGNQKRLESLRELAGKENLEYPSVTLPPQPHTKEGVDAYNEVIARVRTWVNLNLWQKLKLSRDDAKPLLRLKGFPSFPLVERQANEVDWWDMVCNVKKLINEKKEDGKVFWQNLAGYKRQEALRPYLSSEEDRKKGKKFARYQLGDLLLHLEKKHGEDWGKVYDEAWERIDKKVEGLSKHIKLEEERRSEDAQSKAALTDWLRAKASFVIEGLKEADKDEFCRCELKLQKWYGDLRGKPFAIEAENSILDISGFSKQYNCAFIWQKDGVKKLNLYLIINYFKGGKLRFKKIKPEAFEANRFYTVINKKSGEIVPMEVNFNFDDPNLIILPLAFGKRQGREFIWNDLLSLETGSLKLANGRVIEKTLYNRRTRQDEPALFVALTFERREVLDSSNIKPMNLIGVDRGENIPAVIALTDPEGCPLSRFKDSLGNPTHILRIGESYKEKQRTIQAKKEVEQRRAGGYSRKYASKAKNLADDMVRNTARDLLYYAVTQDAMLIFENLSRGFGRQGKRTFMAERQYTRMEDWLTAKLAYEGLPSKTYLSKTLAQYTSKTCSNCGFTITSADYDRVLEKLKKTATGWMTTINGKELKVEGQITYYNRYKRQNVVKDLSVELDRLSEESVNNDISSWTKGRSGEALSLLKKRFSHRPVQEKFVCLNCGFETHADEQAALNIARSWLFLRSQEYKKYQTNKTTGNTDKRAFVETWQSFYRKKLKEVWKPAV

SEQ ID NO: 32931 - protein, 978 aa, synthetic construct
  REGION 1..978: note = engineered CasX variant
QEIKRISKIRRRLVKDSNTKKAGKTGPMKTLLVRVMTPDLRERLENLRKKPENIPQPISNTSRANLNKLLTDYTEMKKAILHVYWEEFQKDPVGLMSRVAQPASKKIDQNKLKPEMDEKGNLTTAGFACSQCGQPLFVYKLEQVSEKGKAYTNYFGRCNVAEHEKLILLAQLKPEKDSDEAVTYSLGKFGQRALDFYSIHVTKESTHPVKPLAQIAGNRYASYPVGKALSDACMGTIASFLSKYQDIIIEHQKVVKGNQKRLESLRELAGKENLEYPSVTLPPQPHTKEGVDAYNEVIARVRWWVNLNLWQKLKLSRDDAKPLLRLKGFPSFPLVERQANEVDWWDMVCNVKKLINEKKEDGKVFWQNLAGYKRQEALRPYLSSEEDRKKGKKFARYQLGDLLLHLEKKHGEDWGKVYDEAWERIDKKVEGLSKHIKLEEERRSEDAQSKAALTDWLRAKASFVIEGLKEADKDEFCRCELKLQKWYGDLRGKPFAIEAENSILDISGFSKQYNCAFIWQKDGVKKLNLYLIINYFKGGKLRFKKIKPEAFEANRFYTVINKKSGEIVPMEVNFNFDDPNLIILPLAFGKRQGREFIWNDLLSLETGSLKLANGRVIEKTLYNRRTRQDEPALFVALTFERREVLDSSNIKPMNLIGVDRGENIPAVIALTDPEGCPLSRFKDSLGNPTHILRIGESYKEKQRTIQAKKEVEQRRAGGYSRKYASKAKNLADDMVRNTARDLLYYAVTQDAMLIFENLSRGFGRQGKRTFMAERQYTRMEDWLTAKLAYEGLPSKTYLSKTLAQYTSKTCSNCGFTITSADYDRVLEKLKKTATGWMTTINGKELKVEGQITYYNRYKRQNVVKDLSVELDRLSEESVNNDISSWTKGRSGEALSLLKKRFSHRPVQEKFVCLNCGFETHADEQAALNIARSWLFLRSQEYKKYQTNKTTGNTDKRAFVETWQSFYRKKLKEVWKPAV

SEQ ID NO: 32932 - protein, 978 aa, synthetic construct
  REGION 1..978: note = engineered CasX variant
QEIKRISKIRRRLVKDSNTKKAGKTGPMKTLLVRVMTPDLRERLENLRKKPENIPQPISNTSRANLNKLLTDYTEMKKAILHVYWEEFQKDPVGLMSRVAQPASKKIDQNKLKPEMDEKGNLTTAGFACSQCGQPLFVYKLEQVSEKGKAYTNYFGRCNVAEHEKLILLAQLKPEKDSDEAVTYSLGKFGQRALDFYSIHVTKESTHPVKPLAQIAGNRYASHPVGKALSDACMGTIASFLSKYQDIIIEHQKVVKGNQKRLESLRELAGKENLEYPSVTLPPQPHTKEGVDAYNEVIARVRWWVNLNLWQKLKLSRDDAKPLLRLKGFPSFPLVERQANEVDWWDMVCNVKKLINEKKEDGKVFWQNLAGYKRQEALRPYLSSEEDRKKGKKFARYQLGDLLLHLEKKHGEDWGKVYDEAWERIDKKVEGLSKHIKLEEERRSEDAQSKAALTDWLRAKASFVIEGLKEADKDEFCRCELKLQKWYGDLRGKPFAIEAENSILDISGFSKQYNCAFIWQKDGVKKLNLYLIINYFKGGKLRFKKIKPEAFEANRFYTVINKKSGEIVPMEVNFNFDDPNLIILPLAFGKRQGREFIWNDLLSLETGSLKLANGRVIEKTLYNRRTRQDEPALFVALTFERREVLDSSNIKPMNLIGVDRGENIPAVIALTDPEGCPLSRFKDSLGNPTHILRIGESYKEKQRTIQAKKEVEQRRAGGYSRKYASKAKNLADDMVRNTARDLLYYAVTQDAMLIFENLSRGFGRQGKRTFMAERQYTRMEDWLTAKLAYEGLPSKTYLSKTLAQYTSKTCSNCGFTITSADYDRVLEKLKKTATGWMTTINGKELKVEGQITYYNRYKRQNVVKDLSVELDRLSEESVNNDISSWTKGRSGEALSLLKKRFSHRPVQEKFVCLNCGFETHADEQAALNIARSWLFLRSQEYKKYQTNKTTGNTDKRAFVETWQSFYRKKLKEVWKPAV

SEQ ID NO: 32933 - protein, 978 aa, synthetic construct
  REGION 1..978: note = engineered CasX variant
QEIKRISKIRRRLVKDSNTKKAGKTGPMKTLLVRVMTPDLRERLENLRKKPENIPQPISNTSRANLNKLLTDYTEMKKAILHVYWEEFQKDPVGLMSRVAQPASKKIDQNKLKPEMDEKGNLTTAGFACSQCGQPLFVYKLEQVSEKGKAYTNYFGRCNVAEHEKLILLAQLKPEKDSDEAVTYSLGKFGQRALDFYSIHVTKESTHPVKPLAQIAGNRYASSPVGKALSDACMGTIASFLSKYQDIIIEHQKVVKGNQKRLESLRELAGKENLEYPSVTLPPQPHTKEGVDAYNEVIARVRWWVNLNLWQKLKLSRDDAKPLLRLKGFPSFPLVERQANEVDWWDMVCNVKKLINEKKEDGKVFWQNLAGYKRQEALRPYLSSEEDRKKGKKFARYQLGDLLLHLEKKHGEDWGKVYDEAWERIDKKVEGLSKHIKLEEERRSEDAQSKAALTDWLRAKASFVIEGLKEADKDEFCRCELKLQKWYGDLRGKPFAIEAENSILDISGFSKQYNCAFIWQKDGVKKLNLYLIINYFKGGKLRFKKIKPEAFEANRFYTVINKKSGEIVPMEVNFNFDDPNLIILPLAFGKRQGREFIWNDLLSLETGSLKLANGRVIEKTLYNRRTRQDEPALFVALTFERREVLDSSNIKPMNLIGVDRGENIPAVIALTDPEGCPLSRFKDSLGNPTHILRIGESYKEKQRTIQAKKEVEQRRAGGYSRKYASKAKNLADDMVRNTARDLLYYAVTQDAMLIFENLSRGFGRQGKRTFMAERQYTRMEDWLTAKLAYEGLPSKTYLSKTLAQYTSKTCSNCGFTITSADYDRVLEKLKKTATGWMTTINGKELKVEGQITYYNRYKRQNVVKDLSVELDRLSEESVNNDISSWTKGRSGEALSLLKKRFSHRPVQEKFVCLNCGFETHADEQAALNIARSWLFLRSQEYKKYQTNKTTGNTDKRAFVETWQSFYRKKLKEVWKPAV

SEQ ID NO: 32934 - protein, 978 aa, synthetic construct
  REGION 1..978: note = engineered CasX variant
QEIKRISKIRRRLVKDSNTKKAGKTGPMKTLLVRVMTPDLRERLENLRKKPENIPQPISNTSRANLNKLLTDYTEMKKAILHVYWEEFQKDPVGLMSRVAQPASKKIDQNKLKPEMDEKGNLTTAGFACSQCGQPLFVYKLEQVSEKGKAYTNYFGRCNVAEHEKLILLAQLKPEKDSDEAVTYSLGKFGQRALDFYSIHVTKESTHPVKPLAQIAGNRYASTPVGKALSDACMGTIASFLSKYQDIIIEHQKVVKGNQKRLESLRELAGKENLEYPSVTLPPQPHTKEGVDAYNEVIARVRWWVNLNLWQKLKLSRDDAKPLLRLKGFPSFPLVERQANEVDWWDMVCNVKKLINEKKEDGKVFWQNLAGYKRQEALRPYLSSEEDRKKGKKFARYQLGDLLLHLEKKHGEDWGKVYDEAWERIDKKVEGLSKHIKLEEERRSEDAQSKAALTDWLRAKASFVIEGLKEADKDEFCRCELKLQKWYGDLRGKPFAIEAENSILDISGFSKQYNCAFIWQKDGVKKLNLYLIINYFKGGKLRFKKIKPEAFEANRFYTVINKKSGEIVPMEVNFNFDDPNLIILPLAFGKRQGREFIWNDLLSLETGSLKLANGRVIEKTLYNRRTRQDEPALFVALTFERREVLDSSNIKPMNLIGVDRGENIPAVIALTDPEGCPLSRFKDSLGNPTHILRIGESYKEKQRTIQAKKEVEQRRAGGYSRKYASKAKNLADDMVRNTARDLLYYAVTQDAMLIFENLSRGFGRQGKRTFMAERQYTRMEDWLTAKLAYEGLPSKTYLSKTLAQYTSKTCSNCGFTITSADYDRVLEKLKKTATGWMTTINGKELKVEGQITYYNRYKRQNVVKDLSVELDRLSEESVNNDISSWTKGRSGEALSLLKKRFSHRPVQEKFVCLNCGFETHADEQAALNIARSWLFLRSQEYKKYQTNKTTGNTDKRAFVETWQSFYRKKLKEVWKPAV

SEQ ID NO: 32935 - protein, 978 aa, synthetic construct
  REGION 1..978: note = engineered CasX variant
QEIKRISKIRRRLVKDSNTKKAGKTGPMKTLLVRVMTPDLRERLENLRKKPENIPQPISNTSRANLNKLLTDYTEMKKAILHVYWEEFQKDPVGLMSRVAQPASKKIDQNKLKPEMDEKGNLTTAGFACSQCGQPLFVYKLEQVSEKGKAYTNYFGRCNVAEHEKLILLAQLKPEKDSDEAVTYSLGKFGQRALDFYSIHVTKESTHPVKPLAQIAGNRYASAPVGKALSDACMGTIASFLSKYQDIIIEHQKVVKGNQKRLESLRELAGKENLEYPSVTLPPQPHTKEGVDAYNEVIARVRWWVNLNLWQKLKLSRDDAKPLLRLKGFPSFPLVERQANEVDWWDMVCNVKKLINEKKEDGKVFWQNLAGYKRQEALRPYLSSEEDRKKGKKFARYQLGDLLLHLEKKHGEDWGKVYDEAWERIDKKVEGLSKHIKLEEERRSEDAQSKAALTDWLRAKASFVIEGLKEADKDEFCRCELKLQKWYGDLRGKPFAIEAENSILDISGFSKQYNCAFIWQKDGVKKLNLYLIINYFKGGKLRFKKIKPEAFEANRFYTVINKKSGEIVPMEVNFNFDDPNLIILPLAFGKRQGREFIWNDLLSLETGSLKLANGRVIEKTLYNRRTRQDEPALFVALTFERREVLDSSNIKPMNLIGVDRGENIPAVIALTDPEGCPLSRFKDSLGNPTHILRIGESYKEKQRTIQAKKEVEQRRAGGYSRKYASKAKNLADDMVRNTARDLLYYAVTQDAMLIFENLSRGFGRQGKRTFMAERQYTRMEDWLTAKLAYEGLPSKTYLSKTLAQYTSKTCSNCGFTITSADYDRVLEKLKKTATGWMTTINGKELKVEGQITYYNRYKRQNVVKDLSVELDRLSEESVNNDISSWTKGRSGEALSLLKKRFSHRPVQEKFVCLNCGFETHADEQAALNIARSWLFLRSQEYKKYQTNKTTGNTDKRAFVETWQSFYRKKLKEVWKPAV

SEQ ID NO: 32936 - protein, 978 aa, synthetic construct
  REGION 1..978: note = engineered CasX variant
QEIKRISKIRRRLVKDSNTKKAGKTGPMKTLLVRVMTPDLRERLENLRKKPENIPQPISNTSRANLNKLLTDYTEMKKAILHVYWEEFQKDPVGLMSRVAQPASKKIDQNKLKPEMDEKGNLTTAGFACSQCGQPLFVYKLEQVSEKGKAYTNYFGRCNVAEHEKLILLAQLKPEKDSDEAVTYSLGKFGQRALDFYSIHVTKESTHPVKPLAQIAGNRYASVPVGKALSDACMGTIASFLSKYQDIIIEHQKVVKGNQKRLESLRELAGKENLEYPSVTLPPQPHTKEGVDAYNEVIARVRWWVNLNLWQKLKLSRDDAKPLLRLKGFPSFPLVERQANEVDWWDMVCNVKKLINEKKEDGKVFWQNLAGYKRQEALRPYLSSEEDRKKGKKFARYQLGDLLLHLEKKHGEDWGKVYDEAWERIDKKVEGLSKHIKLEEERRSEDAQSKAALTDWLRAKASFVIEGLKEADKDEFCRCELKLQKWYGDLRGKPFAIEAENSILDISGFSKQYNCAFIWQKDGVKKLNLYLIINYFKGGKLRFKKIKPEAFEANRFYTVINKKSGEIVPMEVNFNFDDPNLIILPLAFGKRQGREFIWNDLLSLETGSLKLANGRVIEKTLYNRRTRQDEPALFVALTFERREVLDSSNIKPMNLIGVDRGENIPAVIALTDPEGCPLSRFKDSLGNPTHILRIGESYKEKQRTIQAKKEVEQRRAGGYSRKYASKAKNLADDMVRNTARDLLYYAVTQDAMLIFENLSRGFGRQGKRTFMAERQYTRMEDWLTAKLAYEGLPSKTYLSKTLAQYTSKTCSNCGFTITSADYDRVLEKLKKTATGWMTTINGKELKVEGQITYYNRYKRQNVVKDLSVELDRLSEESVNNDISSWTKGRSGEALSLLKKRFSHRPVQEKFVCLNCGFETHADEQAALNIARSWLFLRSQEYKKYQTNKTTGNTDKRAFVETWQSFYRKKLKEVWKPAV

SEQ ID NO: 32937 - protein, 978 aa, synthetic construct
  REGION 1..978: note = engineered CasX variant
QEIKRISKIRRRLVKDSNTKKAGKTGPMKTLLVRVMTPDLRERLENLRKKPENIPQPISNTSRANLNKLLTDYTEMKKAILHVYWEEFQKDPVGLMSRVAQPASKKIDQNKLKPEMDEKGNLTTAGFACSQCGQPLFVYKLEQVSEKGKAYTNYFGRCNVAEHEKLIKLAQLKPEKDSDEAVTYSLGKFGQRALDFYSIHVTKESTHPVKPLAQIAGNRYASGPVGKALSDACMGTIASFLSKYQDIIIEHQKVVKGNQKRLESLRELAGKENLEYPSVTLPPQPHTKEGVDAYNEVIARVRWWVNLNLWQKLKLSRDDAKPLLRLKGFPSFPLVERQANEVDWWDMVCNVKKLINEKKEDGKVFWQNLAGYKRQEALRPYLSSEEDRKKGKKFARYQLGDLLLHLEKKHGEDWGKVYDEAWERIDKKVEGLSKHIKLEEERRSEDAQSKAALTDWLRAKASFVIEGLKEADKDEFCRCELKLQKWYGDLRGKPFAIEAENSILDISGFSKQYNCAFIWQKDGVKKLNLYLIINYFKGGKLRFKKIKPEAFEANRFYTVINKKSGEIVPMEVNFNFDDPNLIILPLAFGKRQGREFIWNDLLSLETGSLKLANGRVIEKTLYNRRTRQDEPALFVALTFERREVLDSSNIKPMNLIGVDRGENIPAVIALTDPEGCPLSRFKDSLGNPTHILRIGESYKEKQRTIQAKKEVEQRRAGGYSRKYASKAKNLADDMVRNTARDLLYYAVTQDAMLIFENLSRGFGRQGKRTFMAERQYTRMEDWLTAKLAYEGLPSKTYLSKTLAQYTSKTCSNCGFTITSADYDRVLEKLKKTATGWMTTINGKELKVEGQITYYNRYKRQNVVKDLSVELDRLSEESVNNDISSWTKGRSGEALSLLKKRFSHRPVQEKFVCLNCGFETHADEQAALNIARSWLFLRSQEYKKYQTNKTTGNTDKRAFVETWQSFYRKKLKEVWKPAV

SEQ ID NO: 32938 - protein, 977 aa, synthetic construct
  REGION 1..977: note = engineered CasX variant
QEIKRISKIRRRLVKDSNTKKAGKTGPMKTLLVRVMTPDLRERLENLRKKPENIPQPISNTSRANLNKLLTDYTEMKKAILHVYWEEFQKDPVGLMSRVAQPASKKIDQNKLKPEMDEKGNLTTAGFACSQCGQPLFVYKLEQVSEKGKAYTNYFGRCNVAEHEKLILLAQLKPEKDSDEAVTYSLGKFGQRALDFYSIHVTKESTHPVKPLAQIAGNRYASPVGKALSDACMGTIASFLSKYQDIIIEHQKVVKGNQKRLESLRELAGKENLEYPSVTLPPQPHTKEGVDAYNEVIARVRWWVNLNLWQKLKLSRDDAKPLLRLKGFPSFPLVERQANEVDWWDMVCNVKKLINEKKEDGKVFWQNLAGYKRQEALRPYLSSEEDRKKGKKFARYQLGDLLLHLEKKHGEDWGKVYDEAWERIDKKVEGLSKHIKLEEERRSEDAQSKAALTDWLRAKASFVIEGLKEADKDEFCRCELKLQKWYGDLRGKPFAIEAENSILDISGFSKQYNCAFIWQKDGVKKLNLYLIINYFKGGKLRFKKIKPEAFEANRFYTVINKKSGEIVPMEVNFNFDDPNLIILPLAFGKRQGREFIWNDLLSLETGSLKLANGRVIEKTLYNRRTRQDEPALFVALTFERREVLDSSNIKPMNLIGVDRGENIPAVIALTDPEGCPLSRFKDSLGNPTHILRIGESYKEKQRTIQAKKEVEQRRAGGYSRKYASKAKNLADDMVRNTARDLLYYAVTQDAMLIFENLSRGFGRQGKRTFMAERQYTRMEDWLTAKLAYEGLPSKTYLSKTLAQYTSKTCSNCGFTITSADYDRVLEKLKKTATGWMTTINGKELKVEGQITYYNRYKRQNVVKDLSVELDRLSEESVNNDISSWTKGRSGEALSLLKKRFSHRPVQEKFVCLNCGFETHADEQAALNIARSWLFLRSQEYKKYQTNKTTGNTDKRAFVETWQSFYRKKLKEVWKPAV

SEQ ID NO: 32939 - protein, 979 aa, synthetic construct
  REGION 1..979: note = engineered CasX variant
QEIKRISKIRRRLVKDSNTKKAGKTGPMKTLLVRVMTPDLRERLENLRKKPENIPQPISNTSRANLNKLLTDYTEMKKAILHVYWEEFQKDPVGLMSRVAQPASKKIDQNKLKPEMDEKGNLTTAGFACSQCGQPLFVYKLEQVSEKGKAYTNYFGRCNVAEHEKLILLAQLKPEKDSDEAVTYSLGKFGQRALDFYSIHVTKESTHPVKPLAQIAGNRYASYPVGKALSDACMGTIASFLSKYQDIIIEHQKVVKGNQKRLESLRELAGKENLEYPSVTLPPQPHTKEGVDAYNEVIARVRMWVNLNLWQKLKLSRDDAKPLLRLKGFPSFPLVERQQANEVDWWDMVCNVKKLINEKKEDGKVFWQNLAGYKRQEALRPYLSSEEDRKKGKKFARYQLGDLLLHLEKKHGEDWGKVYDEAWERIDKKVEGLSKHIKLEEERRSEDAQSKAALTDWLRAKASFVIEGLKEADKDEFCRCELKLQKWYGDLRGKPFAIEAENSILDISGFSKQYNCAFIWQKDGVKKLNLYLIINYFKGGKLRFKKIKPEAFEANRFYTVINKKSGEIVPMEVNFNFDDPNLIILPLAFGKRQGREFIWNDLLSLETGSLKLANGRVIEKTLYNRRTRQDEPALFVALTFERREVLDSSNIKPMNLIGVDRGENIPAVIALTDPEGCPLSRFKDSLGNPTHILRIGESYKEKQRTIQAKKEVEQRRAGGYSRKYASKAKNLADDMVRNTARDLLYYAVTQDAMLIFENLSRGFGRQGKRTFMAERQYTRMEDWLTAKLAYEGLPSKTYLSKTLAQYTSKTCSNCGFTITSADYDRVLEKLKKTATGWMTTINGKELKVEGQITYYNRYKRQNVVKDLSVELDRLSEESVNNDISSWTKGRSGEALSLLKKRFSHRPVQEKFVCLNCGFETHADEQAALNIARSWLFLRSQEYKKYQTNKTTGNTDKRAFVETWQSFYRKKLKEVWKPAV

SEQ ID NO: 32940 - protein, 979 aa, synthetic construct
  REGION 1..979: note = engineered CasX variant
QEIKRISKIRRRLVKDSNTKKAGKTGPMKTLLVRVMTPDLRERLENLRKKPENIPQPISNTSRANLNKLLTDYTEMKKAILHVYWEEFQKDPVGLMSRVAQPASKKIDQNKLKPEMDEKGNLTTAGFACSQCGQPLFVYKLEQVSEKGKAYTNYFGRCNVAEHEKLILLAQLKPEKDSDEAVTYSLGKFGQRALDFYSIHVTKESTHPVKPLAQIAGNRYASHPVGKALSDACMGTIASFLSKYQDIIIEHQKVVKGNQKRLESLRELAGKENLEYPSVTLPPQPHTKEGVDAYNEVIARVRMWVNLNLWQKLKLSRDDAKPLLRLKGFPSFPLVERQQANEVDWWDMVCNVKKLINEKKEDGKVFWQNLAGYKRQEALRPYLSSEEDRKKGKKFARYQLGDLLLHLEKKHGEDWGKVYDEAWERIDKKVEGLSKHIKLEEERRSEDAQSKAALTDWLRAKASFVIEGLKEADKDEFCRCELKLQKWYGDLRGKPFAIEAENSILDISGFSKQYNCAFIWQKDGVKKLNLYLIINYFKGGKLRFKKIKPEAFEANRFYTVINKKSGEIVPMEVNFNFDDPNLIILPLAFGKRQGREFIWNDLLSLETGSLKLANGRVIEKTLYNRRTRQDEPALFVALTFERREVLDSSNIKPMNLIGVDRGENIPAVIALTDPEGCPLSRFKDSLGNPTHILRIGESYKEKQRTIQAKKEVEQRRAGGYSRKYASKAKNLADDMVRNTARDLLYYAVTQDAMLIFENLSRGFGRQGKRTFMAERQYTRMEDWLTAKLAYEGLPSKTYLSKTLAQYTSKTCSNCGFTITSADYDRVLEKLKKTATGWMTTINGKELKVEGQITYYNRYKRQNVVKDLSVELDRLSEESVNNDISSWTKGRSGEALSLLKKRFSHRPVQEKFVCLNCGFETHADEQAALNIARSWLFLRSQEYKKYQTNKTTGNTDKRAFVETWQSFYRKKLKEVWKPAV

SEQ ID NO: 32941 - protein, 979 aa, synthetic construct
  REGION 1..979: note = engineered CasX variant
QEIKRISKIRRRLVKDSNTKKAGKTGPMKTLLVRVMTPDLRERLENLRKKPENIPQPISNTSRANLNKLLTDYTEMKKAILHVYWEEFQKDPVGLMSRVAQPASKKIDQNKLKPEMDEKGNLTTAGFACSQCGQPLFVYKLEQVSEKGKAYTNYFGRCNVAEHEKLILLAQLKPEKDSDEAVTYSLGKFGQRALDFYSIHVTKESTHPVKPLAQIAGNRYASSPVGKALSDACMGTIASFLSKYQDIIIEHQKVVKGNQKRLESLRELAGKENLEYPSVTLPPQPHTKEGVDAYNEVIARVRMWVNLNLWQKLKLSRDDAKPLLRLKGFPSFPLVERQQANEVDWWDMVCNVKKLINEKKEDGKVFWQNLAGYKRQEALRPYLSSEEDRKKGKKFARYQLGDLLLHLEKKHGEDWGKVYDEAWERIDKKVEGLSKHIKLEEERRSEDAQSKAALTDWLRAKASFVIEGLKEADKDEFCRCELKLQKWYGDLRGKPFAIEAENSILDISGFSKQYNCAFIWQKDGVKKLNLYLIINYFKGGKLRFKKIKPEAFEANRFYTVINKKSGEIVPMEVNFNFDDPNLIILPLAFGKRQGREFIWNDLLSLETGSLKLANGRVIEKTLYNRRTRQDEPALFVALTFERREVLDSSNIKPMNLIGVDRGENIPAVIALTDPEGCPLSRFKDSLGNPTHILRIGESYKEKQRTIQAKKEVEQRRAGGYSRKYASKAKNLADDMVRNTARDLLYYAVTQDAMLIFENLSRGFGRQGKRTFMAERQYTRMEDWLTAKLAYEGLPSKTYLSKTLAQYTSKTCSNCGFTITSADYDRVLEKLKKTATGWMTTINGKELKVEGQITYYNRYKRQNVVKDLSVELDRLSEESVNNDISSWTKGRSGEALSLLKKRFSHRPVQEKFVCLNCGFETHADEQAALNIARSWLFLRSQEYKKYQTNKTTGNTDKRAFVETWQSFYRKKLKEVWKPAV

SEQ ID NO: 32942 - protein, 979 aa, synthetic construct
  REGION 1..979: note = engineered CasX variant
QEIKRISKIRRRLVKDSNTKKAGKTGPMKTLLVRVMTPDLRERLENLRKKPENIPQPISNTSRANLNKLLTDYTEMKKAILHVYWEEFQKDPVGLMSRVAQPASKKIDQNKLKPEMDEKGNLTTAGFACSQCGQPLFVYKLEQVSEKGKAYTNYFGRCNVAEHEKLILLAQLKPEKDSDEAVTYSLGKFGQRALDFYSIHVTKESTHPVKPLAQIAGNRYASTPVGKALSDACMGTIASFLSKYQDIIIEHQKVVKGNQKRLESLRELAGKENLEYPSVTLPPQPHTKEGVDAYNEVIARVRMWVNLNLWQKLKLSRDDAKPLLRLKGFPSFPLVERQQANEVDWWDMVCNVKKLINEKKEDGKVFWQNLAGYKRQEALRPYLSSEEDRKKGKKFARYQLGDLLLHLEKKHGEDWGKVYDEAWERIDKKVEGLSKHIKLEEERRSEDAQSKAALTDWLRAKASFVIEGLKEADKDEFCRCELKLQKWYGDLRGKPFAIEAENSILDISGFSKQYNCAFIWQKDGVKKLNLYLIINYFKGGKLRFKKIKPEAFEANRFYTVINKKSGEIVPMEVNFNFDDPNLIILPLAFGKRQGREFIWNDLLSLETGSLKLANGRVIEKTLYNRRTRQDEPALFVALTFERREVLDSSNIKPMNLIGVDRGENIPAVIALTDPEGCPLSRFKDSLGNPTHILRIGESYKEKQRTIQAKKEVEQRRAGGYSRKYASKAKNLADDMVRNTARDLLYYAVTQDAMLIFENLSRGFGRQGKRTFMAERQYTRMEDWLTAKLAYEGLPSKTYLSKTLAQYTSKTCSNCGFTITSADYDRVLEKLKKTATGWMTTINGKELKVEGQITYYNRYKRQNVVKDLSVELDRLSEESVNNDISSWTKGRSGEALSLLKKRFSHRPVQEKFVCLNCGFETHADEQAALNIARSWLFLRSQEYKKYQTNKTTGNTDKRAFVETWQSFYRKKLKEVWKPAV

SEQ ID NO: 32943 - protein, 979 aa, synthetic construct
  REGION 1..979: note = engineered CasX variant
QEIKRISKIRRRLVKDSNTKKAGKTGPMKTLLVRVMTPDLRERLENLRKKPENIPQPISNTSRANLNKLLTDYTEMKKAILHVYWEEFQKDPVGLMSRVAQPASKKIDQNKLKPEMDEKGNLTTAGFACSQCGQPLFVYKLEQVSEKGKAYTNYFGRCNVAEHEKLILLAQLKPEKDSDEAVTYSLGKFGQRALDFYSIHVTKESTHPVKPLAQIAGNRYASAPVGKALSDACMGTIASFLSKYQDIIIEHQKVVKGNQKRLESLRELAGKENLEYPSVTLPPQPHTKEGVDAYNEVIARVRMWVNLNLWQKLKLSRDDAKPLLRLKGFPSFPLVERQQANEVDWWDMVCNVKKLINEKKEDGKVFWQNLAGYKRQEALRPYLSSEEDRKKGKKFARYQLGDLLLHLEKKHGEDWGKVYDEAWERIDKKVEGLSKHIKLEEERRSEDAQSKAALTDWLRAKASFVIEGLKEADKDEFCRCELKLQKWYGDLRGKPFAIEAENSILDISGFSKQYNCAFIWQKDGVKKLNLYLIINYFKGGKLRFKKIKPEAFEANRFYTVINKKSGEIVPMEVNFNFDDPNLIILPLAFGKRQGREFIWNDLLSLETGSLKLANGRVIEKTLYNRRTRQDEPALFVALTFERREVLDSSNIKPMNLIGVDRGENIPAVIALTDPEGCPLSRFKDSLGNPTHILRIGESYKEKQRTIQAKKEVEQRRAGGYSRKYASKAKNLADDMVRNTARDLLYYAVTQDAMLIFENLSRGFGRQGKRTFMAERQYTRMEDWLTAKLAYEGLPSKTYLSKTLAQYTSKTCSNCGFTITSADYDRVLEKLKKTATGWMTTINGKELKVEGQITYYNRYKRQNVVKDLSVELDRLSEESVNNDISSWTKGRSGEALSLLKKRFSHRPVQEKFVCLNCGFETHADEQAALNIARSWLFLRSQEYKKYQTNKTTGNTDKRAFVETWQSFYRKKLKEVWKPAV

SEQ ID NO: 32944 - protein, 979 aa, synthetic construct
  REGION 1..979: note = engineered CasX variant
QEIKRISKIRRRLVKDSNTKKAGKTGPMKTLLVRVMTPDLRERLENLRKKPENIPQPISNTSRANLNKLLTDYTEMKKAILHVYWEEFQKDPVGLMSRVAQPASKKIDQNKLKPEMDEKGNLTTAGFACSQCGQPLFVYKLEQVSEKGKAYTNYFGRCNVAEHEKLILLAQLKPEKDSDEAVTYSLGKFGQRALDFYSIHVTKESTHPVKPLAQIAGNRYASVPVGKALSDACMGTIASFLSKYQDIIIEHQKVVKGNQKRLESLRELAGKENLEYPSVTLPPQPHTKEGVDAYNEVIARVRMWVNLNLWQKLKLSRDDAKPLLRLKGFPSFPLVERQQANEVDWWDMVCNVKKLINEKKEDGKVFWQNLAGYKRQEALRPYLSSEEDRKKGKKFARYQLGDLLLHLEKKHGEDWGKVYDEAWERIDKKVEGLSKHIKLEEERRSEDAQSKAALTDWLRAKASFVIEGLKEADKDEFCRCELKLQKWYGDLRGKPFAIEAENSILDISGFSKQYNCAFIWQKDGVKKLNLYLIINYFKGGKLRFKKIKPEAFEANRFYTVINKKSGEIVPMEVNFNFDDPNLIILPLAFGKRQGREFIWNDLLSLETGSLKLANGRVIEKTLYNRRTRQDEPALFVALTFERREVLDSSNIKPMNLIGVDRGENIPAVIALTDPEGCPLSRFKDSLGNPTHILRIGESYKEKQRTIQAKKEVEQRRAGGYSRKYASKAKNLADDMVRNTARDLLYYAVTQDAMLIFENLSRGFGRQGKRTFMAERQYTRMEDWLTAKLAYEGLPSKTYLSKTLAQYTSKTCSNCGFTITSADYDRVLEKLKKTATGWMTTINGKELKVEGQITYYNRYKRQNVVKDLSVELDRLSEESVNNDISSWTKGRSGEALSLLKKRFSHRPVQEKFVCLNCGFETHADEQAALNIARSWLFLRSQEYKKYQTNKTTGNTDKRAFVETWQSFYRKKLKEVWKPAV

SEQ ID NO: 32945 - protein, 979 aa, synthetic construct
  REGION 1..979: note = engineered CasX variant
QEIKRISKIRRRLVKDSNTKKAGKTGPMKTLLVRVMTPDLRERLENLRKKPENIPQPISNTSRANLNKLLTDYTEMKKAILHVYWEEFQKDPVGLMSRVAQPASKKIDQNKLKPEMDEKGNLTTAGFACSQCGQPLFVYKLEQVSEKGKAYTNYFGRCNVAEHEKLIKLAQLKPEKDSDEAVTYSLGKFGQRALDFYSIHVTKESTHPVKPLAQIAGNRYASGPVGKALSDACMGTIASFLSKYQDIIIEHQKVVKGNQKRLESLRELAGKENLEYPSVTLPPQPHTKEGVDAYNEVIARVRMWVNLNLWQKLKLSRDDAKPLLRLKGFPSFPLVERQQANEVDWWDMVCNVKKLINEKKEDGKVFWQNLAGYKRQEALRPYLSSEEDRKKGKKFARYQLGDLLLHLEKKHGEDWGKVYDEAWERIDKKVEGLSKHIKLEEERRSEDAQSKAALTDWLRAKASFVIEGLKEADKDEFCRCELKLQKWYGDLRGKPFAIEAENSILDISGFSKQYNCAFIWQKDGVKKLNLYLIINYFKGGKLRFKKIKPEAFEANRFYTVINKKSGEIVPMEVNFNFDDPNLIILPLAFGKRQGREFIWNDLLSLETGSLKLANGRVIEKTLYNRRTRQDEPALFVALTFERREVLDSSNIKPMNLIGVDRGENIPAVIALTDPEGCPLSRFKDSLGNPTHILRIGESYKEKQRTIQAKKEVEQRRAGGYSRKYASKAKNLADDMVRNTARDLLYYAVTQDAMLIFENLSRGFGRQGKRTFMAERQYTRMEDWLTAKLAYEGLPSKTYLSKTLAQYTSKTCSNCGFTITSADYDRVLEKLKKTATGWMTTINGKELKVEGQITYYNRYKRQNVVKDLSVELDRLSEESVNNDISSWTKGRSGEALSLLKKRFSHRPVQEKFVCLNCGFETHADEQAALNIARSWLFLRSQEYKKYQTNKTTGNTDKRAFVETWQSFYRKKLKEVWKPAV

SEQ ID NO: 32946 - protein, 978 aa, synthetic construct
  REGION 1..978: note = engineered CasX variant
QEIKRISKIRRRLVKDSNTKKAGKTGPMKTLLVRVMTPDLRERLENLRKKPENIPQPISNTSRANLNKLLTDYTEMKKAILHVYWEEFQKDPVGLMSRVAQPASKKIDQNKLKPEMDEKGNLTTAGFACSQCGQPLFVYKLEQVSEKGKAYTNYFGRCNVAEHEKLILLAQLKPEKDSDEAVTYSLGKFGQRALDFYSIHVTKESTHPVKPLAQIAGNRYASPVGKALSDACMGTIASFLSKYQDIIIEHQKVVKGNQKRLESLRELAGKENLEYPSVTLPPQPHTKEGVDAYNEVIARVRMWVNLNLWQKLKLSRDDAKPLLRLKGFPSFPLVERQQANEVDWWDMVCNVKKLINEKKEDGKVFWQNLAGYKRQEALRPYLSSEEDRKKGKKFARYQLGDLLLHLEKKHGEDWGKVYDEAWERIDKKVEGLSKHIKLEEERRSEDAQSKAALTDWLRAKASFVIEGLKEADKDEFCRCELKLQKWYGDLRGKPFAIEAENSILDISGFSKQYNCAFIWQKDGVKKLNLYLIINYFKGGKLRFKKIKPEAFEANRFYTVINKKSGEIVPMEVNFNFDDPNLIILPLAFGKRQGREFIWNDLLSLETGSLKLANGRVIEKTLYNRRTRQDEPALFVALTFERREVLDSSNIKPMNLIGVDRGENIPAVIALTDPEGCPLSRFKDSLGNPTHILRIGESYKEKQRTIQAKKEVEQRRAGGYSRKYASKAKNLADDMVRNTARDLLYYAVTQDAMLIFENLSRGFGRQGKRTFMAERQYTRMEDWLTAKLAYEGLPSKTYLSKTLAQYTSKTCSNCGFTITSADYDRVLEKLKKTATGWMTTINGKELKVEGQITYYNRYKRQNVVKDLSVELDRLSEESVNNDISSWTKGRSGEALSLLKKRFSHRPVQEKFVCLNCGFETHADEQAALNIARSWLFLRSQEYKKYQTNKTTGNTDKRAFVETWQSFYRKKLKEVWKPAV

SEQ ID NO: 32947 - protein, 979 aa, synthetic construct
  REGION 1..979: note = engineered CasX variant
QEIKRISKIRRRLVKDSNTKKAGKTGPMKTLLVRVMTPDLRERLENLRKKPENIPQPISNTSRANLNKLLTDYTEMKKAILHVYWEEFQKDPVGLMSRVAQPASKKIDQNKLKPEMDEKGNLTTAGFACSQCGQPLFVYKLEQVSEKGKAYTNYFGRCNVAEHEKLILLAQLKPEKDSDEAVTYSLGKFGQRALDFYSIHVTKESTHPVKPLAQIAGNRYASYPVGKALSDACMGTIASFLSKYQDIIIEHQKVVKGNQKRLESLRELAGKENLEYPSVTLPPQPHTKEGVDAYNEVIARVRMWVNLNLWQKLKLSRDDAKPLLRLKGFPSFPLVERQANAEVDWWDMVCNVKKLINEKKEDGKVFWQNLAGYKRQEALRPYLSSEEDRKKGKKFARYQLGDLLLHLEKKHGEDWGKVYDEAWERIDKKVEGLSKHIKLEEERRSEDAQSKAALTDWLRAKASFVIEGLKEADKDEFCRCELKLQKWYGDLRGKPFAIEAENSILDISGFSKQYNCAFIWQKDGVKKLNLYLIINYFKGGKLRFKKIKPEAFEANRFYTVINKKSGEIVPMEVNFNFDDPNLIILPLAFGKRQGREFIWNDLLSLETGSLKLANGRVIEKTLYNRRTRQDEPALFVALTFERREVLDSSNIKPMNLIGVDRGENIPAVIALTDPEGCPLSRFKDSLGNPTHILRIGESYKEKQRTIQAKKEVEQRRAGGYSRKYASKAKNLADDMVRNTARDLLYYAVTQDAMLIFENLSRGFGRQGKRTFMAERQYTRMEDWLTAKLAYEGLPSKTYLSKTLAQYTSKTCSNCGFTITSADYDRVLEKLKKTATGWMTTINGKELKVEGQITYYNRYKRQNVVKDLSVELDRLSEESVNNDISSWTKGRSGEALSLLKKRFSHRPVQEKFVCLNCGFETHADEQAALNIARSWLFLRSQEYKKYQTNKTTGNTDKRAFVETWQSFYRKKLKEVWKPAV

SEQ ID NO: 32948 - protein, 979 aa, synthetic construct
  REGION 1..979: note = engineered CasX variant
QEIKRISKIRRRLVKDSNTKKAGKTGPMKTLLVRVMTPDLRERLENLRKKPENIPQPISNTSRANLNKLLTDYTEMKKAILHVYWEEFQKDPVGLMSRVAQPASKKIDQNKLKPEMDEKGNLTTAGFACSQCGQPLFVYKLEQVSEKGKAYTNYFGRCNVAEHEKLILLAQLKPEKDSDEAVTYSLGKFGQRALDFYSIHVTKESTHPVKPLAQIAGNRYASHPVGKALSDACMGTIASFLSKYQDIIIEHQKVVKGNQKRLESLRELAGKENLEYPSVTLPPQPHTKEGVDAYNEVIARVRMWVNLNLWQKLKLSRDDAKPLLRLKGFPSFPLVERQANAEVDWWDMVCNVKKLINEKKEDGKVFWQNLAGYKRQEALRPYLSSEEDRKKGKKFARYQLGDLLLHLEKKHGEDWGKVYDEAWERIDKKVEGLSKHIKLEEERRSEDAQSKAALTDWLRAKASFVIEGLKEADKDEFCRCELKLQKWYGDLRGKPFAIEAENSILDISGFSKQYNCAFIWQKDGVKKLNLYLIINYFKGGKLRFKKIKPEAFEANRFYTVINKKSGEIVPMEVNFNFDDPNLIILPLAFGKRQGREFIWNDLLSLETGSLKLANGRVIEKTLYNRRTRQDEPALFVALTFERREVLDSSNIKPMNLIGVDRGENIPAVIALTDPEGCPLSRFKDSLGNPTHILRIGESYKEKQRTIQAKKEVEQRRAGGYSRKYASKAKNLADDMVRNTARDLLYYAVTQDAMLIFENLSRGFGRQGKRTFMAERQYTRMEDWLTAKLAYEGLPSKTYLSKTLAQYTSKTCSNCGFTITSADYDRVLEKLKKTATGWMTTINGKELKVEGQITYYNRYKRQNVVKDLSVELDRLSEESVNNDISSWTKGRSGEALSLLKKRFSHRPVQEKFVCLNCGFETHADEQAALNIARSWLFLRSQEYKKYQTNKTTGNTDKRAFVETWQSFYRKKLKEVWKPAV

SEQ ID NO: 32949 - protein, 979 aa, synthetic construct
  REGION 1..979: note = engineered CasX variant
QEIKRISKIRRRLVKDSNTKKAGKTGPMKTLLVRVMTPDLRERLENLRKKPENIPQPISNTSRANLNKLLTDYTEMKKAILHVYWEEFQKDPVGLMSRVAQPASKKIDQNKLKPEMDEKGNLTTAGFACSQCGQPLFVYKLEQVSEKGKAYTNYFGRCNVAEHEKLILLAQLKPEKDSDEAVTYSLGKFGQRALDFYSIHVTKESTHPVKPLAQIAGNRYASSPVGKALSDACMGTIASFLSKYQDIIIEHQKVVKGNQKRLESLRELAGKENLEYPSVTLPPQPHTKEGVDAYNEVIARVRMWVNLNLWQKLKLSRDDAKPLLRLKGFPSFPLVERQANAEVDWWDMVCNVKKLINEKKEDGKVFWQNLAGYKRQEALRPYLSSEEDRKKGKKFARYQLGDLLLHLEKKHGEDWGKVYDEAWERIDKKVEGLSKHIKLEEERRSEDAQSKAALTDWLRAKASFVIEGLKEADKDEFCRCELKLQKWYGDLRGKPFAIEAENSILDISGFSKQYNCAFIWQKDGVKKLNLYLIINYFKGGKLRFKKIKPEAFEANRFYTVINKKSGEIVPMEVNFNFDDPNLIILPLAFGKRQGREFIWNDLLSLETGSLKLANGRVIEKTLYNRRTRQDEPALFVALTFERREVLDSSNIKPMNLIGVDRGENIPAVIALTDPEGCPLSRFKDSLGNPTHILRIGESYKEKQRTIQAKKEVEQRRAGGYSRKYASKAKNLADDMVRNTARDLLYYAVTQDAMLIFENLSRGFGRQGKRTFMAERQYTRMEDWLTAKLAYEGLPSKTYLSKTLAQYTSKTCSNCGFTITSADYDRVLEKLKKTATGWMTTINGKELKVEGQITYYNRYKRQNVVKDLSVELDRLSEESVNNDISSWTKGRSGEALSLLKKRFSHRPVQEKFVCLNCGFETHADEQAALNIARSWLFLRSQEYKKYQTNKTTGNTDKRAFVETWQSFYRKKLKEVWKPAV

SEQ ID NO: 32950 - protein, 979 aa, synthetic construct
  REGION 1..979: note = engineered CasX variant
QEIKRISKIRRRLVKDSNTKKAGKTGPMKTLLVRVMTPDLRERLENLRKKPENIPQPISNTSRANLNKLLTDYTEMKKAILHVYWEEFQKDPVGLMSRVAQPASKKIDQNKLKPEMDEKGNLTTAGFACSQCGQPLFVYKLEQVSEKGKAYTNYFGRCNVAEHEKLILLAQLKPEKDSDEAVTYSLGKFGQRALDFYSIHVTKESTHPVKPLAQIAGNRYASTPVGKALSDACMGTIASFLSKYQDIIIEHQKVVKGNQKRLESLRELAGKENLEYPSVTLPPQPHTKEGVDAYNEVIARVRMWVNLNLWQKLKLSRDDAKPLLRLKGFPSFPLVERQANAEVDWWDMVCNVKKLINEKKEDGKVFWQNLAGYKRQEALRPYLSSEEDRKKGKKFARYQLGDLLLHLEKKHGEDWGKVYDEAWERIDKKVEGLSKHIKLEEERRSEDAQSKAALTDWLRAKASFVIEGLKEADKDEFCRCELKLQKWYGDLRGKPFAIEAENSILDISGFSKQYNCAFIWQKDGVKKLNLYLIINYFKGGKLRFKKIKPEAFEANRFYTVINKKSGEIVPMEVNFNFDDPNLIILPLAFGKRQGREFIWNDLLSLETGSLKLANGRVIEKTLYNRRTRQDEPALFVALTFERREVLDSSNIKPMNLIGVDRGENIPAVIALTDPEGCPLSRFKDSLGNPTHILRIGESYKEKQRTIQAKKEVEQRRAGGYSRKYASKAKNLADDMVRNTARDLLYYAVTQDAMLIFENLSRGFGRQGKRTFMAERQYTRMEDWLTAKLAYEGLPSKTYLSKTLAQYTSKTCSNCGFTITSADYDRVLEKLKKTATGWMTTINGKELKVEGQITYYNRYKRQNVVKDLSVELDRLSEESVNNDISSWTKGRSGEALSLLKKRFSHRPVQEKFVCLNCGFETHADEQAALNIARSWLFLRSQEYKKYQTNKTTGNTDKRAFVETWQSFYRKKLKEVWKPAV

SEQ ID NO: 32951 - protein, 979 aa, synthetic construct
  REGION 1..979: note = engineered CasX variant
QEIKRISKIRRRLVKDSNTKKAGKTGPMKTLLVRVMTPDLRERLENLRKKPENIPQPISNTSRANLNKLLTDYTEMKKAILHVYWEEFQKDPVGLMSRVAQPASKKIDQNKLKPEMDEKGNLTTAGFACSQCGQPLFVYKLEQVSEKGKAYTNYFGRCNVAEHEKLILLAQLKPEKDSDEAVTYSLGKFGQRALDFYSIHVTKESTHPVKPLAQIAGNRYASAPVGKALSDACMGTIASFLSKYQDIIIEHQKVVKGNQKRLESLRELAGKENLEYPSVTLPPQPHTKEGVDAYNEVIARVRMWVNLNLWQKLKLSRDDAKPLLRLKGFPSFPLVERQANAEVDWWDMVCNVKKLINEKKEDGKVFWQNLAGYKRQEALRPYLSSEEDRKKGKKFARYQLGDLLLHLEKKHGEDWGKVYDEAWERIDKKVEGLSKHIKLEEERRSEDAQSKAALTDWLRAKASFVIEGLKEADKDEFCRCELKLQKWYGDLRGKPFAIEAENSILDISGFSKQYNCAFIWQKDGVKKLNLYLIINYFKGGKLRFKKIKPEAFEANRFYTVINKKSGEIVPMEVNFNFDDPNLIILPLAFGKRQGREFIWNDLLSLETGSLKLANGRVIEKTLYNRRTRQDEPALFVALTFERREVLDSSNIKPMNLIGVDRGENIPAVIALTDPEGCPLSRFKDSLGNPTHILRIGESYKEKQRTIQAKKEVEQRRAGGYSRKYASKAKNLADDMVRNTARDLLYYAVTQDAMLIFENLSRGFGRQGKRTFMAERQYTRMEDWLTAKLAYEGLPSKTYLSKTLAQYTSKTCSNCGFTITSADYDRVLEKLKKTATGWMTTINGKELKVEGQITYYNRYKRQNVVKDLSVELDRLSEESVNNDISSWTKGRSGEALSLLKKRFSHRPVQEKFVCLNCGFETHADEQAALNIARSWLFLRSQEYKKYQTNKTTGNTDKRAFVETWQSFYRKKLKEVWKPAV

SEQ ID NO: 32952 - protein, 979 aa, synthetic construct
  REGION 1..979: note = engineered CasX variant
QEIKRISKIRRRLVKDSNTKKAGKTGPMKTLLVRVMTPDLRERLENLRKKPENIPQPISNTSRANLNKLLTDYTEMKKAILHVYWEEFQKDPVGLMSRVAQPASKKIDQNKLKPEMDEKGNLTTAGFACSQCGQPLFVYKLEQVSEKGKAYTNYFGRCNVAEHEKLILLAQLKPEKDSDEAVTYSLGKFGQRALDFYSIHVTKESTHPVKPLAQIAGNRYASVPVGKALSDACMGTIASFLSKYQDIIIEHQKVVKGNQKRLESLRELAGKENLEYPSVTLPPQPHTKEGVDAYNEVIARVRMWVNLNLWQKLKLSRDDAKPLLRLKGFPSFPLVERQANAEVDWWDMVCNVKKLINEKKEDGKVFWQNLAGYKRQEALRPYLSSEEDRKKGKKFARYQLGDLLLHLEKKHGEDWGKVYDEAWERIDKKVEGLSKHIKLEEERRSEDAQSKAALTDWLRAKASFVIEGLKEADKDEFCRCELKLQKWYGDLRGKPFAIEAENSILDISGFSKQYNCAFIWQKDGVKKLNLYLIINYFKGGKLRFKKIKPEAFEANRFYTVINKKSGEIVPMEVNFNFDDPNLIILPLAFGKRQGREFIWNDLLSLETGSLKLANGRVIEKTLYNRRTRQDEPALFVALTFERREVLDSSNIKPMNLIGVDRGENIPAVIALTDPEGCPLSRFKDSLGNPTHILRIGESYKEKQRTIQAKKEVEQRRAGGYSRKYASKAKNLADDMVRNTARDLLYYAVTQDAMLIFENLSRGFGRQGKRTFMAERQYTRMEDWLTAKLAYEGLPSKTYLSKTLAQYTSKTCSNCGFTITSADYDRVLEKLKKTATGWMTTINGKELKVEGQITYYNRYKRQNVVKDLSVELDRLSEESVNNDISSWTKGRSGEALSLLKKRFSHRPVQEKFVCLNCGFETHADEQAALNIARSWLFLRSQEYKKYQTNKTTGNTDKRAFVETWQSFYRKKLKEVWKPAV

SEQ ID NO: 32953 - protein, 979 aa, synthetic construct
  REGION 1..979: note = engineered CasX variant
QEIKRISKIRRRLVKDSNTKKAGKTGPMKTLLVRVMTPDLRERLENLRKKPENIPQPISNTSRANLNKLLTDYTEMKKAILHVYWEEFQKDPVGLMSRVAQPASKKIDQNKLKPEMDEKGNLTTAGFACSQCGQPLFVYKLEQVSEKGKAYTNYFGRCNVAEHEKLIKLAQLKPEKDSDEAVTYSLGKFGQRALDFYSIHVTKESTHPVKPLAQIAGNRYASGPVGKALSDACMGTIASFLSKYQDIIIEHQKVVKGNQKRLESLRELAGKENLEYPSVTLPPQPHTKEGVDAYNEVIARVRMWVNLNLWQKLKLSRDDAKPLLRLKGFPSFPLVERQANAEVDWWDMVCNVKKLINEKKEDGKVFWQNLAGYKRQEALRPYLSSEEDRKKGKKFARYQLGDLLLHLEKKHGEDWGKVYDEAWERIDKKVEGLSKHIKLEEERRSEDAQSKAALTDWLRAKASFVIEGLKEADKDEFCRCELKLQKWYGDLRGKPFAIEAENSILDISGFSKQYNCAFIWQKDGVKKLNLYLIINYFKGGKLRFKKIKPEAFEANRFYTVINKKSGEIVPMEVNFNFDDPNLIILPLAFGKRQGREFIWNDLLSLETGSLKLANGRVIEKTLYNRRTRQDEPALFVALTFERREVLDSSNIKPMNLIGVDRGENIPAVIALTDPEGCPLSRFKDSLGNPTHILRIGESYKEKQRTIQAKKEVEQRRAGGYSRKYASKAKNLADDMVRNTARDLLYYAVTQDAMLIFENLSRGFGRQGKRTFMAERQYTRMEDWLTAKLAYEGLPSKTYLSKTLAQYTSKTCSNCGFTITSADYDRVLEKLKKTATGWMTTINGKELKVEGQITYYNRYKRQNVVKDLSVELDRLSEESVNNDISSWTKGRSGEALSLLKKRFSHRPVQEKFVCLNCGFETHADEQAALNIARSWLFLRSQEYKKYQTNKTTGNTDKRAFVETWQSFYRKKLKEVWKPAV

SEQ ID NO: 32954 - protein, 978 aa, synthetic construct
  REGION 1..978: note = engineered CasX variant
QEIKRISKIRRRLVKDSNTKKAGKTGPMKTLLVRVMTPDLRERLENLRKKPENIPQPISNTSRANLNKLLTDYTEMKKAILHVYWEEFQKDPVGLMSRVAQPASKKIDQNKLKPEMDEKGNLTTAGFACSQCGQPLFVYKLEQVSEKGKAYTNYFGRCNVAEHEKLILLAQLKPEKDSDEAVTYSLGKFGQRALDFYSIHVTKESTHPVKPLAQIAGNRYASPVGKALSDACMGTIASFLSKYQDIIIEHQKVVKGNQKRLESLRELAGKENLEYPSVTLPPQPHTKEGVDAYNEVIARVRMWVNLNLWQKLKLSRDDAKPLLRLKGFPSFPLVERQANAEVDWWDMVCNVKKLINEKKEDGKVFWQNLAGYKRQEALRPYLSSEEDRKKGKKFARYQLGDLLLHLEKKHGEDWGKVYDEAWERIDKKVEGLSKHIKLEEERRSEDAQSKAALTDWLRAKASFVIEGLKEADKDEFCRCELKLQKWYGDLRGKPFAIEAENSILDISGFSKQYNCAFIWQKDGVKKLNLYLIINYFKGGKLRFKKIKPEAFEANRFYTVINKKSGEIVPMEVNFNFDDPNLIILPLAFGKRQGREFIWNDLLSLETGSLKLANGRVIEKTLYNRRTRQDEPALFVALTFERREVLDSSNIKPMNLIGVDRGENIPAVIALTDPEGCPLSRFKDSLGNPTHILRIGESYKEKQRTIQAKKEVEQRRAGGYSRKYASKAKNLADDMVRNTARDLLYYAVTQDAMLIFENLSRGFGRQGKRTFMAERQYTRMEDWLTAKLAYEGLPSKTYLSKTLAQYTSKTCSNCGFTITSADYDRVLEKLKKTATGWMTTINGKELKVEGQITYYNRYKRQNVVKDLSVELDRLSEESVNNDISSWTKGRSGEALSLLKKRFSHRPVQEKFVCLNCGFETHADEQAALNIARSWLFLRSQEYKKYQTNKTTGNTDKRAFVETWQSFYRKKLKEVWKPAV

SEQ ID NO: 32955 - protein, 978 aa, synthetic construct
  REGION 1..978: note = engineered CasX variant
QEIKRISKIRRRLVKDSNTKKAGKTGPMKTLLVRVMTPDLRERLENLRKKPENIPQPISNTSRANLNKLLTDYTEMKKAILHVYWEEFQKDPVGLMSRVAQPASKKIDQNKLKPEMDEKGNLTTAGFACSQCGQPLFVYKLEQVSEKGKAYTNYFGRCNVAEHEKLILLAQLKPEKDSDEAVTYSLGKFGQRALDFYSIHVTKESTHPVKPLAQIAGNRYASYPVGKALSDACMGTIASFLSKYQDIIIEHQKVVKGNQKRLESLRELAGKENLEYPSVTLPPQPHTKEGVDAYNEVIARVRMWVNLNLWQKLKLSRDDAKPLLRLKGFPSFPLVERQANEVDWWDMVCNVKKLINEKKEDGKVFWQNLAGYKRQEALRPYLSSEEDRKKGKKFARTQLGDLLLHLEKKHGEDWGKVYDEAWERIDKKVEGLSKHIKLEEERRSEDAQSKAALTDWLRAKASFVIEGLKEADKDEFCRCELKLQKWYGDLRGKPFAIEAENSILDISGFSKQYNCAFIWQKDGVKKLNLYLIINYFKGGKLRFKKIKPEAFEANRFYTVINKKSGEIVPMEVNFNFDDPNLIILPLAFGKRQGREFIWNDLLSLETGSLKLANGRVIEKTLYNRRTRQDEPALFVALTFERREVLDSSNIKPMNLIGVDRGENIPAVIALTDPEGCPLSRFKDSLGNPTHILRIGESYKEKQRTIQAKKEVEQRRAGGYSRKYASKAKNLADDMVRNTARDLLYYAVTQDAMLIFENLSRGFGRQGKRTFMAERQYTRMEDWLTAKLAYEGLPSKTYLSKTLAQYTSKTCSNCGFTITSADYDRVLEKLKKTATGWMTTINGKELKVEGQITYYNRYKRQNVVKDLSVELDRLSEESVNNDISSWTKGRSGEALSLLKKRFSHRPVQEKFVCLNCGFETHADEQAALNIARSWLFLRSQEYKKYQTNKTTGNTDKRAFVETWQSFYRKKLKEVWKPAV

SEQ ID NO: 32956 - protein, 978 aa, synthetic construct
  REGION 1..978: note = engineered CasX variant
QEIKRISKIRRRLVKDSNTKKAGKTGPMKTLLVRVMTPDLRERLENLRKKPENIPQPISNTSRANLNKLLTDYTEMKKAILHVYWEEFQKDPVGLMSRVAQPASKKIDQNKLKPEMDEKGNLTTAGFACSQCGQPLFVYKLEQVSEKGKAYTNYFGRCNVAEHEKLILLAQLKPEKDSDEAVTYSLGKFGQRALDFYSIHVTKESTHPVKPLAQIAGNRYASHPVGKALSDACMGTIASFLSKYQDIIIEHQKVVKGNQKRLESLRELAGKENLEYPSVTLPPQPHTKEGVDAYNEVIARVRMWVNLNLWQKLKLSRDDAKPLLRLKGFPSFPLVERQANEVDWWDMVCNVKKLINEKKEDGKVFWQNLAGYKRQEALRPYLSSEEDRKKGKKFARTQLGDLLLHLEKKHGEDWGKVYDEAWERIDKKVEGLSKHIKLEEERRSEDAQSKAALTDWLRAKASFVIEGLKEADKDEFCRCELKLQKWYGDLRGKPFAIEAENSILDISGFSKQYNCAFIWQKDGVKKLNLYLIINYFKGGKLRFKKIKPEAFEANRFYTVINKKSGEIVPMEVNFNFDDPNLIILPLAFGKRQGREFIWNDLLSLETGSLKLANGRVIEKTLYNRRTRQDEPALFVALTFERREVLDSSNIKPMNLIGVDRGENIPAVIALTDPEGCPLSRFKDSLGNPTHILRIGESYKEKQRTIQAKKEVEQRRAGGYSRKYASKAKNLADDMVRNTARDLLYYAVTQDAMLIFENLSRGFGRQGKRTFMAERQYTRMEDWLTAKLAYEGLPSKTYLSKTLAQYTSKTCSNCGFTITSADYDRVLEKLKKTATGWMTTINGKELKVEGQITYYNRYKRQNVVKDLSVELDRLSEESVNNDISSWTKGRSGEALSLLKKRFSHRPVQEKFVCLNCGFETHADEQAALNIARSWLFLRSQEYKKYQTNKTTGNTDKRAFVETWQSFYRKKLKEVWKPAV

SEQ ID NO: 32957 - protein, 978 aa, synthetic construct
  REGION 1..978: note = engineered CasX variant
QEIKRISKIRRRLVKDSNTKKAGKTGPMKTLLVRVMTPDLRERLENLRKKPENIPQPISNTSRANLNKLLTDYTEMKKAILHVYWEEFQKDPVGLMSRVAQPASKKIDQNKLKPEMDEKGNLTTAGFACSQCGQPLFVYKLEQVSEKGKAYTNYFGRCNVAEHEKLILLAQLKPEKDSDEAVTYSLGKFGQRALDFYSIHVTKESTHPVKPLAQIAGNRYASSPVGKALSDACMGTIASFLSKYQDIIIEHQKVVKGNQKRLESLRELAGKENLEYPSVTLPPQPHTKEGVDAYNEVIARVRMWVNLNLWQKLKLSRDDAKPLLRLKGFPSFPLVERQANEVDWWDMVCNVKKLINEKKEDGKVFWQNLAGYKRQEALRPYLSSEEDRKKGKKFARTQLGDLLLHLEKKHGEDWGKVYDEAWERIDKKVEGLSKHIKLEEERRSEDAQSKAALTDWLRAKASFVIEGLKEADKDEFCRCELKLQKWYGDLRGKPFAIEAENSILDISGFSKQYNCAFIWQKDGVKKLNLYLIINYFKGGKLRFKKIKPEAFEANRFYTVINKKSGEIVPMEVNFNFDDPNLIILPLAFGKRQGREFIWNDLLSLETGSLKLANGRVIEKTLYNRRTRQDEPALFVALTFERREVLDSSNIKPMNLIGVDRGENIPAVIALTDPEGCPLSRFKDSLGNPTHILRIGESYKEKQRTIQAKKEVEQRRAGGYSRKYASKAKNLADDMVRNTARDLLYYAVTQDAMLIFENLSRGFGRQGKRTFMAERQYTRMEDWLTAKLAYEGLPSKTYLSKTLAQYTSKTCSNCGFTITSADYDRVLEKLKKTATGWMTTINGKELKVEGQITYYNRYKRQNVVKDLSVELDRLSEESVNNDISSWTKGRSGEALSLLKKRFSHRPVQEKFVCLNCGFETHADEQAALNIARSWLFLRSQEYKKYQTNKTTGNTDKRAFVETWQSFYRKKLKEVWKPAV

SEQ ID NO: 32958 - protein, 978 aa, synthetic construct
  REGION 1..978: note = engineered CasX variant
QEIKRISKIRRRLVKDSNTKKAGKTGPMKTLLVRVMTPDLRERLENLRKKPENIPQPISNTSRANLNKLLTDYTEMKKAILHVYWEEFQKDPVGLMSRVAQPASKKIDQNKLKPEMDEKGNLTTAGFACSQCGQPLFVYKLEQVSEKGKAYTNYFGRCNVAEHEKLILLAQLKPEKDSDEAVTYSLGKFGQRALDFYSIHVTKESTHPVKPLAQIAGNRYASTPVGKALSDACMGTIASFLSKYQDIIIEHQKVVKGNQKRLESLRELAGKENLEYPSVTLPPQPHTKEGVDAYNEVIARVRMWVNLNLWQKLKLSRDDAKPLLRLKGFPSFPLVERQANEVDWWDMVCNVKKLINEKKEDGKVFWQNLAGYKRQEALRPYLSSEEDRKKGKKFARTQLGDLLLHLEKKHGEDWGKVYDEAWERIDKKVEGLSKHIKLEEERRSEDAQSKAALTDWLRAKASFVIEGLKEADKDEFCRCELKLQKWYGDLRGKPFAIEAENSILDISGFSKQYNCAFIWQKDGVKKLNLYLIINYFKGGKLRFKKIKPEAFEANRFYTVINKKSGEIVPMEVNFNFDDPNLIILPLAFGKRQGREFIWNDLLSLETGSLKLANGRVIEKTLYNRRTRQDEPALFVALTFERREVLDSSNIKPMNLIGVDRGENIPAVIALTDPEGCPLSRFKDSLGNPTHILRIGESYKEKQRTIQAKKEVEQRRAGGYSRKYASKAKNLADDMVRNTARDLLYYAVTQDAMLIFENLSRGFGRQGKRTFMAERQYTRMEDWLTAKLAYEGLPSKTYLSKTLAQYTSKTCSNCGFTITSADYDRVLEKLKKTATGWMTTINGKELKVEGQITYYNRYKRQNVVKDLSVELDRLSEESVNNDISSWTKGRSGEALSLLKKRFSHRPVQEKFVCLNCGFETHADEQAALNIARSWLFLRSQEYKKYQTNKTTGNTDKRAFVETWQSFYRKKLKEVWKPAV

SEQ ID NO: 32959 - protein, 978 aa, synthetic construct
  REGION 1..978: note = engineered CasX variant
QEIKRISKIRRRLVKDSNTKKAGKTGPMKTLLVRVMTPDLRERLENLRKKPENIPQPISNTSRANLNKLLTDYTEMKKAILHVYWEEFQKDPVGLMSRVAQPASKKIDQNKLKPEMDEKGNLTTAGFACSQCGQPLFVYKLEQVSEKGKAYTNYFGRCNVAEHEKLILLAQLKPEKDSDEAVTYSLGKFGQRALDFYSIHVTKESTHPVKPLAQIAGNRYASAPVGKALSDACMGTIASFLSKYQDIIIEHQKVVKGNQKRLESLRELAGKENLEYPSVTLPPQPHTKEGVDAYNEVIARVRMWVNLNLWQKLKLSRDDAKPLLRLKGFPSFPLVERQANEVDWWDMVCNVKKLINEKKEDGKVFWQNLAGYKRQEALRPYLSSEEDRKKGKKFARTQLGDLLLHLEKKHGEDWGKVYDEAWERIDKKVEGLSKHIKLEEERRSEDAQSKAALTDWLRAKASFVIEGLKEADKDEFCRCELKLQKWYGDLRGKPFAIEAENSILDISGFSKQYNCAFIWQKDGVKKLNLYLIINYFKGGKLRFKKIKPEAFEANRFYTVINKKSGEIVPMEVNFNFDDPNLIILPLAFGKRQGREFIWNDLLSLETGSLKLANGRVIEKTLYNRRTRQDEPALFVALTFERREVLDSSNIKPMNLIGVDRGENIPAVIALTDPEGCPLSRFKDSLGNPTHILRIGESYKEKQRTIQAKKEVEQRRAGGYSRKYASKAKNLADDMVRNTARDLLYYAVTQDAMLIFENLSRGFGRQGKRTFMAERQYTRMEDWLTAKLAYEGLPSKTYLSKTLAQYTSKTCSNCGFTITSADYDRVLEKLKKTATGWMTTINGKELKVEGQITYYNRYKRQNVVKDLSVELDRLSEESVNNDISSWTKGRSGEALSLLKKRFSHRPVQEKFVCLNCGFETHADEQAALNIARSWLFLRSQEYKKYQTNKTTGNTDKRAFVETWQSFYRKKLKEVWKPAV

SEQ ID NO: 32960 - protein, 978 aa, synthetic construct
  REGION 1..978: note = engineered CasX variant
QEIKRISKIRRRLVKDSNTKKAGKTGPMKTLLVRVMTPDLRERLENLRKKPENIPQPISNTSRANLNKLLTDYTEMKKAILHVYWEEFQKDPVGLMSRVAQPASKKIDQNKLKPEMDEKGNLTTAGFACSQCGQPLFVYKLEQVSEKGKAYTNYFGRCNVAEHEKLILLAQLKPEKDSDEAVTYSLGKFGQRALDFYSIHVTKESTHPVKPLAQIAGNRYASVPVGKALSDACMGTIASFLSKYQDIIIEHQKVVKGNQKRLESLRELAGKENLEYPSVTLPPQPHTKEGVDAYNEVIARVRMWVNLNLWQKLKLSRDDAKPLLRLKGFPSFPLVERQANEVDWWDMVCNVKKLINEKKEDGKVFWQNLAGYKRQEALRPYLSSEEDRKKGKKFARTQLGDLLLHLEKKHGEDWGKVYDEAWERIDKKVEGLSKHIKLEEERRSEDAQSKAALTDWLRAKASFVIEGLKEADKDEFCRCELKLQKWYGDLRGKPFAIEAENSILDISGFSKQYNCAFIWQKDGVKKLNLYLIINYFKGGKLRFKKIKPEAFEANRFYTVINKKSGEIVPMEVNFNFDDPNLIILPLAFGKRQGREFIWNDLLSLETGSLKLANGRVIEKTLYNRRTRQDEPALFVALTFERREVLDSSNIKPMNLIGVDRGENIPAVIALTDPEGCPLSRFKDSLGNPTHILRIGESYKEKQRTIQAKKEVEQRRAGGYSRKYASKAKNLADDMVRNTARDLLYYAVTQDAMLIFENLSRGFGRQGKRTFMAERQYTRMEDWLTAKLAYEGLPSKTYLSKTLAQYTSKTCSNCGFTITSADYDRVLEKLKKTATGWMTTINGKELKVEGQITYYNRYKRQNVVKDLSVELDRLSEESVNNDISSWTKGRSGEALSLLKKRFSHRPVQEKFVCLNCGFETHADEQAALNIARSWLFLRSQEYKKYQTNKTTGNTDKRAFVETWQSFYRKKLKEVWKPAV

SEQ ID NO: 32961 - protein, 978 aa, synthetic construct
  REGION 1..978: note = engineered CasX variant
QEIKRISKIRRRLVKDSNTKKAGKTGPMKTLLVRVMTPDLRERLENLRKKPENIPQPISNTSRANLNKLLTDYTEMKKAILHVYWEEFQKDPVGLMSRVAQPASKKIDQNKLKPEMDEKGNLTTAGFACSQCGQPLFVYKLEQVSEKGKAYTNYFGRCNVAEHEKLIKLAQLKPEKDSDEAVTYSLGKFGQRALDFYSIHVTKESTHPVKPLAQIAGNRYASGPVGKALSDACMGTIASFLSKYQDIIIEHQKVVKGNQKRLESLRELAGKENLEYPSVTLPPQPHTKEGVDAYNEVIARVRMWVNLNLWQKLKLSRDDAKPLLRLKGFPSFPLVERQANEVDWWDMVCNVKKLINEKKEDGKVFWQNLAGYKRQEALRPYLSSEEDRKKGKKFARTQLGDLLLHLEKKHGEDWGKVYDEAWERIDKKVEGLSKHIKLEEERRSEDAQSKAALTDWLRAKASFVIEGLKEADKDEFCRCELKLQKWYGDLRGKPFAIEAENSILDISGFSKQYNCAFIWQKDGVKKLNLYLIINYFKGGKLRFKKIKPEAFEANRFYTVINKKSGEIVPMEVNFNFDDPNLIILPLAFGKRQGREFIWNDLLSLETGSLKLANGRVIEKTLYNRRTRQDEPALFVALTFERREVLDSSNIKPMNLIGVDRGENIPAVIALTDPEGCPLSRFKDSLGNPTHILRIGESYKEKQRTIQAKKEVEQRRAGGYSRKYASKAKNLADDMVRNTARDLLYYAVTQDAMLIFENLSRGFGRQGKRTFMAERQYTRMEDWLTAKLAYEGLPSKTYLSKTLAQYTSKTCSNCGFTITSADYDRVLEKLKKTATGWMTTINGKELKVEGQITYYNRYKRQNVVKDLSVELDRLSEESVNNDISSWTKGRSGEALSLLKKRFSHRPVQEKFVCLNCGFETHADEQAALNIARSWLFLRSQEYKKYQTNKTTGNTDKRAFVETWQSFYRKKLKEVWKPAV

SEQ ID NO: 32962 - protein, 977 aa, synthetic construct
  REGION 1..977: note = engineered CasX variant
QEIKRISKIRRRLVKDSNTKKAGKTGPMKTLLVRVMTPDLRERLENLRKKPENIPQPISNTSRANLNKLLTDYTEMKKAILHVYWEEFQKDPVGLMSRVAQPASKKIDQNKLKPEMDEKGNLTTAGFACSQCGQPLFVYKLEQVSEKGKAYTNYFGRCNVAEHEKLILLAQLKPEKDSDEAVTYSLGKFGQRALDFYSIHVTKESTHPVKPLAQIAGNRYASPVGKALSDACMGTIASFLSKYQDIIIEHQKVVKGNQKRLESLRELAGKENLEYPSVTLPPQPHTKEGVDAYNEVIARVRMWVNLNLWQKLKLSRDDAKPLLRLKGFPSFPLVERQANEVDWWDMVCNVKKLINEKKEDGKVFWQNLAGYKRQEALRPYLSSEEDRKKGKKFARTQLGDLLLHLEKKHGEDWGKVYDEAWERIDKKVEGLSKHIKLEEERRSEDAQSKAALTDWLRAKASFVIEGLKEADKDEFCRCELKLQKWYGDLRGKPFAIEAENSILDISGFSKQYNCAFIWQKDGVKKLNLYLIINYFKGGKLRFKKIKPEAFEANRFYTVINKKSGEIVPMEVNFNFDDPNLIILPLAFGKRQGREFIWNDLLSLETGSLKLANGRVIEKTLYNRRTRQDEPALFVALTFERREVLDSSNIKPMNLIGVDRGENIPAVIALTDPEGCPLSRFKDSLGNPTHILRIGESYKEKQRTIQAKKEVEQRRAGGYSRKYASKAKNLADDMVRNTARDLLYYAVTQDAMLIFENLSRGFGRQGKRTFMAERQYTRMEDWLTAKLAYEGLPSKTYLSKTLAQYTSKTCSNCGFTITSADYDRVLEKLKKTATGWMTTINGKELKVEGQITYYNRYKRQNVVKDLSVELDRLSEESVNNDISSWTKGRSGEALSLLKKRFSHRPVQEKFVCLNCGFETHADEQAALNIARSWLFLRSQEYKKYQTNKTTGNTDKRAFVETWQSFYRKKLKEVWKPAV

SEQ ID NO: 32963 - protein, 979 aa, synthetic construct
  REGION 1..979: note = engineered CasX variant
QEIKRISKIRRRLVKDSNTKKAGKTGPMKTLLVRVMTPDLRERLENLRKKPENIPQPISNTSRANLNKLLTDYTEMKKAILHVYWEEFQKDPVGLMSRVAQPASKKIDQNKLKPEMDEKGNLTTAGFACSQCGQPLFVYKLEQVSEKGKAYTNYFGRCNVAEHEKLILLAQLKPEKDSDEAVTYSLGKFGQRALDFYSIHVTKESTHPVKPLAQIAGNRYASYPVGKALSDACMGTIASFLSKYQDIIIEHQKVVKGNQKRLESLRELAGKENLEYPSVTLPPQPHTKEGVDAYNEVIARVRMWVNLNLWQKLKLSRDDAKPLLRLKGFPSFPLVERQANEVDWWDMVCNVKKLINEKKEDGKVFWQNLAGYKRQEALRPYLSSEEDRKKGKKFARYQLGDLLLHLEKKHEGEDWGKVYDEAWERIDKKVEGLSKHIKLEEERRSEDAQSKAALTDWLRAKASFVIEGLKEADKDEFCRCELKLQKWYGDLRGKPFAIEAENSILDISGFSKQYNCAFIWQKDGVKKLNLYLIINYFKGGKLRFKKIKPEAFEANRFYTVINKKSGEIVPMEVNFNFDDPNLIILPLAFGKRQGREFIWNDLLSLETGSLKLANGRVIEKTLYNRRTRQDEPALFVALTFERREVLDSSNIKPMNLIGVDRGENIPAVIALTDPEGCPLSRFKDSLGNPTHILRIGESYKEKQRTIQAKKEVEQRRAGGYSRKYASKAKNLADDMVRNTARDLLYYAVTQDAMLIFENLSRGFGRQGKRTFMAERQYTRMEDWLTAKLAYEGLPSKTYLSKTLAQYTSKTCSNCGFTITSADYDRVLEKLKKTATGWMTTINGKELKVEGQITYYNRYKRQNVVKDLSVELDRLSEESVNNDISSWTKGRSGEALSLLKKRFSHRPVQEKFVCLNCGFETHADEQAALNIARSWLFLRSQEYKKYQTNKTTGNTDKRAFVETWQSFYRKKLKEVWKPAV

SEQ ID NO: 32964 - protein, 979 aa, synthetic construct
  REGION 1..979: note = engineered CasX variant
QEIKRISKIRRRLVKDSNTKKAGKTGPMKTLLVRVMTPDLRERLENLRKKPENIPQPISNTSRANLNKLLTDYTEMKKAILHVYWEEFQKDPVGLMSRVAQPASKKIDQNKLKPEMDEKGNLTTAGFACSQCGQPLFVYKLEQVSEKGKAYTNYFGRCNVAEHEKLILLAQLKPEKDSDEAVTYSLGKFGQRALDFYSIHVTKESTHPVKPLAQIAGNRYASHPVGKALSDACMGTIASFLSKYQDIIIEHQKVVKGNQKRLESLRELAGKENLEYPSVTLPPQPHTKEGVDAYNEVIARVRMWVNLNLWQKLKLSRDDAKPLLRLKGFPSFPLVERQANEVDWWDMVCNVKKLINEKKEDGKVFWQNLAGYKRQEALRPYLSSEEDRKKGKKFARYQLGDLLLHLEKKHEGEDWGKVYDEAWERIDKKVEGLSKHIKLEEERRSEDAQSKAALTDWLRAKASFVIEGLKEADKDEFCRCELKLQKWYGDLRGKPFAIEAENSILDISGFSKQYNCAFIWQKDGVKKLNLYLIINYFKGGKLRFKKIKPEAFEANRFYTVINKKSGEIVPMEVNFNFDDPNLIILPLAFGKRQGREFIWNDLLSLETGSLKLANGRVIEKTLYNRRTRQDEPALFVALTFERREVLDSSNIKPMNLIGVDRGENIPAVIALTDPEGCPLSRFKDSLGNPTHILRIGESYKEKQRTIQAKKEVEQRRAGGYSRKYASKAKNLADDMVRNTARDLLYYAVTQDAMLIFENLSRGFGRQGKRTFMAERQYTRMEDWLTAKLAYEGLPSKTYLSKTLAQYTSKTCSNCGFTITSADYDRVLEKLKKTATGWMTTINGKELKVEGQITYYNRYKRQNVVKDLSVELDRLSEESVNNDISSWTKGRSGEALSLLKKRFSHRPVQEKFVCLNCGFETHADEQAALNIARSWLFLRSQEYKKYQTNKTTGNTDKRAFVETWQSFYRKKLKEVWKPAV

SEQ ID NO: 32965 - protein, 979 aa, synthetic construct
  REGION 1..979: note = engineered CasX variant
QEIKRISKIRRRLVKDSNTKKAGKTGPMKTLLVRVMTPDLRERLENLRKKPENIPQPISNTSRANLNKLLTDYTEMKKAILHVYWEEFQKDPVGLMSRVAQPASKKIDQNKLKPEMDEKGNLTTAGFACSQCGQPLFVYKLEQVSEKGKAYTNYFGRCNVAEHEKLILLAQLKPEKDSDEAVTYSLGKFGQRALDFYSIHVTKESTHPVKPLAQIAGNRYASSPVGKALSDACMGTIASFLSKYQDIIIEHQKVVKGNQKRLESLRELAGKENLEYPSVTLPPQPHTKEGVDAYNEVIARVRMWVNLNLWQKLKLSRDDAKPLLRLKGFPSFPLVERQANEVDWWDMVCNVKKLINEKKEDGKVFWQNLAGYKRQEALRPYLSSEEDRKKGKKFARYQLGDLLLHLEKKHEGEDWGKVYDEAWERIDKKVEGLSKHIKLEEERRSEDAQSKAALTDWLRAKASFVIEGLKEADKDEFCRCELKLQKWYGDLRGKPFAIEAENSILDISGFSKQYNCAFIWQKDGVKKLNLYLIINYFKGGKLRFKKIKPEAFEANRFYTVINKKSGEIVPMEVNFNFDDPNLIILPLAFGKRQGREFIWNDLLSLETGSLKLANGRVIEKTLYNRRTRQDEPALFVALTFERREVLDSSNIKPMNLIGVDRGENIPAVIALTDPEGCPLSRFKDSLGNPTHILRIGESYKEKQRTIQAKKEVEQRRAGGYSRKYASKAKNLADDMVRNTARDLLYYAVTQDAMLIFENLSRGFGRQGKRTFMAERQYTRMEDWLTAKLAYEGLPSKTYLSKTLAQYTSKTCSNCGFTITSADYDRVLEKLKKTATGWMTTINGKELKVEGQITYYNRYKRQNVVKDLSVELDRLSEESVNNDISSWTKGRSGEALSLLKKRFSHRPVQEKFVCLNCGFETHADEQAALNIARSWLFLRSQEYKKYQTNKTTGNTDKRAFVETWQSFYRKKLKEVWKPAV

SEQ ID NO: 32966 - protein, 979 aa, synthetic construct
  REGION 1..979: note = engineered CasX variant
QEIKRISKIRRRLVKDSNTKKAGKTGPMKTLLVRVMTPDLRERLENLRKKPENIPQPISNTSRANLNKLLTDYTEMKKAILHVYWEEFQKDPVGLMSRVAQPASKKIDQNKLKPEMDEKGNLTTAGFACSQCGQPLFVYKLEQVSEKGKAYTNYFGRCNVAEHEKLILLAQLKPEKDSDEAVTYSLGKFGQRALDFYSIHVTKESTHPVKPLAQIAGNRYASTPVGKALSDACMGTIASFLSKYQDIIIEHQKVVKGNQKRLESLRELAGKENLEYPSVTLPPQPHTKEGVDAYNEVIARVRMWVNLNLWQKLKLSRDDAKPLLRLKGFPSFPLVERQANEVDWWDMVCNVKKLINEKKEDGKVFWQNLAGYKRQEALRPYLSSEEDRKKGKKFARYQLGDLLLHLEKKHEGEDWGKVYDEAWERIDKKVEGLSKHIKLEEERRSEDAQSKAALTDWLRAKASFVIEGLKEADKDEFCRCELKLQKWYGDLRGKPFAIEAENSILDISGFSKQYNCAFIWQKDGVKKLNLYLIINYFKGGKLRFKKIKPEAFEANRFYTVINKKSGEIVPMEVNFNFDDPNLIILPLAFGKRQGREFIWNDLLSLETGSLKLANGRVIEKTLYNRRTRQDEPALFVALTFERREVLDSSNIKPMNLIGVDRGENIPAVIALTDPEGCPLSRFKDSLGNPTHILRIGESYKEKQRTIQAKKEVEQRRAGGYSRKYASKAKNLADDMVRNTARDLLYYAVTQDAMLIFENLSRGFGRQGKRTFMAERQYTRMEDWLTAKLAYEGLPSKTYLSKTLAQYTSKTCSNCGFTITSADYDRVLEKLKKTATGWMTTINGKELKVEGQITYYNRYKRQNVVKDLSVELDRLSEESVNNDISSWTKGRSGEALSLLKKRFSHRPVQEKFVCLNCGFETHADEQAALNIARSWLFLRSQEYKKYQTNKTTGNTDKRAFVETWQSFYRKKLKEVWKPAV

SEQ ID NO: 32967 - protein, 979 aa, synthetic construct
  REGION 1..979: note = engineered CasX variant
QEIKRISKIRRRLVKDSNTKKAGKTGPMKTLLVRVMTPDLRERLENLRKKPENIPQPISNTSRANLNKLLTDYTEMKKAILHVYWEEFQKDPVGLMSRVAQPASKKIDQNKLKPEMDEKGNLTTAGFACSQCGQPLFVYKLEQVSEKGKAYTNYFGRCNVAEHEKLILLAQLKPEKDSDEAVTYSLGKFGQRALDFYSIHVTKESTHPVKPLAQIAGNRYASAPVGKALSDACMGTIASFLSKYQDIIIEHQKVVKGNQKRLESLRELAGKENLEYPSVTLPPQPHTKEGVDAYNEVIARVRMWVNLNLWQKLKLSRDDAKPLLRLKGFPSFPLVERQANEVDWWDMVCNVKKLINEKKEDGKVFWQNLAGYKRQEALRPYLSSEEDRKKGKKFARYQLGDLLLHLEKKHEGEDWGKVYDEAWERIDKKVEGLSKHIKLEEERRSEDAQSKAALTDWLRAKASFVIEGLKEADKDEFCRCELKLQKWYGDLRGKPFAIEAENSILDISGFSKQYNCAFIWQKDGVKKLNLYLIINYFKGGKLRFKKIKPEAFEANRFYTVINKKSGEIVPMEVNFNFDDPNLIILPLAFGKRQGREFIWNDLLSLETGSLKLANGRVIEKTLYNRRTRQDEPALFVALTFERREVLDSSNIKPMNLIGVDRGENIPAVIALTDPEGCPLSRFKDSLGNPTHILRIGESYKEKQRTIQAKKEVEQRRAGGYSRKYASKAKNLADDMVRNTARDLLYYAVTQDAMLIFENLSRGFGRQGKRTFMAERQYTRMEDWLTAKLAYEGLPSKTYLSKTLAQYTSKTCSNCGFTITSADYDRVLEKLKKTATGWMTTINGKELKVEGQITYYNRYKRQNVVKDLSVELDRLSEESVNNDISSWTKGRSGEALSLLKKRFSHRPVQEKFVCLNCGFETHADEQAALNIARSWLFLRSQEYKKYQTNKTTGNTDKRAFVETWQSFYRKKLKEVWKPAV

SEQ ID NO: 32968 - protein, 979 aa, synthetic construct
  REGION 1..979: note = engineered CasX variant
QEIKRISKIRRRLVKDSNTKKAGKTGPMKTLLVRVMTPDLRERLENLRKKPENIPQPISNTSRANLNKLLTDYTEMKKAILHVYWEEFQKDPVGLMSRVAQPASKKIDQNKLKPEMDEKGNLTTAGFACSQCGQPLFVYKLEQVSEKGKAYTNYFGRCNVAEHEKLILLAQLKPEKDSDEAVTYSLGKFGQRALDFYSIHVTKESTHPVKPLAQIAGNRYASVPVGKALSDACMGTIASFLSKYQDIIIEHQKVVKGNQKRLESLRELAGKENLEYPSVTLPPQPHTKEGVDAYNEVIARVRMWVNLNLWQKLKLSRDDAKPLLRLKGFPSFPLVERQANEVDWWDMVCNVKKLINEKKEDGKVFWQNLAGYKRQEALRPYLSSEEDRKKGKKFARYQLGDLLLHLEKKHEGEDWGKVYDEAWERIDKKVEGLSKHIKLEEERRSEDAQSKAALTDWLRAKASFVIEGLKEADKDEFCRCELKLQKWYGDLRGKPFAIEAENSILDISGFSKQYNCAFIWQKDGVKKLNLYLIINYFKGGKLRFKKIKPEAFEANRFYTVINKKSGEIVPMEVNFNFDDPNLIILPLAFGKRQGREFIWNDLLSLETGSLKLANGRVIEKTLYNRRTRQDEPALFVALTFERREVLDSSNIKPMNLIGVDRGENIPAVIALTDPEGCPLSRFKDSLGNPTHILRIGESYKEKQRTIQAKKEVEQRRAGGYSRKYASKAKNLADDMVRNTARDLLYYAVTQDAMLIFENLSRGFGRQGKRTFMAERQYTRMEDWLTAKLAYEGLPSKTYLSKTLAQYTSKTCSNCGFTITSADYDRVLEKLKKTATGWMTTINGKELKVEGQITYYNRYKRQNVVKDLSVELDRLSEESVNNDISSWTKGRSGEALSLLKKRFSHRPVQEKFVCLNCGFETHADEQAALNIARSWLFLRSQEYKKYQTNKTTGNTDKRAFVETWQSFYRKKLKEVWKPAV

SEQ ID NO: 32969 - protein, 979 aa, synthetic construct
  REGION 1..979: note = engineered CasX variant
QEIKRISKIRRRLVKDSNTKKAGKTGPMKTLLVRVMTPDLRERLENLRKKPENIPQPISNTSRANLNKLLTDYTEMKKAILHVYWEEFQKDPVGLMSRVAQPASKKIDQNKLKPEMDEKGNLTTAGFACSQCGQPLFVYKLEQVSEKGKAYTNYFGRCNVAEHEKLIKLAQLKPEKDSDEAVTYSLGKFGQRALDFYSIHVTKESTHPVKPLAQIAGNRYASGPVGKALSDACMGTIASFLSKYQDIIIEHQKVVKGNQKRLESLRELAGKENLEYPSVTLPPQPHTKEGVDAYNEVIARVRMWVNLNLWQKLKLSRDDAKPLLRLKGFPSFPLVERQANEVDWWDMVCNVKKLINEKKEDGKVFWQNLAGYKRQEALRPYLSSEEDRKKGKKFARYQLGDLLLHLEKKHEGEDWGKVYDEAWERIDKKVEGLSKHIKLEEERRSEDAQSKAALTDWLRAKASFVIEGLKEADKDEFCRCELKLQKWYGDLRGKPFAIEAENSILDISGFSKQYNCAFIWQKDGVKKLNLYLIINYFKGGKLRFKKIKPEAFEANRFYTVINKKSGEIVPMEVNFNFDDPNLIILPLAFGKRQGREFIWNDLLSLETGSLKLANGRVIEKTLYNRRTRQDEPALFVALTFERREVLDSSNIKPMNLIGVDRGENIPAVIALTDPEGCPLSRFKDSLGNPTHILRIGESYKEKQRTIQAKKEVEQRRAGGYSRKYASKAKNLADDMVRNTARDLLYYAVTQDAMLIFENLSRGFGRQGKRTFMAERQYTRMEDWLTAKLAYEGLPSKTYLSKTLAQYTSKTCSNCGFTITSADYDRVLEKLKKTATGWMTTINGKELKVEGQITYYNRYKRQNVVKDLSVELDRLSEESVNNDISSWTKGRSGEALSLLKKRFSHRPVQEKFVCLNCGFETHADEQAALNIARSWLFLRSQEYKKYQTNKTTGNTDKRAFVETWQSFYRKKLKEVWKPAV

SEQ ID NO: 32970 - protein, 978 aa, synthetic construct
  REGION 1..978: note = engineered CasX variant
QEIKRISKIRRRLVKDSNTKKAGKTGPMKTLLVRVMTPDLRERLENLRKKPENIPQPISNTSRANLNKLLTDYTEMKKAILHVYWEEFQKDPVGLMSRVAQPASKKIDQNKLKPEMDEKGNLTTAGFACSQCGQPLFVYKLEQVSEKGKAYTNYFGRCNVAEHEKLILLAQLKPEKDSDEAVTYSLGKFGQRALDFYSIHVTKESTHPVKPLAQIAGNRYASPVGKALSDACMGTIASFLSKYQDIIIEHQKVVKGNQKRLESLRELAGKENLEYPSVTLPPQPHTKEGVDAYNEVIARVRMWVNLNLWQKLKLSRDDAKPLLRLKGFPSFPLVERQANEVDWWDMVCNVKKLINEKKEDGKVFWQNLAGYKRQEALRPYLSSEEDRKKGKKFARYQLGDLLLHLEKKHEGEDWGKVYDEAWERIDKKVEGLSKHIKLEEERRSEDAQSKAALTDWLRAKASFVIEGLKEADKDEFCRCELKLQKWYGDLRGKPFAIEAENSILDISGFSKQYNCAFIWQKDGVKKLNLYLIINYFKGGKLRFKKIKPEAFEANRFYTVINKKSGEIVPMEVNFNFDDPNLIILPLAFGKRQGREFIWNDLLSLETGSLKLANGRVIEKTLYNRRTRQDEPALFVALTFERREVLDSSNIKPMNLIGVDRGENIPAVIALTDPEGCPLSRFKDSLGNPTHILRIGESYKEKQRTIQAKKEVEQRRAGGYSRKYASKAKNLADDMVRNTARDLLYYAVTQDAMLIFENLSRGFGRQGKRTFMAERQYTRMEDWLTAKLAYEGLPSKTYLSKTLAQYTSKTCSNCGFTITSADYDRVLEKLKKTATGWMTTINGKELKVEGQITYYNRYKRQNVVKDLSVELDRLSEESVNNDISSWTKGRSGEALSLLKKRFSHRPVQEKFVCLNCGFETHADEQAALNIARSWLFLRSQEYKKYQTNKTTGNTDKRAFVETWQSFYRKKLKEVWKPAV

SEQ ID NO: 32971 - protein, 978 aa, synthetic construct
  REGION 1..978: note = engineered CasX variant
QEIKRISKIRRRLVKDSNTKKAGKTGPMKTLLVRVMTPDLRERLENLRKKPENIPQPISNTSRANLNKLLTDYTEMKKAILHVYWEEFQKDPVGLMSRVAQPASKKIDQNKLKPEMDEKGNLTTAGFACSQCGQPLFVYKLEQVSEKGKAYTNYFGRCNVAEHEKLILLAQLKPEKDSDEAVTYSLGKFGQRALDFYSIHVTKESTHPVKPLAQIAGNRYASYPVGKALSDACMGTIASFLSKYQDIIIEHQKVVKGNQKRLESLRELAGKENLEYPSVTLPPQPHTKEGVDAYNEVIARVRMWVNLNLWQKLKLSRDDAKPLLRLKGFPSFPLVERQANEVDWWDMVCNVKKLINEKKEDGKVFWQNLAGYKRQEALRPYLSSEEDRKKGKKFARYQLGDLLLHLEKKHGEDWGKVYDEAWERIDKKVEGLSKHIKLEEERRSEDAQSKAALTDWLRAKASFVIEGLKEADKDEFCRCDLKLQKWYGDLRGKPFAIEAENSILDISGFSKQYNCAFIWQKDGVKKLNLYLIINYFKGGKLRFKKIKPEAFEANRFYTVINKKSGEIVPMEVNFNFDDPNLIILPLAFGKRQGREFIWNDLLSLETGSLKLANGRVIEKTLYNRRTRQDEPALFVALTFERREVLDSSNIKPMNLIGVDRGENIPAVIALTDPEGCPLSRFKDSLGNPTHILRIGESYKEKQRTIQAKKEVEQRRAGGYSRKYASKAKNLADDMVRNTARDLLYYAVTQDAMLIFENLSRGFGRQGKRTFMAERQYTRMEDWLTAKLAYEGLPSKTYLSKTLAQYTSKTCSNCGFTITSADYDRVLEKLKKTATGWMTTINGKELKVEGQITYYNRYKRQNVVKDLSVELDRLSEESVNNDISSWTKGRSGEALSLLKKRFSHRPVQEKFVCLNCGFETHADEQAALNIARSWLFLRSQEYKKYQTNKTTGNTDKRAFVETWQSFYRKKLKEVWKPAV

SEQ ID NO: 32972 - protein, 978 aa, synthetic construct
  REGION 1..978: note = engineered CasX variant
QEIKRISKIRRRLVKDSNTKKAGKTGPMKTLLVRVMTPDLRERLENLRKKPENIPQPISNTSRANLNKLLTDYTEMKKAILHVYWEEFQKDPVGLMSRVAQPASKKIDQNKLKPEMDEKGNLTTAGFACSQCGQPLFVYKLEQVSEKGKAYTNYFGRCNVAEHEKLILLAQLKPEKDSDEAVTYSLGKFGQRALDFYSIHVTKESTHPVKPLAQIAGNRYASHPVGKALSDACMGTIASFLSKYQDIIIEHQKVVKGNQKRLESLRELAGKENLEYPSVTLPPQPHTKEGVDAYNEVIARVRMWVNLNLWQKLKLSRDDAKPLLRLKGFPSFPLVERQANEVDWWDMVCNVKKLINEKKEDGKVFWQNLAGYKRQEALRPYLSSEEDRKKGKKFARYQLGDLLLHLEKKHGEDWGKVYDEAWERIDKKVEGLSKHIKLEEERRSEDAQSKAALTDWLRAKASFVIEGLKEADKDEFCRCDLKLQKWYGDLRGKPFAIEAENSILDISGFSKQYNCAFIWQKDGVKKLNLYLIINYFKGGKLRFKKIKPEAFEANRFYTVINKKSGEIVPMEVNFNFDDPNLIILPLAFGKRQGREFIWNDLLSLETGSLKLANGRVIEKTLYNRRTRQDEPALFVALTFERREVLDSSNIKPMNLIGVDRGENIPAVIALTDPEGCPLSRFKDSLGNPTHILRIGESYKEKQRTIQAKKEVEQRRAGGYSRKYASKAKNLADDMVRNTARDLLYYAVTQDAMLIFENLSRGFGRQGKRTFMAERQYTRMEDWLTAKLAYEGLPSKTYLSKTLAQYTSKTCSNCGFTITSADYDRVLEKLKKTATGWMTTINGKELKVEGQITYYNRYKRQNVVKDLSVELDRLSEESVNNDISSWTKGRSGEALSLLKKRFSHRPVQEKFVCLNCGFETHADEQAALNIARSWLFLRSQEYKKYQTNKTTGNTDKRAFVETWQSFYRKKLKEVWKPAV

SEQ ID NO: 32973 - protein, 978 aa, synthetic construct
  REGION 1..978: note = engineered CasX variant
QEIKRISKIRRRLVKDSNTKKAGKTGPMKTLLVRVMTPDLRERLENLRKKPENIPQPISNTSRANLNKLLTDYTEMKKAILHVYWEEFQKDPVGLMSRVAQPASKKIDQNKLKPEMDEKGNLTTAGFACSQCGQPLFVYKLEQVSEKGKAYTNYFGRCNVAEHEKLILLAQLKPEKDSDEAVTYSLGKFGQRALDFYSIHVTKESTHPVKPLAQIAGNRYASSPVGKALSDACMGTIASFLSKYQDIIIEHQKVVKGNQKRLESLRELAGKENLEYPSVTLPPQPHTKEGVDAYNEVIARVRMWVNLNLWQKLKLSRDDAKPLLRLKGFPSFPLVERQANEVDWWDMVCNVKKLINEKKEDGKVFWQNLAGYKRQEALRPYLSSEEDRKKGKKFARYQLGDLLLHLEKKHGEDWGKVYDEAWERIDKKVEGLSKHIKLEEERRSEDAQSKAALTDWLRAKASFVIEGLKEADKDEFCRCDLKLQKWYGDLRGKPFAIEAENSILDISGFSKQYNCAFIWQKDGVKKLNLYLIINYFKGGKLRFKKIKPEAFEANRFYTVINKKSGEIVPMEVNFNFDDPNLIILPLAFGKRQGREFIWNDLLSLETGSLKLANGRVIEKTLYNRRTRQDEPALFVALTFERREVLDSSNIKPMNLIGVDRGENIPAVIALTDPEGCPLSRFKDSLGNPTHILRIGESYKEKQRTIQAKKEVEQRRAGGYSRKYASKAKNLADDMVRNTARDLLYYAVTQDAMLIFENLSRGFGRQGKRTFMAERQYTRMEDWLTAKLAYEGLPSKTYLSKTLAQYTSKTCSNCGFTITSADYDRVLEKLKKTATGWMTTINGKELKVEGQITYYNRYKRQNVVKDLSVELDRLSEESVNNDISSWTKGRSGEALSLLKKRFSHRPVQEKFVCLNCGFETHADEQAALNIARSWLFLRSQEYKKYQTNKTTGNTDKRAFVETWQSFYRKKLKEVWKPAV

SEQ ID NO: 32974 - protein, 978 aa, synthetic construct
  REGION 1..978: note = engineered CasX variant
QEIKRISKIRRRLVKDSNTKKAGKTGPMKTLLVRVMTPDLRERLENLRKKPENIPQPISNTSRANLNKLLTDYTEMKKAILHVYWEEFQKDPVGLMSRVAQPASKKIDQNKLKPEMDEKGNLTTAGFACSQCGQPLFVYKLEQVSEKGKAYTNYFGRCNVAEHEKLILLAQLKPEKDSDEAVTYSLGKFGQRALDFYSIHVTKESTHPVKPLAQIAGNRYASTPVGKALSDACMGTIASFLSKYQDIIIEHQKVVKGNQKRLESLRELAGKENLEYPSVTLPPQPHTKEGVDAYNEVIARVRMWVNLNLWQKLKLSRDDAKPLLRLKGFPSFPLVERQANEVDWWDMVCNVKKLINEKKEDGKVFWQNLAGYKRQEALRPYLSSEEDRKKGKKFARYQLGDLLLHLEKKHGEDWGKVYDEAWERIDKKVEGLSKHIKLEEERRSEDAQSKAALTDWLRAKASFVIEGLKEADKDEFCRCDLKLQKWYGDLRGKPFAIEAENSILDISGFSKQYNCAFIWQKDGVKKLNLYLIINYFKGGKLRFKKIKPEAFEANRFYTVINKKSGEIVPMEVNFNFDDPNLIILPLAFGKRQGREFIWNDLLSLETGSLKLANGRVIEKTLYNRRTRQDEPALFVALTFERREVLDSSNIKPMNLIGVDRGENIPAVIALTDPEGCPLSRFKDSLGNPTHILRIGESYKEKQRTIQAKKEVEQRRAGGYSRKYASKAKNLADDMVRNTARDLLYYAVTQDAMLIFENLSRGFGRQGKRTFMAERQYTRMEDWLTAKLAYEGLPSKTYLSKTLAQYTSKTCSNCGFTITSADYDRVLEKLKKTATGWMTTINGKELKVEGQITYYNRYKRQNVVKDLSVELDRLSEESVNNDISSWTKGRSGEALSLLKKRFSHRPVQEKFVCLNCGFETHADEQAALNIARSWLFLRSQEYKKYQTNKTTGNTDKRAFVETWQSFYRKKLKEVWKPAV

SEQ ID NO: 32975 - protein, 978 aa, synthetic construct
  REGION 1..978: note = engineered CasX variant
QEIKRISKIRRRLVKDSNTKKAGKTGPMKTLLVRVMTPDLRERLENLRKKPENIPQPISNTSRANLNKLLTDYTEMKKAILHVYWEEFQKDPVGLMSRVAQPASKKIDQNKLKPEMDEKGNLTTAGFACSQCGQPLFVYKLEQVSEKGKAYTNYFGRCNVAEHEKLILLAQLKPEKDSDEAVTYSLGKFGQRALDFYSIHVTKESTHPVKPLAQIAGNRYASAPVGKALSDACMGTIASFLSKYQDIIIEHQKVVKGNQKRLESLRELAGKENLEYPSVTLPPQPHTKEGVDAYNEVIARVRMWVNLNLWQKLKLSRDDAKPLLRLKGFPSFPLVERQANEVDWWDMVCNVKKLINEKKEDGKVFWQNLAGYKRQEALRPYLSSEEDRKKGKKFARYQLGDLLLHLEKKHGEDWGKVYDEAWERIDKKVEGLSKHIKLEEERRSEDAQSKAALTDWLRAKASFVIEGLKEADKDEFCRCDLKLQKWYGDLRGKPFAIEAENSILDISGFSKQYNCAFIWQKDGVKKLNLYLIINYFKGGKLRFKKIKPEAFEANRFYTVINKKSGEIVPMEVNFNFDDPNLIILPLAFGKRQGREFIWNDLLSLETGSLKLANGRVIEKTLYNRRTRQDEPALFVALTFERREVLDSSNIKPMNLIGVDRGENIPAVIALTDPEGCPLSRFKDSLGNPTHILRIGESYKEKQRTIQAKKEVEQRRAGGYSRKYASKAKNLADDMVRNTARDLLYYAVTQDAMLIFENLSRGFGRQGKRTFMAERQYTRMEDWLTAKLAYEGLPSKTYLSKTLAQYTSKTCSNCGFTITSADYDRVLEKLKKTATGWMTTINGKELKVEGQITYYNRYKRQNVVKDLSVELDRLSEESVNNDISSWTKGRSGEALSLLKKRFSHRPVQEKFVCLNCGFETHADEQAALNIARSWLFLRSQEYKKYQTNKTTGNTDKRAFVETWQSFYRKKLKEVWKPAV

SEQ ID NO: 32976 - protein, 978 aa, synthetic construct
  REGION 1..978: note = engineered CasX variant
QEIKRISKIRRRLVKDSNTKKAGKTGPMKTLLVRVMTPDLRERLENLRKKPENIPQPISNTSRANLNKLLTDYTEMKKAILHVYWEEFQKDPVGLMSRVAQPASKKIDQNKLKPEMDEKGNLTTAGFACSQCGQPLFVYKLEQVSEKGKAYTNYFGRCNVAEHEKLILLAQLKPEKDSDEAVTYSLGKFGQRALDFYSIHVTKESTHPVKPLAQIAGNRYASVPVGKALSDACMGTIASFLSKYQDIIIEHQKVVKGNQKRLESLRELAGKENLEYPSVTLPPQPHTKEGVDAYNEVIARVRMWVNLNLWQKLKLSRDDAKPLLRLKGFPSFPLVERQANEVDWWDMVCNVKKLINEKKEDGKVFWQNLAGYKRQEALRPYLSSEEDRKKGKKFARYQLGDLLLHLEKKHGEDWGKVYDEAWERIDKKVEGLSKHIKLEEERRSEDAQSKAALTDWLRAKASFVIEGLKEADKDEFCRCDLKLQKWYGDLRGKPFAIEAENSILDISGFSKQYNCAFIWQKDGVKKLNLYLIINYFKGGKLRFKKIKPEAFEANRFYTVINKKSGEIVPMEVNFNFDDPNLIILPLAFGKRQGREFIWNDLLSLETGSLKLANGRVIEKTLYNRRTRQDEPALFVALTFERREVLDSSNIKPMNLIGVDRGENIPAVIALTDPEGCPLSRFKDSLGNPTHILRIGESYKEKQRTIQAKKEVEQRRAGGYSRKYASKAKNLADDMVRNTARDLLYYAVTQDAMLIFENLSRGFGRQGKRTFMAERQYTRMEDWLTAKLAYEGLPSKTYLSKTLAQYTSKTCSNCGFTITSADYDRVLEKLKKTATGWMTTINGKELKVEGQITYYNRYKRQNVVKDLSVELDRLSEESVNNDISSWTKGRSGEALSLLKKRFSHRPVQEKFVCLNCGFETHADEQAALNIARSWLFLRSQEYKKYQTNKTTGNTDKRAFVETWQSFYRKKLKEVWKPAV

SEQ ID NO: 32977 - protein, 978 aa, synthetic construct
  REGION 1..978: note = engineered CasX variant
QEIKRISKIRRRLVKDSNTKKAGKTGPMKTLLVRVMTPDLRERLENLRKKPENIPQPISNTSRANLNKLLTDYTEMKKAILHVYWEEFQKDPVGLMSRVAQPASKKIDQNKLKPEMDEKGNLTTAGFACSQCGQPLFVYKLEQVSEKGKAYTNYFGRCNVAEHEKLIKLAQLKPEKDSDEAVTYSLGKFGQRALDFYSIHVTKESTHPVKPLAQIAGNRYASGPVGKALSDACMGTIASFLSKYQDIIIEHQKVVKGNQKRLESLRELAGKENLEYPSVTLPPQPHTKEGVDAYNEVIARVRMWVNLNLWQKLKLSRDDAKPLLRLKGFPSFPLVERQANEVDWWDMVCNVKKLINEKKEDGKVFWQNLAGYKRQEALRPYLSSEEDRKKGKKFARYQLGDLLLHLEKKHGEDWGKVYDEAWERIDKKVEGLSKHIKLEEERRSEDAQSKAALTDWLRAKASFVIEGLKEADKDEFCRCDLKLQKWYGDLRGKPFAIEAENSILDISGFSKQYNCAFIWQKDGVKKLNLYLIINYFKGGKLRFKKIKPEAFEANRFYTVINKKSGEIVPMEVNFNFDDPNLIILPLAFGKRQGREFIWNDLLSLETGSLKLANGRVIEKTLYNRRTRQDEPALFVALTFERREVLDSSNIKPMNLIGVDRGENIPAVIALTDPEGCPLSRFKDSLGNPTHILRIGESYKEKQRTIQAKKEVEQRRAGGYSRKYASKAKNLADDMVRNTARDLLYYAVTQDAMLIFENLSRGFGRQGKRTFMAERQYTRMEDWLTAKLAYEGLPSKTYLSKTLAQYTSKTCSNCGFTITSADYDRVLEKLKKTATGWMTTINGKELKVEGQITYYNRYKRQNVVKDLSVELDRLSEESVNNDISSWTKGRSGEALSLLKKRFSHRPVQEKFVCLNCGFETHADEQAALNIARSWLFLRSQEYKKYQTNKTTGNTDKRAFVETWQSFYRKKLKEVWKPAV

SEQ ID NO: 32978 - protein, 977 aa, synthetic construct
  REGION 1..977: note = engineered CasX variant
QEIKRISKIRRRLVKDSNTKKAGKTGPMKTLLVRVMTPDLRERLENLRKKPENIPQPISNTSRANLNKLLTDYTEMKKAILHVYWEEFQKDPVGLMSRVAQPASKKIDQNKLKPEMDEKGNLTTAGFACSQCGQPLFVYKLEQVSEKGKAYTNYFGRCNVAEHEKLILLAQLKPEKDSDEAVTYSLGKFGQRALDFYSIHVTKESTHPVKPLAQIAGNRYASPVGKALSDACMGTIASFLSKYQDIIIEHQKVVKGNQKRLESLRELAGKENLEYPSVTLPPQPHTKEGVDAYNEVIARVRMWVNLNLWQKLKLSRDDAKPLLRLKGFPSFPLVERQANEVDWWDMVCNVKKLINEKKEDGKVFWQNLAGYKRQEALRPYLSSEEDRKKGKKFARYQLGDLLLHLEKKHGEDWGKVYDEAWERIDKKVEGLSKHIKLEEERRSEDAQSKAALTDWLRAKASFVIEGLKEADKDEFCRCDLKLQKWYGDLRGKPFAIEAENSILDISGFSKQYNCAFIWQKDGVKKLNLYLIINYFKGGKLRFKKIKPEAFEANRFYTVINKKSGEIVPMEVNFNFDDPNLIILPLAFGKRQGREFIWNDLLSLETGSLKLANGRVIEKTLYNRRTRQDEPALFVALTFERREVLDSSNIKPMNLIGVDRGENIPAVIALTDPEGCPLSRFKDSLGNPTHILRIGESYKEKQRTIQAKKEVEQRRAGGYSRKYASKAKNLADDMVRNTARDLLYYAVTQDAMLIFENLSRGFGRQGKRTFMAERQYTRMEDWLTAKLAYEGLPSKTYLSKTLAQYTSKTCSNCGFTITSADYDRVLEKLKKTATGWMTTINGKELKVEGQITYYNRYKRQNVVKDLSVELDRLSEESVNNDISSWTKGRSGEALSLLKKRFSHRPVQEKFVCLNCGFETHADEQAALNIARSWLFLRSQEYKKYQTNKTTGNTDKRAFVETWQSFYRKKLKEVWKPAV

SEQ ID NO: 32979 - protein, 978 aa, synthetic construct
  REGION 1..978: note = engineered CasX variant
QEIKRISKIRRRLVKDSNTKKAGKTGPMKTLLVRVMTPDLRERLENLRKKPENIPQPISNTSRANLNKLLTDYTEMKKAILHVYWEEFQKDPVGLMSRVAQPASKKIDQNKLKPEMDEKGNLTTAGFACSQCGQPLFVYKLEQVSEKGKAYTNYFGRCNVAEHEKLILLAQLKPEKDSDEAVTYSLGKFGQRALDFYSIHVTKESTHPVKPLAQIAGNRYASYPVGKALSDACMGTIASFLSKYQDIIIEHQKVVKGNQKRLESLRELAGKENLEYPSVTLPPQPHTKEGVDAYNEVIARVRMWVNLNLWQKLKLSRDDAKPLLRLKGFPSFPLVERQANEVDWWDMVCNVKKLINEKKEDGKVFWQNLAGYKRQEALRPYLSSEEDRKKGKKFARYQLGDLLLHLEKKHGEDWGKVYDEAWERIDKKVEGLSKHIKLEEERRSEDAQSKAALTDWLRAKASFVIEGLKEADKDEFCRCELKLQKWYGDLRGKPFAIEAENSILDISGFSKQYNCAFIWQKDGVKKLNLYLIINYFKGGKLRFKKIKPEAFEANRFYTVINKKSGEIVPMEVNFNFDDPNLIILPLAFGKRFGREFIWNDLLSLETGSLKLANGRVIEKTLYNRRTRQDEPALFVALTFERREVLDSSNIKPMNLIGVDRGENIPAVIALTDPEGCPLSRFKDSLGNPTHILRIGESYKEKQRTIQAKKEVEQRRAGGYSRKYASKAKNLADDMVRNTARDLLYYAVTQDAMLIFENLSRGFGRQGKRTFMAERQYTRMEDWLTAKLAYEGLPSKTYLSKTLAQYTSKTCSNCGFTITSADYDRVLEKLKKTATGWMTTINGKELKVEGQITYYNRYKRQNVVKDLSVELDRLSEESVNNDISSWTKGRSGEALSLLKKRFSHRPVQEKFVCLNCGFETHADEQAALNIARSWLFLRSQEYKKYQTNKTTGNTDKRAFVETWQSFYRKKLKEVWKPAV

SEQ ID NO: 32980 - protein, 978 aa, synthetic construct
  REGION 1..978: note = engineered CasX variant
QEIKRISKIRRRLVKDSNTKKAGKTGPMKTLLVRVMTPDLRERLENLRKKPENIPQPISNTSRANLNKLLTDYTEMKKAILHVYWEEFQKDPVGLMSRVAQPASKKIDQNKLKPEMDEKGNLTTAGFACSQCGQPLFVYKLEQVSEKGKAYTNYFGRCNVAEHEKLILLAQLKPEKDSDEAVTYSLGKFGQRALDFYSIHVTKESTHPVKPLAQIAGNRYASHPVGKALSDACMGTIASFLSKYQDIIIEHQKVVKGNQKRLESLRELAGKENLEYPSVTLPPQPHTKEGVDAYNEVIARVRMWVNLNLWQKLKLSRDDAKPLLRLKGFPSFPLVERQANEVDWWDMVCNVKKLINEKKEDGKVFWQNLAGYKRQEALRPYLSSEEDRKKGKKFARYQLGDLLLHLEKKHGEDWGKVYDEAWERIDKKVEGLSKHIKLEEERRSEDAQSKAALTDWLRAKASFVIEGLKEADKDEFCRCELKLQKWYGDLRGKPFAIEAENSILDISGFSKQYNCAFIWQKDGVKKLNLYLIINYFKGGKLRFKKIKPEAFEANRFYTVINKKSGEIVPMEVNFNFDDPNLIILPLAFGKRFGREFIWNDLLSLETGSLKLANGRVIEKTLYNRRTRQDEPALFVALTFERREVLDSSNIKPMNLIGVDRGENIPAVIALTDPEGCPLSRFKDSLGNPTHILRIGESYKEKQRTIQAKKEVEQRRAGGYSRKYASKAKNLADDMVRNTARDLLYYAVTQDAMLIFENLSRGFGRQGKRTFMAERQYTRMEDWLTAKLAYEGLPSKTYLSKTLAQYTSKTCSNCGFTITSADYDRVLEKLKKTATGWMTTINGKELKVEGQITYYNRYKRQNVVKDLSVELDRLSEESVNNDISSWTKGRSGEALSLLKKRFSHRPVQEKFVCLNCGFETHADEQAALNIARSWLFLRSQEYKKYQTNKTTGNTDKRAFVETWQSFYRKKLKEVWKPAV

SEQ ID NO: 32981 - protein, 978 aa, synthetic construct
  REGION 1..978: note = engineered CasX variant
QEIKRISKIRRRLVKDSNTKKAGKTGPMKTLLVRVMTPDLRERLENLRKKPENIPQPISNTSRANLNKLLTDYTEMKKAILHVYWEEFQKDPVGLMSRVAQPASKKIDQNKLKPEMDEKGNLTTAGFACSQCGQPLFVYKLEQVSEKGKAYTNYFGRCNVAEHEKLILLAQLKPEKDSDEAVTYSLGKFGQRALDFYSIHVTKESTHPVKPLAQIAGNRYASSPVGKALSDACMGTIASFLSKYQDIIIEHQKVVKGNQKRLESLRELAGKENLEYPSVTLPPQPHTKEGVDAYNEVIARVRMWVNLNLWQKLKLSRDDAKPLLRLKGFPSFPLVERQANEVDWWDMVCNVKKLINEKKEDGKVFWQNLAGYKRQEALRPYLSSEEDRKKGKKFARYQLGDLLLHLEKKHGEDWGKVYDEAWERIDKKVEGLSKHIKLEEERRSEDAQSKAALTDWLRAKASFVIEGLKEADKDEFCRCELKLQKWYGDLRGKPFAIEAENSILDISGFSKQYNCAFIWQKDGVKKLNLYLIINYFKGGKLRFKKIKPEAFEANRFYTVINKKSGEIVPMEVNFNFDDPNLIILPLAFGKRFGREFIWNDLLSLETGSLKLANGRVIEKTLYNRRTRQDEPALFVALTFERREVLDSSNIKPMNLIGVDRGENIPAVIALTDPEGCPLSRFKDSLGNPTHILRIGESYKEKQRTIQAKKEVEQRRAGGYSRKYASKAKNLADDMVRNTARDLLYYAVTQDAMLIFENLSRGFGRQGKRTFMAERQYTRMEDWLTAKLAYEGLPSKTYLSKTLAQYTSKTCSNCGFTITSADYDRVLEKLKKTATGWMTTINGKELKVEGQITYYNRYKRQNVVKDLSVELDRLSEESVNNDISSWTKGRSGEALSLLKKRFSHRPVQEKFVCLNCGFETHADEQAALNIARSWLFLRSQEYKKYQTNKTTGNTDKRAFVETWQSFYRKKLKEVWKPAV

SEQ ID NO: 32982 - protein, 978 aa, synthetic construct
  REGION 1..978: note = engineered CasX variant
QEIKRISKIRRRLVKDSNTKKAGKTGPMKTLLVRVMTPDLRERLENLRKKPENIPQPISNTSRANLNKLLTDYTEMKKAILHVYWEEFQKDPVGLMSRVAQPASKKIDQNKLKPEMDEKGNLTTAGFACSQCGQPLFVYKLEQVSEKGKAYTNYFGRCNVAEHEKLILLAQLKPEKDSDEAVTYSLGKFGQRALDFYSIHVTKESTHPVKPLAQIAGNRYASTPVGKALSDACMGTIASFLSKYQDIIIEHQKVVKGNQKRLESLRELAGKENLEYPSVTLPPQPHTKEGVDAYNEVIARVRMWVNLNLWQKLKLSRDDAKPLLRLKGFPSFPLVERQANEVDWWDMVCNVKKLINEKKEDGKVFWQNLAGYKRQEALRPYLSSEEDRKKGKKFARYQLGDLLLHLEKKHGEDWGKVYDEAWERIDKKVEGLSKHIKLEEERRSEDAQSKAALTDWLRAKASFVIEGLKEADKDEFCRCELKLQKWYGDLRGKPFAIEAENSILDISGFSKQYNCAFIWQKDGVKKLNLYLIINYFKGGKLRFKKIKPEAFEANRFYTVINKKSGEIVPMEVNFNFDDPNLIILPLAFGKRFGREFIWNDLLSLETGSLKLANGRVIEKTLYNRRTRQDEPALFVALTFERREVLDSSNIKPMNLIGVDRGENIPAVIALTDPEGCPLSRFKDSLGNPTHILRIGESYKEKQRTIQAKKEVEQRRAGGYSRKYASKAKNLADDMVRNTARDLLYYAVTQDAMLIFENLSRGFGRQGKRTFMAERQYTRMEDWLTAKLAYEGLPSKTYLSKTLAQYTSKTCSNCGFTITSADYDRVLEKLKKTATGWMTTINGKELKVEGQITYYNRYKRQNVVKDLSVELDRLSEESVNNDISSWTKGRSGEALSLLKKRFSHRPVQEKFVCLNCGFETHADEQAALNIARSWLFLRSQEYKKYQTNKTTGNTDKRAFVETWQSFYRKKLKEVWKPAV

SEQ ID NO: 32983 - protein, 978 aa, synthetic construct
  REGION 1..978: note = engineered CasX variant
QEIKRISKIRRRLVKDSNTKKAGKTGPMKTLLVRVMTPDLRERLENLRKKPENIPQPISNTSRANLNKLLTDYTEMKKAILHVYWEEFQKDPVGLMSRVAQPASKKIDQNKLKPEMDEKGNLTTAGFACSQCGQPLFVYKLEQVSEKGKAYTNYFGRCNVAEHEKLILLAQLKPEKDSDEAVTYSLGKFGQRALDFYSIHVTKESTHPVKPLAQIAGNRYASAPVGKALSDACMGTIASFLSKYQDIIIEHQKVVKGNQKRLESLRELAGKENLEYPSVTLPPQPHTKEGVDAYNEVIARVRMWVNLNLWQKLKLSRDDAKPLLRLKGFPSFPLVERQANEVDWWDMVCNVKKLINEKKEDGKVFWQNLAGYKRQEALRPYLSSEEDRKKGKKFARYQLGDLLLHLEKKHGEDWGKVYDEAWERIDKKVEGLSKHIKLEEERRSEDAQSKAALTDWLRAKASFVIEGLKEADKDEFCRCELKLQKWYGDLRGKPFAIEAENSILDISGFSKQYNCAFIWQKDGVKKLNLYLIINYFKGGKLRFKKIKPEAFEANRFYTVINKKSGEIVPMEVNFNFDDPNLIILPLAFGKRFGREFIWNDLLSLETGSLKLANGRVIEKTLYNRRTRQDEPALFVALTFERREVLDSSNIKPMNLIGVDRGENIPAVIALTDPEGCPLSRFKDSLGNPTHILRIGESYKEKQRTIQAKKEVEQRRAGGYSRKYASKAKNLADDMVRNTARDLLYYAVTQDAMLIFENLSRGFGRQGKRTFMAERQYTRMEDWLTAKLAYEGLPSKTYLSKTLAQYTSKTCSNCGFTITSADYDRVLEKLKKTATGWMTTINGKELKVEGQITYYNRYKRQNVVKDLSVELDRLSEESVNNDISSWTKGRSGEALSLLKKRFSHRPVQEKFVCLNCGFETHADEQAALNIARSWLFLRSQEYKKYQTNKTTGNTDKRAFVETWQSFYRKKLKEVWKPAV

SEQ ID NO: 32984 - protein, 978 aa, synthetic construct
  REGION 1..978: note = engineered CasX variant
QEIKRISKIRRRLVKDSNTKKAGKTGPMKTLLVRVMTPDLRERLENLRKKPENIPQPISNTSRANLNKLLTDYTEMKKAILHVYWEEFQKDPVGLMSRVAQPASKKIDQNKLKPEMDEKGNLTTAGFACSQCGQPLFVYKLEQVSEKGKAYTNYFGRCNVAEHEKLILLAQLKPEKDSDEAVTYSLGKFGQRALDFYSIHVTKESTHPVKPLAQIAGNRYASVPVGKALSDACMGTIASFLSKYQDIIIEHQKVVKGNQKRLESLRELAGKENLEYPSVTLPPQPHTKEGVDAYNEVIARVRMWVNLNLWQKLKLSRDDAKPLLRLKGFPSFPLVERQANEVDWWDMVCNVKKLINEKKEDGKVFWQNLAGYKRQEALRPYLSSEEDRKKGKKFARYQLGDLLLHLEKKHGEDWGKVYDEAWERIDKKVEGLSKHIKLEEERRSEDAQSKAALTDWLRAKASFVIEGLKEADKDEFCRCELKLQKWYGDLRGKPFAIEAENSILDISGFSKQYNCAFIWQKDGVKKLNLYLIINYFKGGKLRFKKIKPEAFEANRFYTVINKKSGEIVPMEVNFNFDDPNLIILPLAFGKRFGREFIWNDLLSLETGSLKLANGRVIEKTLYNRRTRQDEPALFVALTFERREVLDSSNIKPMNLIGVDRGENIPAVIALTDPEGCPLSRFKDSLGNPTHILRIGESYKEKQRTIQAKKEVEQRRAGGYSRKYASKAKNLADDMVRNTARDLLYYAVTQDAMLIFENLSRGFGRQGKRTFMAERQYTRMEDWLTAKLAYEGLPSKTYLSKTLAQYTSKTCSNCGFTITSADYDRVLEKLKKTATGWMTTINGKELKVEGQITYYNRYKRQNVVKDLSVELDRLSEESVNNDISSWTKGRSGEALSLLKKRFSHRPVQEKFVCLNCGFETHADEQAALNIARSWLFLRSQEYKKYQTNKTTGNTDKRAFVETWQSFYRKKLKEVWKPAV

SEQ ID NO: 32985 - protein, 978 aa, synthetic construct
  REGION 1..978: note = engineered CasX variant
QEIKRISKIRRRLVKDSNTKKAGKTGPMKTLLVRVMTPDLRERLENLRKKPENIPQPISNTSRANLNKLLTDYTEMKKAILHVYWEEFQKDPVGLMSRVAQPASKKIDQNKLKPEMDEKGNLTTAGFACSQCGQPLFVYKLEQVSEKGKAYTNYFGRCNVAEHEKLIKLAQLKPEKDSDEAVTYSLGKFGQRALDFYSIHVTKESTHPVKPLAQIAGNRYASGPVGKALSDACMGTIASFLSKYQDIIIEHQKVVKGNQKRLESLRELAGKENLEYPSVTLPPQPHTKEGVDAYNEVIARVRMWVNLNLWQKLKLSRDDAKPLLRLKGFPSFPLVERQANEVDWWDMVCNVKKLINEKKEDGKVFWQNLAGYKRQEALRPYLSSEEDRKKGKKFARYQLGDLLLHLEKKHGEDWGKVYDEAWERIDKKVEGLSKHIKLEEERRSEDAQSKAALTDWLRAKASFVIEGLKEADKDEFCRCELKLQKWYGDLRGKPFAIEAENSILDISGFSKQYNCAFIWQKDGVKKLNLYLIINYFKGGKLRFKKIKPEAFEANRFYTVINKKSGEIVPMEVNFNFDDPNLIILPLAFGKRFGREFIWNDLLSLETGSLKLANGRVIEKTLYNRRTRQDEPALFVALTFERREVLDSSNIKPMNLIGVDRGENIPAVIALTDPEGCPLSRFKDSLGNPTHILRIGESYKEKQRTIQAKKEVEQRRAGGYSRKYASKAKNLADDMVRNTARDLLYYAVTQDAMLIFENLSRGFGRQGKRTFMAERQYTRMEDWLTAKLAYEGLPSKTYLSKTLAQYTSKTCSNCGFTITSADYDRVLEKLKKTATGWMTTINGKELKVEGQITYYNRYKRQNVVKDLSVELDRLSEESVNNDISSWTKGRSGEALSLLKKRFSHRPVQEKFVCLNCGFETHADEQAALNIARSWLFLRSQEYKKYQTNKTTGNTDKRAFVETWQSFYRKKLKEVWKPAV

SEQ ID NO: 32986 - protein, 977 aa, synthetic construct
  REGION 1..977: note = engineered CasX variant
QEIKRISKIRRRLVKDSNTKKAGKTGPMKTLLVRVMTPDLRERLENLRKKPENIPQPISNTSRANLNKLLTDYTEMKKAILHVYWEEFQKDPVGLMSRVAQPASKKIDQNKLKPEMDEKGNLTTAGFACSQCGQPLFVYKLEQVSEKGKAYTNYFGRCNVAEHEKLILLAQLKPEKDSDEAVTYSLGKFGQRALDFYSIHVTKESTHPVKPLAQIAGNRYASPVGKALSDACMGTIASFLSKYQDIIIEHQKVVKGNQKRLESLRELAGKENLEYPSVTLPPQPHTKEGVDAYNEVIARVRMWVNLNLWQKLKLSRDDAKPLLRLKGFPSFPLVERQANEVDWWDMVCNVKKLINEKKEDGKVFWQNLAGYKRQEALRPYLSSEEDRKKGKKFARYQLGDLLLHLEKKHGEDWGKVYDEAWERIDKKVEGLSKHIKLEEERRSEDAQSKAALTDWLRAKASFVIEGLKEADKDEFCRCELKLQKWYGDLRGKPFAIEAENSILDISGFSKQYNCAFIWQKDGVKKLNLYLIINYFKGGKLRFKKIKPEAFEANRFYTVINKKSGEIVPMEVNFNFDDPNLIILPLAFGKRFGREFIWNDLLSLETGSLKLANGRVIEKTLYNRRTRQDEPALFVALTFERREVLDSSNIKPMNLIGVDRGENIPAVIALTDPEGCPLSRFKDSLGNPTHILRIGESYKEKQRTIQAKKEVEQRRAGGYSRKYASKAKNLADDMVRNTARDLLYYAVTQDAMLIFENLSRGFGRQGKRTFMAERQYTRMEDWLTAKLAYEGLPSKTYLSKTLAQYTSKTCSNCGFTITSADYDRVLEKLKKTATGWMTTINGKELKVEGQITYYNRYKRQNVVKDLSVELDRLSEESVNNDISSWTKGRSGEALSLLKKRFSHRPVQEKFVCLNCGFETHADEQAALNIARSWLFLRSQEYKKYQTNKTTGNTDKRAFVETWQSFYRKKLKEVWKPAV

SEQ ID NO: 32987 - protein, 978 aa, synthetic construct
  REGION 1..978: note = engineered CasX variant
QEIKRISKIRRRLVKDSNTKKAGKTGPMKTLLVRVMTPDLRERLENLRKKPENIPQPISNTSRANLNKLLTDYTEMKKAILHVYWEEFQKDPVGLMSRVAQPASKKIDQNKLKPEMDEKGNLTTAGFACSQCGQPLFVYKLEQVSEKGKAYTNYFGRCNVAEHEKLILLAQLKPEKDSDEAVTYSLGKFGQRALDFYSIHVTKESTHPVKPLAQIAGNRYASYPVGKALSDACMGTIASFLSKYQDIIIEHQKVVKGNQKRLESLRELAGKENLEYPSVTLPPQPHTKEGVDAYNEVIARVRMWVNLNLWQKLKLSRDDAKPLLRLKGFPSFPLVERQANEVDWWDMVCNVKKLINEKKEDGKVFWQNLAGYKRQEALRPYLSSEEDRKKGKKFARYQLGDLLLHLEKKHGEDWGKVYDEAWERIDKKVEGLSKHIKLEEERRSEDAQSKAALTDWLRAKASFVIEGLKEADKDEFCRCELKLQKWYGDLRGKPFAIEAENSILDISGFSKQYNCAFIWQKDGVKKLNLYLIINYFKGGKLRFKKIKPEAFEANRFYTVINKKSGEIVPMEVNFNFDDPNLIILPLAFGKRVGREFIWNDLLSLETGSLKLANGRVIEKTLYNRRTRQDEPALFVALTFERREVLDSSNIKPMNLIGVDRGENIPAVIALTDPEGCPLSRFKDSLGNPTHILRIGESYKEKQRTIQAKKEVEQRRAGGYSRKYASKAKNLADDMVRNTARDLLYYAVTQDAMLIFENLSRGFGRQGKRTFMAERQYTRMEDWLTAKLAYEGLPSKTYLSKTLAQYTSKTCSNCGFTITSADYDRVLEKLKKTATGWMTTINGKELKVEGQITYYNRYKRQNVVKDLSVELDRLSEESVNNDISSWTKGRSGEALSLLKKRFSHRPVQEKFVCLNCGFETHADEQAALNIARSWLFLRSQEYKKYQTNKTTGNTDKRAFVETWQSFYRKKLKEVWKPAV

SEQ ID NO: 32988 - protein, 978 aa, synthetic construct
  REGION 1..978: note = engineered CasX variant
QEIKRISKIRRRLVKDSNTKKAGKTGPMKTLLVRVMTPDLRERLENLRKKPENIPQPISNTSRANLNKLLTDYTEMKKAILHVYWEEFQKDPVGLMSRVAQPASKKIDQNKLKPEMDEKGNLTTAGFACSQCGQPLFVYKLEQVSEKGKAYTNYFGRCNVAEHEKLILLAQLKPEKDSDEAVTYSLGKFGQRALDFYSIHVTKESTHPVKPLAQIAGNRYASHPVGKALSDACMGTIASFLSKYQDIIIEHQKVVKGNQKRLESLRELAGKENLEYPSVTLPPQPHTKEGVDAYNEVIARVRMWVNLNLWQKLKLSRDDAKPLLRLKGFPSFPLVERQANEVDWWDMVCNVKKLINEKKEDGKVFWQNLAGYKRQEALRPYLSSEEDRKKGKKFARYQLGDLLLHLEKKHGEDWGKVYDEAWERIDKKVEGLSKHIKLEEERRSEDAQSKAALTDWLRAKASFVIEGLKEADKDEFCRCELKLQKWYGDLRGKPFAIEAENSILDISGFSKQYNCAFIWQKDGVKKLNLYLIINYFKGGKLRFKKIKPEAFEANRFYTVINKKSGEIVPMEVNFNFDDPNLIILPLAFGKRVGREFIWNDLLSLETGSLKLANGRVIEKTLYNRRTRQDEPALFVALTFERREVLDSSNIKPMNLIGVDRGENIPAVIALTDPEGCPLSRFKDSLGNPTHILRIGESYKEKQRTIQAKKEVEQRRAGGYSRKYASKAKNLADDMVRNTARDLLYYAVTQDAMLIFENLSRGFGRQGKRTFMAERQYTRMEDWLTAKLAYEGLPSKTYLSKTLAQYTSKTCSNCGFTITSADYDRVLEKLKKTATGWMTTINGKELKVEGQITYYNRYKRQNVVKDLSVELDRLSEESVNNDISSWTKGRSGEALSLLKKRFSHRPVQEKFVCLNCGFETHADEQAALNIARSWLFLRSQEYKKYQTNKTTGNTDKRAFVETWQSFYRKKLKEVWKPAV

SEQ ID NO: 32989 - protein, 978 aa, synthetic construct
  REGION 1..978: note = engineered CasX variant
QEIKRISKIRRRLVKDSNTKKAGKTGPMKTLLVRVMTPDLRERLENLRKKPENIPQPISNTSRANLNKLLTDYTEMKKAILHVYWEEFQKDPVGLMSRVAQPASKKIDQNKLKPEMDEKGNLTTAGFACSQCGQPLFVYKLEQVSEKGKAYTNYFGRCNVAEHEKLILLAQLKPEKDSDEAVTYSLGKFGQRALDFYSIHVTKESTHPVKPLAQIAGNRYASSPVGKALSDACMGTIASFLSKYQDIIIEHQKVVKGNQKRLESLRELAGKENLEYPSVTLPPQPHTKEGVDAYNEVIARVRMWVNLNLWQKLKLSRDDAKPLLRLKGFPSFPLVERQANEVDWWDMVCNVKKLINEKKEDGKVFWQNLAGYKRQEALRPYLSSEEDRKKGKKFARYQLGDLLLHLEKKHGEDWGKVYDEAWERIDKKVEGLSKHIKLEEERRSEDAQSKAALTDWLRAKASFVIEGLKEADKDEFCRCELKLQKWYGDLRGKPFAIEAENSILDISGFSKQYNCAFIWQKDGVKKLNLYLIINYFKGGKLRFKKIKPEAFEANRFYTVINKKSGEIVPMEVNFNFDDPNLIILPLAFGKRVGREFIWNDLLSLETGSLKLANGRVIEKTLYNRRTRQDEPALFVALTFERREVLDSSNIKPMNLIGVDRGENIPAVIALTDPEGCPLSRFKDSLGNPTHILRIGESYKEKQRTIQAKKEVEQRRAGGYSRKYASKAKNLADDMVRNTARDLLYYAVTQDAMLIFENLSRGFGRQGKRTFMAERQYTRMEDWLTAKLAYEGLPSKTYLSKTLAQYTSKTCSNCGFTITSADYDRVLEKLKKTATGWMTTINGKELKVEGQITYYNRYKRQNVVKDLSVELDRLSEESVNNDISSWTKGRSGEALSLLKKRFSHRPVQEKFVCLNCGFETHADEQAALNIARSWLFLRSQEYKKYQTNKTTGNTDKRAFVETWQSFYRKKLKEVWKPAV

SEQ ID NO: 32990 - protein, 978 aa, synthetic construct
  REGION 1..978: note = engineered CasX variant
QEIKRISKIRRRLVKDSNTKKAGKTGPMKTLLVRVMTPDLRERLENLRKKPENIPQPISNTSRANLNKLLTDYTEMKKAILHVYWEEFQKDPVGLMSRVAQPASKKIDQNKLKPEMDEKGNLTTAGFACSQCGQPLFVYKLEQVSEKGKAYTNYFGRCNVAEHEKLILLAQLKPEKDSDEAVTYSLGKFGQRALDFYSIHVTKESTHPVKPLAQIAGNRYASTPVGKALSDACMGTIASFLSKYQDIIIEHQKVVKGNQKRLESLRELAGKENLEYPSVTLPPQPHTKEGVDAYNEVIARVRMWVNLNLWQKLKLSRDDAKPLLRLKGFPSFPLVERQANEVDWWDMVCNVKKLINEKKEDGKVFWQNLAGYKRQEALRPYLSSEEDRKKGKKFARYQLGDLLLHLEKKHGEDWGKVYDEAWERIDKKVEGLSKHIKLEEERRSEDAQSKAALTDWLRAKASFVIEGLKEADKDEFCRCELKLQKWYGDLRGKPFAIEAENSILDISGFSKQYNCAFIWQKDGVKKLNLYLIINYFKGGKLRFKKIKPEAFEANRFYTVINKKSGEIVPMEVNFNFDDPNLIILPLAFGKRVGREFIWNDLLSLETGSLKLANGRVIEKTLYNRRTRQDEPALFVALTFERREVLDSSNIKPMNLIGVDRGENIPAVIALTDPEGCPLSRFKDSLGNPTHILRIGESYKEKQRTIQAKKEVEQRRAGGYSRKYASKAKNLADDMVRNTARDLLYYAVTQDAMLIFENLSRGFGRQGKRTFMAERQYTRMEDWLTAKLAYEGLPSKTYLSKTLAQYTSKTCSNCGFTITSADYDRVLEKLKKTATGWMTTINGKELKVEGQITYYNRYKRQNVVKDLSVELDRLSEESVNNDISSWTKGRSGEALSLLKKRFSHRPVQEKFVCLNCGFETHADEQAALNIARSWLFLRSQEYKKYQTNKTTGNTDKRAFVETWQSFYRKKLKEVWKPAV

SEQ ID NO: 32991 - protein, 978 aa, synthetic construct
  REGION 1..978: note = engineered CasX variant
QEIKRISKIRRRLVKDSNTKKAGKTGPMKTLLVRVMTPDLRERLENLRKKPENIPQPISNTSRANLNKLLTDYTEMKKAILHVYWEEFQKDPVGLMSRVAQPASKKIDQNKLKPEMDEKGNLTTAGFACSQCGQPLFVYKLEQVSEKGKAYTNYFGRCNVAEHEKLILLAQLKPEKDSDEAVTYSLGKFGQRALDFYSIHVTKESTHPVKPLAQIAGNRYASAPVGKALSDACMGTIASFLSKYQDIIIEHQKVVKGNQKRLESLRELAGKENLEYPSVTLPPQPHTKEGVDAYNEVIARVRMWVNLNLWQKLKLSRDDAKPLLRLKGFPSFPLVERQANEVDWWDMVCNVKKLINEKKEDGKVFWQNLAGYKRQEALRPYLSSEEDRKKGKKFARYQLGDLLLHLEKKHGEDWGKVYDEAWERIDKKVEGLSKHIKLEEERRSEDAQSKAALTDWLRAKASFVIEGLKEADKDEFCRCELKLQKWYGDLRGKPFAIEAENSILDISGFSKQYNCAFIWQKDGVKKLNLYLIINYFKGGKLRFKKIKPEAFEANRFYTVINKKSGEIVPMEVNFNFDDPNLIILPLAFGKRVGREFIWNDLLSLETGSLKLANGRVIEKTLYNRRTRQDEPALFVALTFERREVLDSSNIKPMNLIGVDRGENIPAVIALTDPEGCPLSRFKDSLGNPTHILRIGESYKEKQRTIQAKKEVEQRRAGGYSRKYASKAKNLADDMVRNTARDLLYYAVTQDAMLIFENLSRGFGRQGKRTFMAERQYTRMEDWLTAKLAYEGLPSKTYLSKTLAQYTSKTCSNCGFTITSADYDRVLEKLKKTATGWMTTINGKELKVEGQITYYNRYKRQNVVKDLSVELDRLSEESVNNDISSWTKGRSGEALSLLKKRFSHRPVQEKFVCLNCGFETHADEQAALNIARSWLFLRSQEYKKYQTNKTTGNTDKRAFVETWQSFYRKKLKEVWKPAV

SEQ ID NO: 32992 - protein, 978 aa, synthetic construct
  REGION 1..978: note = engineered CasX variant
QEIKRISKIRRRLVKDSNTKKAGKTGPMKTLLVRVMTPDLRERLENLRKKPENIPQPISNTSRANLNKLLTDYTEMKKAILHVYWEEFQKDPVGLMSRVAQPASKKIDQNKLKPEMDEKGNLTTAGFACSQCGQPLFVYKLEQVSEKGKAYTNYFGRCNVAEHEKLILLAQLKPEKDSDEAVTYSLGKFGQRALDFYSIHVTKESTHPVKPLAQIAGNRYASVPVGKALSDACMGTIASFLSKYQDIIIEHQKVVKGNQKRLESLRELAGKENLEYPSVTLPPQPHTKEGVDAYNEVIARVRMWVNLNLWQKLKLSRDDAKPLLRLKGFPSFPLVERQANEVDWWDMVCNVKKLINEKKEDGKVFWQNLAGYKRQEALRPYLSSEEDRKKGKKFARYQLGDLLLHLEKKHGEDWGKVYDEAWERIDKKVEGLSKHIKLEEERRSEDAQSKAALTDWLRAKASFVIEGLKEADKDEFCRCELKLQKWYGDLRGKPFAIEAENSILDISGFSKQYNCAFIWQKDGVKKLNLYLIINYFKGGKLRFKKIKPEAFEANRFYTVINKKSGEIVPMEVNFNFDDPNLIILPLAFGKRVGREFIWNDLLSLETGSLKLANGRVIEKTLYNRRTRQDEPALFVALTFERREVLDSSNIKPMNLIGVDRGENIPAVIALTDPEGCPLSRFKDSLGNPTHILRIGESYKEKQRTIQAKKEVEQRRAGGYSRKYASKAKNLADDMVRNTARDLLYYAVTQDAMLIFENLSRGFGRQGKRTFMAERQYTRMEDWLTAKLAYEGLPSKTYLSKTLAQYTSKTCSNCGFTITSADYDRVLEKLKKTATGWMTTINGKELKVEGQITYYNRYKRQNVVKDLSVELDRLSEESVNNDISSWTKGRSGEALSLLKKRFSHRPVQEKFVCLNCGFETHADEQAALNIARSWLFLRSQEYKKYQTNKTTGNTDKRAFVETWQSFYRKKLKEVWKPAV

SEQ ID NO: 32993 - protein, 978 aa, synthetic construct
  REGION 1..978: note = engineered CasX variant
QEIKRISKIRRRLVKDSNTKKAGKTGPMKTLLVRVMTPDLRERLENLRKKPENIPQPISNTSRANLNKLLTDYTEMKKAILHVYWEEFQKDPVGLMSRVAQPASKKIDQNKLKPEMDEKGNLTTAGFACSQCGQPLFVYKLEQVSEKGKAYTNYFGRCNVAEHEKLIKLAQLKPEKDSDEAVTYSLGKFGQRALDFYSIHVTKESTHPVKPLAQIAGNRYASGPVGKALSDACMGTIASFLSKYQDIIIEHQKVVKGNQKRLESLRELAGKENLEYPSVTLPPQPHTKEGVDAYNEVIARVRMWVNLNLWQKLKLSRDDAKPLLRLKGFPSFPLVERQANEVDWWDMVCNVKKLINEKKEDGKVFWQNLAGYKRQEALRPYLSSEEDRKKGKKFARYQLGDLLLHLEKKHGEDWGKVYDEAWERIDKKVEGLSKHIKLEEERRSEDAQSKAALTDWLRAKASFVIEGLKEADKDEFCRCELKLQKWYGDLRGKPFAIEAENSILDISGFSKQYNCAFIWQKDGVKKLNLYLIINYFKGGKLRFKKIKPEAFEANRFYTVINKKSGEIVPMEVNFNFDDPNLIILPLAFGKRVGREFIWNDLLSLETGSLKLANGRVIEKTLYNRRTRQDEPALFVALTFERREVLDSSNIKPMNLIGVDRGENIPAVIALTDPEGCPLSRFKDSLGNPTHILRIGESYKEKQRTIQAKKEVEQRRAGGYSRKYASKAKNLADDMVRNTARDLLYYAVTQDAMLIFENLSRGFGRQGKRTFMAERQYTRMEDWLTAKLAYEGLPSKTYLSKTLAQYTSKTCSNCGFTITSADYDRVLEKLKKTATGWMTTINGKELKVEGQITYYNRYKRQNVVKDLSVELDRLSEESVNNDISSWTKGRSGEALSLLKKRFSHRPVQEKFVCLNCGFETHADEQAALNIARSWLFLRSQEYKKYQTNKTTGNTDKRAFVETWQSFYRKKLKEVWKPAV

SEQ ID NO: 32994 - protein, 977 aa, synthetic construct
  REGION 1..977: note = engineered CasX variant
QEIKRISKIRRRLVKDSNTKKAGKTGPMKTLLVRVMTPDLRERLENLRKKPENIPQPISNTSRANLNKLLTDYTEMKKAILHVYWEEFQKDPVGLMSRVAQPASKKIDQNKLKPEMDEKGNLTTAGFACSQCGQPLFVYKLEQVSEKGKAYTNYFGRCNVAEHEKLILLAQLKPEKDSDEAVTYSLGKFGQRALDFYSIHVTKESTHPVKPLAQIAGNRYASPVGKALSDACMGTIASFLSKYQDIIIEHQKVVKGNQKRLESLRELAGKENLEYPSVTLPPQPHTKEGVDAYNEVIARVRMWVNLNLWQKLKLSRDDAKPLLRLKGFPSFPLVERQANEVDWWDMVCNVKKLINEKKEDGKVFWQNLAGYKRQEALRPYLSSEEDRKKGKKFARYQLGDLLLHLEKKHGEDWGKVYDEAWERIDKKVEGLSKHIKLEEERRSEDAQSKAALTDWLRAKASFVIEGLKEADKDEFCRCELKLQKWYGDLRGKPFAIEAENSILDISGFSKQYNCAFIWQKDGVKKLNLYLIINYFKGGKLRFKKIKPEAFEANRFYTVINKKSGEIVPMEVNFNFDDPNLIILPLAFGKRVGREFIWNDLLSLETGSLKLANGRVIEKTLYNRRTRQDEPALFVALTFERREVLDSSNIKPMNLIGVDRGENIPAVIALTDPEGCPLSRFKDSLGNPTHILRIGESYKEKQRTIQAKKEVEQRRAGGYSRKYASKAKNLADDMVRNTARDLLYYAVTQDAMLIFENLSRGFGRQGKRTFMAERQYTRMEDWLTAKLAYEGLPSKTYLSKTLAQYTSKTCSNCGFTITSADYDRVLEKLKKTATGWMTTINGKELKVEGQITYYNRYKRQNVVKDLSVELDRLSEESVNNDISSWTKGRSGEALSLLKKRFSHRPVQEKFVCLNCGFETHADEQAALNIARSWLFLRSQEYKKYQTNKTTGNTDKRAFVETWQSFYRKKLKEVWKPAV

SEQ ID NO: 32995 - protein, 979 aa, synthetic construct
  REGION 1..979: note = engineered CasX variant
QEIKRISKIRRRLVKDSNTKKAGKTGPMKTLLVRVMTPDLRERLENLRKKPENIPQPISNTSRANLNKLLTDYTEMKKAILHVYWEEFQKDPVGLMSRVAQPASKKIDQNKLKPEMDEKGNLTTAGFACSQCGQPLFVYKLEQVSEKGKAYTNYFGRCNVAEHEKLILLAQLKPEKDSDEAVTYSLGKFGQRALDFYSIHVTKESTHPVKPLAQIAGNRYASYPVGKALSDACMGTIASFLSKYQDIIIEHQKVVKGNQKRLESLRELAGKENLEYPSVTLPPQPHTKEGVDAYNEVIARVRMWVNLNLWQKLKLSRDDAKPLLRLKGFPSFPLVERQANEVDWWDMVCNVKKLINEKKEDGKVFWQNLAGYKRQEALRPYLSSEEDRKKGKKFARYQLGDLLLHLEKKHGEDWGKVYDEAWERIDKKVEGLSKHIKLEEERRSEDAQSKAALTDWLRAKASFVIEGLKEADKDEFCRCELKLQKWYGDLRGKPFAIEAENSILDISGFSKQYNCAFIWQKDGVKKLNLYLIINYFKGGKLRFKKIKPEAFEANRFYTVINKKSGEIVPMEVNFNFDDPNLIILPLAFGKRQGREFIWNDLLSLETGSLKLANGRVIEKTLYNRRTRQDEPALFVALTFERREVLDSSNIKTPMNLIGVDRGENIPAVIALTDPEGCPLSRFKDSLGNPTHILRIGESYKEKQRTIQAKKEVEQRRAGGYSRKYASKAKNLADDMVRNTARDLLYYAVTQDAMLIFENLSRGFGRQGKRTFMAERQYTRMEDWLTAKLAYEGLPSKTYLSKTLAQYTSKTCSNCGFTITSADYDRVLEKLKKTATGWMTTINGKELKVEGQITYYNRYKRQNVVKDLSVELDRLSEESVNNDISSWTKGRSGEALSLLKKRFSHRPVQEKFVCLNCGFETHADEQAALNIARSWLFLRSQEYKKYQTNKTTGNTDKRAFVETWQSFYRKKLKEVWKPAV

SEQ ID NO: 32996 - protein, 979 aa, synthetic construct
  REGION 1..979: note = engineered CasX variant
QEIKRISKIRRRLVKDSNTKKAGKTGPMKTLLVRVMTPDLRERLENLRKKPENIPQPISNTSRANLNKLLTDYTEMKKAILHVYWEEFQKDPVGLMSRVAQPASKKIDQNKLKPEMDEKGNLTTAGFACSQCGQPLFVYKLEQVSEKGKAYTNYFGRCNVAEHEKLILLAQLKPEKDSDEAVTYSLGKFGQRALDFYSIHVTKESTHPVKPLAQIAGNRYASHPVGKALSDACMGTIASFLSKYQDIIIEHQKVVKGNQKRLESLRELAGKENLEYPSVTLPPQPHTKEGVDAYNEVIARVRMWVNLNLWQKLKLSRDDAKPLLRLKGFPSFPLVERQANEVDWWDMVCNVKKLINEKKEDGKVFWQNLAGYKRQEALRPYLSSEEDRKKGKKFARYQLGDLLLHLEKKHGEDWGKVYDEAWERIDKKVEGLSKHIKLEEERRSEDAQSKAALTDWLRAKASFVIEGLKEADKDEFCRCELKLQKWYGDLRGKPFAIEAENSILDISGFSKQYNCAFIWQKDGVKKLNLYLIINYFKGGKLRFKKIKPEAFEANRFYTVINKKSGEIVPMEVNFNFDDPNLIILPLAFGKRQGREFIWNDLLSLETGSLKLANGRVIEKTLYNRRTRQDEPALFVALTFERREVLDSSNIKTPMNLIGVDRGENIPAVIALTDPEGCPLSRFKDSLGNPTHILRIGESYKEKQRTIQAKKEVEQRRAGGYSRKYASKAKNLADDMVRNTARDLLYYAVTQDAMLIFENLSRGFGRQGKRTFMAERQYTRMEDWLTAKLAYEGLPSKTYLSKTLAQYTSKTCSNCGFTITSADYDRVLEKLKKTATGWMTTINGKELKVEGQITYYNRYKRQNVVKDLSVELDRLSEESVNNDISSWTKGRSGEALSLLKKRFSHRPVQEKFVCLNCGFETHADEQAALNIARSWLFLRSQEYKKYQTNKTTGNTDKRAFVETWQSFYRKKLKEVWKPAV

SEQ ID NO: 32997 - protein, 979 aa, synthetic construct
  REGION 1..979: note = engineered CasX variant
QEIKRISKIRRRLVKDSNTKKAGKTGPMKTLLVRVMTPDLRERLENLRKKPENIPQPISNTSRANLNKLLTDYTEMKKAILHVYWEEFQKDPVGLMSRVAQPASKKIDQNKLKPEMDEKGNLTTAGFACSQCGQPLFVYKLEQVSEKGKAYTNYFGRCNVAEHEKLILLAQLKPEKDSDEAVTYSLGKFGQRALDFYSIHVTKESTHPVKPLAQIAGNRYASSPVGKALSDACMGTIASFLSKYQDIIIEHQKVVKGNQKRLESLRELAGKENLEYPSVTLPPQPHTKEGVDAYNEVIARVRMWVNLNLWQKLKLSRDDAKPLLRLKGFPSFPLVERQANEVDWWDMVCNVKKLINEKKEDGKVFWQNLAGYKRQEALRPYLSSEEDRKKGKKFARYQLGDLLLHLEKKHGEDWGKVYDEAWERIDKKVEGLSKHIKLEEERRSEDAQSKAALTDWLRAKASFVIEGLKEADKDEFCRCELKLQKWYGDLRGKPFAIEAENSILDISGFSKQYNCAFIWQKDGVKKLNLYLIINYFKGGKLRFKKIKPEAFEANRFYTVINKKSGEIVPMEVNFNFDDPNLIILPLAFGKRQGREFIWNDLLSLETGSLKLANGRVIEKTLYNRRTRQDEPALFVALTFERREVLDSSNIKTPMNLIGVDRGENIPAVIALTDPEGCPLSRFKDSLGNPTHILRIGESYKEKQRTIQAKKEVEQRRAGGYSRKYASKAKNLADDMVRNTARDLLYYAVTQDAMLIFENLSRGFGRQGKRTFMAERQYTRMEDWLTAKLAYEGLPSKTYLSKTLAQYTSKTCSNCGFTITSADYDRVLEKLKKTATGWMTTINGKELKVEGQITYYNRYKRQNVVKDLSVELDRLSEESVNNDISSWTKGRSGEALSLLKKRFSHRPVQEKFVCLNCGFETHADEQAALNIARSWLFLRSQEYKKYQTNKTTGNTDKRAFVETWQSFYRKKLKEVWKPAV

SEQ ID NO: 32998 - protein, 979 aa, synthetic construct
  REGION 1..979: note = engineered CasX variant
QEIKRISKIRRRLVKDSNTKKAGKTGPMKTLLVRVMTPDLRERLENLRKKPENIPQPISNTSRANLNKLLTDYTEMKKAILHVYWEEFQKDPVGLMSRVAQPASKKIDQNKLKPEMDEKGNLTTAGFACSQCGQPLFVYKLEQVSEKGKAYTNYFGRCNVAEHEKLILLAQLKPEKDSDEAVTYSLGKFGQRALDFYSIHVTKESTHPVKPLAQIAGNRYASTPVGKALSDACMGTIASFLSKYQDIIIEHQKVVKGNQKRLESLRELAGKENLEYPSVTLPPQPHTKEGVDAYNEVIARVRMWVNLNLWQKLKLSRDDAKPLLRLKGFPSFPLVERQANEVDWWDMVCNVKKLINEKKEDGKVFWQNLAGYKRQEALRPYLSSEEDRKKGKKFARYQLGDLLLHLEKKHGEDWGKVYDEAWERIDKKVEGLSKHIKLEEERRSEDAQSKAALTDWLRAKASFVIEGLKEADKDEFCRCELKLQKWYGDLRGKPFAIEAENSILDISGFSKQYNCAFIWQKDGVKKLNLYLIINYFKGGKLRFKKIKPEAFEANRFYTVINKKSGEIVPMEVNFNFDDPNLIILPLAFGKRQGREFIWNDLLSLETGSLKLANGRVIEKTLYNRRTRQDEPALFVALTFERREVLDSSNIKTPMNLIGVDRGENIPAVIALTDPEGCPLSRFKDSLGNPTHILRIGESYKEKQRTIQAKKEVEQRRAGGYSRKYASKAKNLADDMVRNTARDLLYYAVTQDAMLIFENLSRGFGRQGKRTFMAERQYTRMEDWLTAKLAYEGLPSKTYLSKTLAQYTSKTCSNCGFTITSADYDRVLEKLKKTATGWMTTINGKELKVEGQITYYNRYKRQNVVKDLSVELDRLSEESVNNDISSWTKGRSGEALSLLKKRFSHRPVQEKFVCLNCGFETHADEQAALNIARSWLFLRSQEYKKYQTNKTTGNTDKRAFVETWQSFYRKKLKEVWKPAV

SEQ ID NO: 32999 - protein, 979 aa, synthetic construct
  REGION 1..979: note = engineered CasX variant
QEIKRISKIRRRLVKDSNTKKAGKTGPMKTLLVRVMTPDLRERLENLRKKPENIPQPISNTSRANLNKLLTDYTEMKKAILHVYWEEFQKDPVGLMSRVAQPASKKIDQNKLKPEMDEKGNLTTAGFACSQCGQPLFVYKLEQVSEKGKAYTNYFGRCNVAEHEKLILLAQLKPEKDSDEAVTYSLGKFGQRALDFYSIHVTKESTHPVKPLAQIAGNRYASAPVGKALSDACMGTIASFLSKYQDIIIEHQKVVKGNQKRLESLRELAGKENLEYPSVTLPPQPHTKEGVDAYNEVIARVRMWVNLNLWQKLKLSRDDAKPLLRLKGFPSFPLVERQANEVDWWDMVCNVKKLINEKKEDGKVFWQNLAGYKRQEALRPYLSSEEDRKKGKKFARYQLGDLLLHLEKKHGEDWGKVYDEAWERIDKKVEGLSKHIKLEEERRSEDAQSKAALTDWLRAKASFVIEGLKEADKDEFCRCELKLQKWYGDLRGKPFAIEAENSILDISGFSKQYNCAFIWQKDGVKKLNLYLIINYFKGGKLRFKKIKPEAFEANRFYTVINKKSGEIVPMEVNFNFDDPNLIILPLAFGKRQGREFIWNDLLSLETGSLKLANGRVIEKTLYNRRTRQDEPALFVALTFERREVLDSSNIKTPMNLIGVDRGENIPAVIALTDPEGCPLSRFKDSLGNPTHILRIGESYKEKQRTIQAKKEVEQRRAGGYSRKYASKAKNLADDMVRNTARDLLYYAVTQDAMLIFENLSRGFGRQGKRTFMAERQYTRMEDWLTAKLAYEGLPSKTYLSKTLAQYTSKTCSNCGFTITSADYDRVLEKLKKTATGWMTTINGKELKVEGQITYYNRYKRQNVVKDLSVELDRLSEESVNNDISSWTKGRSGEALSLLKKRFSHRPVQEKFVCLNCGFETHADEQAALNIARSWLFLRSQEYKKYQTNKTTGNTDKRAFVETWQSFYRKKLKEVWKPAV

SEQ ID NO: 33000 - protein, 979 aa, synthetic construct
  REGION 1..979: note = engineered CasX variant
QEIKRISKIRRRLVKDSNTKKAGKTGPMKTLLVRVMTPDLRERLENLRKKPENIPQPISNTSRANLNKLLTDYTEMKKAILHVYWEEFQKDPVGLMSRVAQPASKKIDQNKLKPEMDEKGNLTTAGFACSQCGQPLFVYKLEQVSEKGKAYTNYFGRCNVAEHEKLILLAQLKPEKDSDEAVTYSLGKFGQRALDFYSIHVTKESTHPVKPLAQIAGNRYASVPVGKALSDACMGTIASFLSKYQDIIIEHQKVVKGNQKRLESLRELAGKENLEYPSVTLPPQPHTKEGVDAYNEVIARVRMWVNLNLWQKLKLSRDDAKPLLRLKGFPSFPLVERQANEVDWWDMVCNVKKLINEKKEDGKVFWQNLAGYKRQEALRPYLSSEEDRKKGKKFARYQLGDLLLHLEKKHGEDWGKVYDEAWERIDKKVEGLSKHIKLEEERRSEDAQSKAALTDWLRAKASFVIEGLKEADKDEFCRCELKLQKWYGDLRGKPFAIEAENSILDISGFSKQYNCAFIWQKDGVKKLNLYLIINYFKGGKLRFKKIKPEAFEANRFYTVINKKSGEIVPMEVNFNFDDPNLIILPLAFGKRQGREFIWNDLLSLETGSLKLANGRVIEKTLYNRRTRQDEPALFVALTFERREVLDSSNIKTPMNLIGVDRGENIPAVIALTDPEGCPLSRFKDSLGNPTHILRIGESYKEKQRTIQAKKEVEQRRAGGYSRKYASKAKNLADDMVRNTARDLLYYAVTQDAMLIFENLSRGFGRQGKRTFMAERQYTRMEDWLTAKLAYEGLPSKTYLSKTLAQYTSKTCSNCGFTITSADYDRVLEKLKKTATGWMTTINGKELKVEGQITYYNRYKRQNVVKDLSVELDRLSEESVNNDISSWTKGRSGEALSLLKKRFSHRPVQEKFVCLNCGFETHADEQAALNIARSWLFLRSQEYKKYQTNKTTGNTDKRAFVETWQSFYRKKLKEVWKPAV

SEQ ID NO: 33001 - protein, 979 aa, synthetic construct
  REGION 1..979: note = engineered CasX variant
QEIKRISKIRRRLVKDSNTKKAGKTGPMKTLLVRVMTPDLRERLENLRKKPENIPQPISNTSRANLNKLLTDYTEMKKAILHVYWEEFQKDPVGLMSRVAQPASKKIDQNKLKPEMDEKGNLTTAGFACSQCGQPLFVYKLEQVSEKGKAYTNYFGRCNVAEHEKLIKLAQLKPEKDSDEAVTYSLGKFGQRALDFYSIHVTKESTHPVKPLAQIAGNRYASGPVGKALSDACMGTIASFLSKYQDIIIEHQKVVKGNQKRLESLRELAGKENLEYPSVTLPPQPHTKEGVDAYNEVIARVRMWVNLNLWQKLKLSRDDAKPLLRLKGFPSFPLVERQANEVDWWDMVCNVKKLINEKKEDGKVFWQNLAGYKRQEALRPYLSSEEDRKKGKKFARYQLGDLLLHLEKKHGEDWGKVYDEAWERIDKKVEGLSKHIKLEEERRSEDAQSKAALTDWLRAKASFVIEGLKEADKDEFCRCELKLQKWYGDLRGKPFAIEAENSILDISGFSKQYNCAFIWQKDGVKKLNLYLIINYFKGGKLRFKKIKPEAFEANRFYTVINKKSGEIVPMEVNFNFDDPNLIILPLAFGKRQGREFIWNDLLSLETGSLKLANGRVIEKTLYNRRTRQDEPALFVALTFERREVLDSSNIKTPMNLIGVDRGENIPAVIALTDPEGCPLSRFKDSLGNPTHILRIGESYKEKQRTIQAKKEVEQRRAGGYSRKYASKAKNLADDMVRNTARDLLYYAVTQDAMLIFENLSRGFGRQGKRTFMAERQYTRMEDWLTAKLAYEGLPSKTYLSKTLAQYTSKTCSNCGFTITSADYDRVLEKLKKTATGWMTTINGKELKVEGQITYYNRYKRQNVVKDLSVELDRLSEESVNNDISSWTKGRSGEALSLLKKRFSHRPVQEKFVCLNCGFETHADEQAALNIARSWLFLRSQEYKKYQTNKTTGNTDKRAFVETWQSFYRKKLKEVWKPAV

SEQ ID NO: 33002 - protein, 978 aa, synthetic construct
  REGION 1..978: note = engineered CasX variant
QEIKRISKIRRRLVKDSNTKKAGKTGPMKTLLVRVMTPDLRERLENLRKKPENIPQPISNTSRANLNKLLTDYTEMKKAILHVYWEEFQKDPVGLMSRVAQPASKKIDQNKLKPEMDEKGNLTTAGFACSQCGQPLFVYKLEQVSEKGKAYTNYFGRCNVAEHEKLILLAQLKPEKDSDEAVTYSLGKFGQRALDFYSIHVTKESTHPVKPLAQIAGNRYASPVGKALSDACMGTIASFLSKYQDIIIEHQKVVKGNQKRLESLRELAGKENLEYPSVTLPPQPHTKEGVDAYNEVIARVRMWVNLNLWQKLKLSRDDAKPLLRLKGFPSFPLVERQANEVDWWDMVCNVKKLINEKKEDGKVFWQNLAGYKRQEALRPYLSSEEDRKKGKKFARYQLGDLLLHLEKKHGEDWGKVYDEAWERIDKKVEGLSKHIKLEEERRSEDAQSKAALTDWLRAKASFVIEGLKEADKDEFCRCELKLQKWYGDLRGKPFAIEAENSILDISGFSKQYNCAFIWQKDGVKKLNLYLIINYFKGGKLRFKKIKPEAFEANRFYTVINKKSGEIVPMEVNFNFDDPNLIILPLAFGKRQGREFIWNDLLSLETGSLKLANGRVIEKTLYNRRTRQDEPALFVALTFERREVLDSSNIKTPMNLIGVDRGENIPAVIALTDPEGCPLSRFKDSLGNPTHILRIGESYKEKQRTIQAKKEVEQRRAGGYSRKYASKAKNLADDMVRNTARDLLYYAVTQDAMLIFENLSRGFGRQGKRTFMAERQYTRMEDWLTAKLAYEGLPSKTYLSKTLAQYTSKTCSNCGFTITSADYDRVLEKLKKTATGWMTTINGKELKVEGQITYYNRYKRQNVVKDLSVELDRLSEESVNNDISSWTKGRSGEALSLLKKRFSHRPVQEKFVCLNCGFETHADEQAALNIARSWLFLRSQEYKKYQTNKTTGNTDKRAFVETWQSFYRKKLKEVWKPAV

SEQ ID NO: 33003 - protein, 979 aa, synthetic construct
  REGION 1..979: note = engineered CasX variant
QEIKRISKIRRRLVKDSNTKKAGKTGPMKTLLVRVMTPDLRERLENLRKKPENIPQPISNTSRANLNKLLTDYTEMKKAILHVYWEEFQKDPVGLMSRVAQPASKKIDQNKLKPEMDEKGNLTTAGFACSQCGQPLFVYKLEQVSEKGKAYTNYFGRCNVAEHEKLILLAQLKPEKDSDEAVTYSLGKFGQRALDFYSIHVTKESTHPVKPLAQIAGNRYASYPVGKALSDACMGTIASFLSKYQDIIIEHQKVVKGNQKRLESLRELAGKENLEYPSVTLPPQPHTKEGVDAYNEVIARVRMWVNLNLWQKLKLSRDDAKPLLRLKGFPSFPLVERQANEVDWWDMVCNVKKLINEKKEDGKVFWQNLAGYKRQEALRPYLSSEEDRKKGKKFARYQLGDLLLHLEKKHGEDWGKVYDEAWERIDKKVEGLSKHIKLEEERRSEDAQSKAALTDWLRAKASFVIEGLKEADKDEFCRCELKLQKWYGDLRGKPFAIEAENSILDISGFSKQYNCAFIWQKDGVKKLNLYLIINYFKGGKLRFKKIKPEAFEANRFYTVINKKSGEIVPMEVNFNFDDPNLIILPLAFGKRQGREFIWNDLLSLETGSLKLANGRVIEKTLYNRRTRQDEPALFVALTFERREVLDSSNIKPMSNLIGVDRGENIPAVIALTDPEGCPLSRFKDSLGNPTHILRIGESYKEKQRTIQAKKEVEQRRAGGYSRKYASKAKNLADDMVRNTARDLLYYAVTQDAMLIFENLSRGFGRQGKRTFMAERQYTRMEDWLTAKLAYEGLPSKTYLSKTLAQYTSKTCSNCGFTITSADYDRVLEKLKKTATGWMTTINGKELKVEGQITYYNRYKRQNVVKDLSVELDRLSEESVNNDISSWTKGRSGEALSLLKKRFSHRPVQEKFVCLNCGFETHADEQAALNIARSWLFLRSQEYKKYQTNKTTGNTDKRAFVETWQSFYRKKLKEVWKPAV

SEQ ID NO: 33004 - protein, 979 aa, synthetic construct
  REGION 1..979: note = engineered CasX variant
QEIKRISKIRRRLVKDSNTKKAGKTGPMKTLLVRVMTPDLRERLENLRKKPENIPQPISNTSRANLNKLLTDYTEMKKAILHVYWEEFQKDPVGLMSRVAQPASKKIDQNKLKPEMDEKGNLTTAGFACSQCGQPLFVYKLEQVSEKGKAYTNYFGRCNVAEHEKLILLAQLKPEKDSDEAVTYSLGKFGQRALDFYSIHVTKESTHPVKPLAQIAGNRYASHPVGKALSDACMGTIASFLSKYQDIIIEHQKVVKGNQKRLESLRELAGKENLEYPSVTLPPQPHTKEGVDAYNEVIARVRMWVNLNLWQKLKLSRDDAKPLLRLKGFPSFPLVERQANEVDWWDMVCNVKKLINEKKEDGKVFWQNLAGYKRQEALRPYLSSEEDRKKGKKFARYQLGDLLLHLEKKHGEDWGKVYDEAWERIDKKVEGLSKHIKLEEERRSEDAQSKAALTDWLRAKASFVIEGLKEADKDEFCRCELKLQKWYGDLRGKPFAIEAENSILDISGFSKQYNCAFIWQKDGVKKLNLYLIINYFKGGKLRFKKIKPEAFEANRFYTVINKKSGEIVPMEVNFNFDDPNLIILPLAFGKRQGREFIWNDLLSLETGSLKLANGRVIEKTLYNRRTRQDEPALFVALTFERREVLDSSNIKPMSNLIGVDRGENIPAVIALTDPEGCPLSRFKDSLGNPTHILRIGESYKEKQRTIQAKKEVEQRRAGGYSRKYASKAKNLADDMVRNTARDLLYYAVTQDAMLIFENLSRGFGRQGKRTFMAERQYTRMEDWLTAKLAYEGLPSKTYLSKTLAQYTSKTCSNCGFTITSADYDRVLEKLKKTATGWMTTINGKELKVEGQITYYNRYKRQNVVKDLSVELDRLSEESVNNDISSWTKGRSGEALSLLKKRFSHRPVQEKFVCLNCGFETHADEQAALNIARSWLFLRSQEYKKYQTNKTTGNTDKRAFVETWQSFYRKKLKEVWKPAV

SEQ ID NO: 33005 - protein, 979 aa, synthetic construct
  REGION 1..979: note = engineered CasX variant
QEIKRISKIRRRLVKDSNTKKAGKTGPMKTLLVRVMTPDLRERLENLRKKPENIPQPISNTSRANLNKLLTDYTEMKKAILHVYWEEFQKDPVGLMSRVAQPASKKIDQNKLKPEMDEKGNLTTAGFACSQCGQPLFVYKLEQVSEKGKAYTNYFGRCNVAEHEKLILLAQLKPEKDSDEAVTYSLGKFGQRALDFYSIHVTKESTHPVKPLAQIAGNRYASSPVGKALSDACMGTIASFLSKYQDIIIEHQKVVKGNQKRLESLRELAGKENLEYPSVTLPPQPHTKEGVDAYNEVIARVRMWVNLNLWQKLKLSRDDAKPLLRLKGFPSFPLVERQANEVDWWDMVCNVKKLINEKKEDGKVFWQNLAGYKRQEALRPYLSSEEDRKKGKKFARYQLGDLLLHLEKKHGEDWGKVYDEAWERIDKKVEGLSKHIKLEEERRSEDAQSKAALTDWLRAKASFVIEGLKEADKDEFCRCELKLQKWYGDLRGKPFAIEAENSILDISGFSKQYNCAFIWQKDGVKKLNLYLIINYFKGGKLRFKKIKPEAFEANRFYTVINKKSGEIVPMEVNFNFDDPNLIILPLAFGKRQGREFIWNDLLSLETGSLKLANGRVIEKTLYNRRTRQDEPALFVALTFERREVLDSSNIKPMSNLIGVDRGENIPAVIALTDPEGCPLSRFKDSLGNPTHILRIGESYKEKQRTIQAKKEVEQRRAGGYSRKYASKAKNLADDMVRNTARDLLYYAVTQDAMLIFENLSRGFGRQGKRTFMAERQYTRMEDWLTAKLAYEGLPSKTYLSKTLAQYTSKTCSNCGFTITSADYDRVLEKLKKTATGWMTTINGKELKVEGQITYYNRYKRQNVVKDLSVELDRLSEESVNNDISSWTKGRSGEALSLLKKRFSHRPVQEKFVCLNCGFETHADEQAALNIARSWLFLRSQEYKKYQTNKTTGNTDKRAFVETWQSFYRKKLKEVWKPAV

SEQ ID NO: 33006 - protein, 979 aa, synthetic construct
  REGION 1..979: note = engineered CasX variant
QEIKRISKIRRRLVKDSNTKKAGKTGPMKTLLVRVMTPDLRERLENLRKKPENIPQPISNTSRANLNKLLTDYTEMKKAILHVYWEEFQKDPVGLMSRVAQPASKKIDQNKLKPEMDEKGNLTTAGFACSQCGQPLFVYKLEQVSEKGKAYTNYFGRCNVAEHEKLILLAQLKPEKDSDEAVTYSLGKFGQRALDFYSIHVTKESTHPVKPLAQIAGNRYASTPVGKALSDACMGTIASFLSKYQDIIIEHQKVVKGNQKRLESLRELAGKENLEYPSVTLPPQPHTKEGVDAYNEVIARVRMWVNLNLWQKLKLSRDDAKPLLRLKGFPSFPLVERQANEVDWWDMVCNVKKLINEKKEDGKVFWQNLAGYKRQEALRPYLSSEEDRKKGKKFARYQLGDLLLHLEKKHGEDWGKVYDEAWERIDKKVEGLSKHIKLEEERRSEDAQSKAALTDWLRAKASFVIEGLKEADKDEFCRCELKLQKWYGDLRGKPFAIEAENSILDISGFSKQYNCAFIWQKDGVKKLNLYLIINYFKGGKLRFKKIKPEAFEANRFYTVINKKSGEIVPMEVNFNFDDPNLIILPLAFGKRQGREFIWNDLLSLETGSLKLANGRVIEKTLYNRRTRQDEPALFVALTFERREVLDSSNIKPMSNLIGVDRGENIPAVIALTDPEGCPLSRFKDSLGNPTHILRIGESYKEKQRTIQAKKEVEQRRAGGYSRKYASKAKNLADDMVRNTARDLLYYAVTQDAMLIFENLSRGFGRQGKRTFMAERQYTRMEDWLTAKLAYEGLPSKTYLSKTLAQYTSKTCSNCGFTITSADYDRVLEKLKKTATGWMTTINGKELKVEGQITYYNRYKRQNVVKDLSVELDRLSEESVNNDISSWTKGRSGEALSLLKKRFSHRPVQEKFVCLNCGFETHADEQAALNIARSWLFLRSQEYKKYQTNKTTGNTDKRAFVETWQSFYRKKLKEVWKPAV

SEQ ID NO: 33007 - protein, 979 aa, synthetic construct
  REGION 1..979: note = engineered CasX variant
QEIKRISKIRRRLVKDSNTKKAGKTGPMKTLLVRVMTPDLRERLENLRKKPENIPQPISNTSRANLNKLLTDYTEMKKAILHVYWEEFQKDPVGLMSRVAQPASKKIDQNKLKPEMDEKGNLTTAGFACSQCGQPLFVYKLEQVSEKGKAYTNYFGRCNVAEHEKLILLAQLKPEKDSDEAVTYSLGKFGQRALDFYSIHVTKESTHPVKPLAQIAGNRYASAPVGKALSDACMGTIASFLSKYQDIIIEHQKVVKGNQKRLESLRELAGKENLEYPSVTLPPQPHTKEGVDAYNEVIARVRMWVNLNLWQKLKLSRDDAKPLLRLKGFPSFPLVERQANEVDWWDMVCNVKKLINEKKEDGKVFWQNLAGYKRQEALRPYLSSEEDRKKGKKFARYQLGDLLLHLEKKHGEDWGKVYDEAWERIDKKVEGLSKHIKLEEERRSEDAQSKAALTDWLRAKASFVIEGLKEADKDEFCRCELKLQKWYGDLRGKPFAIEAENSILDISGFSKQYNCAFIWQKDGVKKLNLYLIINYFKGGKLRFKKIKPEAFEANRFYTVINKKSGEIVPMEVNFNFDDPNLIILPLAFGKRQGREFIWNDLLSLETGSLKLANGRVIEKTLYNRRTRQDEPALFVALTFERREVLDSSNIKPMSNLIGVDRGENIPAVIALTDPEGCPLSRFKDSLGNPTHILRIGESYKEKQRTIQAKKEVEQRRAGGYSRKYASKAKNLADDMVRNTARDLLYYAVTQDAMLIFENLSRGFGRQGKRTFMAERQYTRMEDWLTAKLAYEGLPSKTYLSKTLAQYTSKTCSNCGFTITSADYDRVLEKLKKTATGWMTTINGKELKVEGQITYYNRYKRQNVVKDLSVELDRLSEESVNNDISSWTKGRSGEALSLLKKRFSHRPVQEKFVCLNCGFETHADEQAALNIARSWLFLRSQEYKKYQTNKTTGNTDKRAFVETWQSFYRKKLKEVWKPAV

SEQ ID NO: 33008 - protein, 979 aa, synthetic construct
  REGION 1..979: note = engineered CasX variant
QEIKRISKIRRRLVKDSNTKKAGKTGPMKTLLVRVMTPDLRERLENLRKKPENIPQPISNTSRANLNKLLTDYTEMKKAILHVYWEEFQKDPVGLMSRVAQPASKKIDQNKLKPEMDEKGNLTTAGFACSQCGQPLFVYKLEQVSEKGKAYTNYFGRCNVAEHEKLILLAQLKPEKDSDEAVTYSLGKFGQRALDFYSIHVTKESTHPVKPLAQIAGNRYASVPVGKALSDACMGTIASFLSKYQDIIIEHQKVVKGNQKRLESLRELAGKENLEYPSVTLPPQPHTKEGVDAYNEVIARVRMWVNLNLWQKLKLSRDDAKPLLRLKGFPSFPLVERQANEVDWWDMVCNVKKLINEKKEDGKVFWQNLAGYKRQEALRPYLSSEEDRKKGKKFARYQLGDLLLHLEKKHGEDWGKVYDEAWERIDKKVEGLSKHIKLEEERRSEDAQSKAALTDWLRAKASFVIEGLKEADKDEFCRCELKLQKWYGDLRGKPFAIEAENSILDISGFSKQYNCAFIWQKDGVKKLNLYLIINYFKGGKLRFKKIKPEAFEANRFYTVINKKSGEIVPMEVNFNFDDPNLIILPLAFGKRQGREFIWNDLLSLETGSLKLANGRVIEKTLYNRRTRQDEPALFVALTFERREVLDSSNIKPMSNLIGVDRGENIPAVIALTDPEGCPLSRFKDSLGNPTHILRIGESYKEKQRTIQAKKEVEQRRAGGYSRKYASKAKNLADDMVRNTARDLLYYAVTQDAMLIFENLSRGFGRQGKRTFMAERQYTRMEDWLTAKLAYEGLPSKTYLSKTLAQYTSKTCSNCGFTITSADYDRVLEKLKKTATGWMTTINGKELKVEGQITYYNRYKRQNVVKDLSVELDRLSEESVNNDISSWTKGRSGEALSLLKKRFSHRPVQEKFVCLNCGFETHADEQAALNIARSWLFLRSQEYKKYQTNKTTGNTDKRAFVETWQSFYRKKLKEVWKPAV

SEQ ID NO: 33009 - protein, 979 aa, synthetic construct
  REGION 1..979: note = engineered CasX variant
QEIKRISKIRRRLVKDSNTKKAGKTGPMKTLLVRVMTPDLRERLENLRKKPENIPQPISNTSRANLNKLLTDYTEMKKAILHVYWEEFQKDPVGLMSRVAQPASKKIDQNKLKPEMDEKGNLTTAGFACSQCGQPLFVYKLEQVSEKGKAYTNYFGRCNVAEHEKLIKLAQLKPEKDSDEAVTYSLGKFGQRALDFYSIHVTKESTHPVKPLAQIAGNRYASGPVGKALSDACMGTIASFLSKYQDIIIEHQKVVKGNQKRLESLRELAGKENLEYPSVTLPPQPHTKEGVDAYNEVIARVRMWVNLNLWQKLKLSRDDAKPLLRLKGFPSFPLVERQANEVDWWDMVCNVKKLINEKKEDGKVFWQNLAGYKRQEALRPYLSSEEDRKKGKKFARYQLGDLLLHLEKKHGEDWGKVYDEAWERIDKKVEGLSKHIKLEEERRSEDAQSKAALTDWLRAKASFVIEGLKEADKDEFCRCELKLQKWYGDLRGKPFAIEAENSILDISGFSKQYNCAFIWQKDGVKKLNLYLIINYFKGGKLRFKKIKPEAFEANRFYTVINKKSGEIVPMEVNFNFDDPNLIILPLAFGKRQGREFIWNDLLSLETGSLKLANGRVIEKTLYNRRTRQDEPALFVALTFERREVLDSSNIKPMSNLIGVDRGENIPAVIALTDPEGCPLSRFKDSLGNPTHILRIGESYKEKQRTIQAKKEVEQRRAGGYSRKYASKAKNLADDMVRNTARDLLYYAVTQDAMLIFENLSRGFGRQGKRTFMAERQYTRMEDWLTAKLAYEGLPSKTYLSKTLAQYTSKTCSNCGFTITSADYDRVLEKLKKTATGWMTTINGKELKVEGQITYYNRYKRQNVVKDLSVELDRLSEESVNNDISSWTKGRSGEALSLLKKRFSHRPVQEKFVCLNCGFETHADEQAALNIARSWLFLRSQEYKKYQTNKTTGNTDKRAFVETWQSFYRKKLKEVWKPAV

SEQ ID NO: 33010 - protein, 978 aa, synthetic construct
  REGION 1..978: note = engineered CasX variant
QEIKRISKIRRRLVKDSNTKKAGKTGPMKTLLVRVMTPDLRERLENLRKKPENIPQPISNTSRANLNKLLTDYTEMKKAILHVYWEEFQKDPVGLMSRVAQPASKKIDQNKLKPEMDEKGNLTTAGFACSQCGQPLFVYKLEQVSEKGKAYTNYFGRCNVAEHEKLILLAQLKPEKDSDEAVTYSLGKFGQRALDFYSIHVTKESTHPVKPLAQIAGNRYASPVGKALSDACMGTIASFLSKYQDIIIEHQKVVKGNQKRLESLRELAGKENLEYPSVTLPPQPHTKEGVDAYNEVIARVRMWVNLNLWQKLKLSRDDAKPLLRLKGFPSFPLVERQANEVDWWDMVCNVKKLINEKKEDGKVFWQNLAGYKRQEALRPYLSSEEDRKKGKKFARYQLGDLLLHLEKKHGEDWGKVYDEAWERIDKKVEGLSKHIKLEEERRSEDAQSKAALTDWLRAKASFVIEGLKEADKDEFCRCELKLQKWYGDLRGKPFAIEAENSILDISGFSKQYNCAFIWQKDGVKKLNLYLIINYFKGGKLRFKKIKPEAFEANRFYTVINKKSGEIVPMEVNFNFDDPNLIILPLAFGKRQGREFIWNDLLSLETGSLKLANGRVIEKTLYNRRTRQDEPALFVALTFERREVLDSSNIKPMSNLIGVDRGENIPAVIALTDPEGCPLSRFKDSLGNPTHILRIGESYKEKQRTIQAKKEVEQRRAGGYSRKYASKAKNLADDMVRNTARDLLYYAVTQDAMLIFENLSRGFGRQGKRTFMAERQYTRMEDWLTAKLAYEGLPSKTYLSKTLAQYTSKTCSNCGFTITSADYDRVLEKLKKTATGWMTTINGKELKVEGQITYYNRYKRQNVVKDLSVELDRLSEESVNNDISSWTKGRSGEALSLLKKRFSHRPVQEKFVCLNCGFETHADEQAALNIARSWLFLRSQEYKKYQTNKTTGNTDKRAFVETWQSFYRKKLKEVWKPAV

SEQ ID NO: 33011 - protein, 978 aa, synthetic construct
  REGION 1..978: note = engineered CasX variant
QEIKRISKIRRRLVKDSNTKKAGKTGPMKTLLVRVMTPDLRERLENLRKKPENIPQPISNTSRANLNKLLTDYTEMKKAILHVYWEEFQKDPVGLMSRVAQPASKKIDQNKLKPEMDEKGNLTTAGFACSQCGQPLFVYKLEQVSEKGKAYTNYFGRCNVAEHEKLILLAQLKPEKDSDEAVTYSLGKFGQRALDFYSIHVTKESTHPVKPLAQIAGNRYASYPVGKALSDACMGTIASFLSKYQDIIIEHQKVVKGNQKRLESLRELAGKENLEYPSVTLPPQPHTKEGVDAYNEVIARVRMWVNLNLWQKLKLSRDDAKPLLRLKGFPSFPLVERQANEVDWWDMVCNVKKLINEKKEDGKVFWQNLAGYKRQEALRPYLSSEEDRKKGKKFARYQLGDLLLHLEKKHGEDWGKVYDEAWERIDKKVEGLSKHIKLEEERRSEDAQSKAALTDWLRAKASFVIEGLKEADKDEFCRCELKLQKWYGDLRGKPFAIEAENSILDISGFSKQYNCAFIWQKDGVKKLNLYLIINYFKGGKLRFKKIKPEAFEANRFYTVINKKSGEIVPMEVNFNFDDPNLIILPLAFGKRQGREFIWNDLLSLETGSLKLANGRVIEKTLYNRRTRQDEPALFVALTFERREVLDSSNIKPMNLIGVDRGENIPAVIALTDPEGCPLSRFKDSLGNPTHILRIRESYKEKQRTIQAKKEVEQRRAGGYSRKYASKAKNLADDMVRNTARDLLYYAVTQDAMLIFENLSRGFGRQGKRTFMAERQYTRMEDWLTAKLAYEGLPSKTYLSKTLAQYTSKTCSNCGFTITSADYDRVLEKLKKTATGWMTTINGKELKVEGQITYYNRYKRQNVVKDLSVELDRLSEESVNNDISSWTKGRSGEALSLLKKRFSHRPVQEKFVCLNCGFETHADEQAALNIARSWLFLRSQEYKKYQTNKTTGNTDKRAFVETWQSFYRKKLKEVWKPAV

SEQ ID NO: 33012 - protein, 978 aa, synthetic construct
  REGION 1..978: note = engineered CasX variant
QEIKRISKIRRRLVKDSNTKKAGKTGPMKTLLVRVMTPDLRERLENLRKKPENIPQPISNTSRANLNKLLTDYTEMKKAILHVYWEEFQKDPVGLMSRVAQPASKKIDQNKLKPEMDEKGNLTTAGFACSQCGQPLFVYKLEQVSEKGKAYTNYFGRCNVAEHEKLILLAQLKPEKDSDEAVTYSLGKFGQRALDFYSIHVTKESTHPVKPLAQIAGNRYASHPVGKALSDACMGTIASFLSKYQDIIIEHQKVVKGNQKRLESLRELAGKENLEYPSVTLPPQPHTKEGVDAYNEVIARVRMWVNLNLWQKLKLSRDDAKPLLRLKGFPSFPLVERQANEVDWWDMVCNVKKLINEKKEDGKVFWQNLAGYKRQEALRPYLSSEEDRKKGKKFARYQLGDLLLHLEKKHGEDWGKVYDEAWERIDKKVEGLSKHIKLEEERRSEDAQSKAALTDWLRAKASFVIEGLKEADKDEFCRCELKLQKWYGDLRGKPFAIEAENSILDISGFSKQYNCAFIWQKDGVKKLNLYLIINYFKGGKLRFKKIKPEAFEANRFYTVINKKSGEIVPMEVNFNFDDPNLIILPLAFGKRQGREFIWNDLLSLETGSLKLANGRVIEKTLYNRRTRQDEPALFVALTFERREVLDSSNIKPMNLIGVDRGENIPAVIALTDPEGCPLSRFKDSLGNPTHILRIRESYKEKQRTIQAKKEVEQRRAGGYSRKYASKAKNLADDMVRNTARDLLYYAVTQDAMLIFENLSRGFGRQGKRTFMAERQYTRMEDWLTAKLAYEGLPSKTYLSKTLAQYTSKTCSNCGFTITSADYDRVLEKLKKTATGWMTTINGKELKVEGQITYYNRYKRQNVVKDLSVELDRLSEESVNNDISSWTKGRSGEALSLLKKRFSHRPVQEKFVCLNCGFETHADEQAALNIARSWLFLRSQEYKKYQTNKTTGNTDKRAFVETWQSFYRKKLKEVWKPAV

SEQ ID NO: 33013 - protein, 978 aa, synthetic construct
  REGION 1..978: note = engineered CasX variant
QEIKRISKIRRRLVKDSNTKKAGKTGPMKTLLVRVMTPDLRERLENLRKKPENIPQPISNTSRANLNKLLTDYTEMKKAILHVYWEEFQKDPVGLMSRVAQPASKKIDQNKLKPEMDEKGNLTTAGFACSQCGQPLFVYKLEQVSEKGKAYTNYFGRCNVAEHEKLILLAQLKPEKDSDEAVTYSLGKFGQRALDFYSIHVTKESTHPVKPLAQIAGNRYASSPVGKALSDACMGTIASFLSKYQDIIIEHQKVVKGNQKRLESLRELAGKENLEYPSVTLPPQPHTKEGVDAYNEVIARVRMWVNLNLWQKLKLSRDDAKPLLRLKGFPSFPLVERQANEVDWWDMVCNVKKLINEKKEDGKVFWQNLAGYKRQEALRPYLSSEEDRKKGKKFARYQLGDLLLHLEKKHGEDWGKVYDEAWERIDKKVEGLSKHIKLEEERRSEDAQSKAALTDWLRAKASFVIEGLKEADKDEFCRCELKLQKWYGDLRGKPFAIEAENSILDISGFSKQYNCAFIWQKDGVKKLNLYLIINYFKGGKLRFKKIKPEAFEANRFYTVINKKSGEIVPMEVNFNFDDPNLIILPLAFGKRQGREFIWNDLLSLETGSLKLANGRVIEKTLYNRRTRQDEPALFVALTFERREVLDSSNIKPMNLIGVDRGENIPAVIALTDPEGCPLSRFKDSLGNPTHILRIRESYKEKQRTIQAKKEVEQRRAGGYSRKYASKAKNLADDMVRNTARDLLYYAVTQDAMLIFENLSRGFGRQGKRTFMAERQYTRMEDWLTAKLAYEGLPSKTYLSKTLAQYTSKTCSNCGFTITSADYDRVLEKLKKTATGWMTTINGKELKVEGQITYYNRYKRQNVVKDLSVELDRLSEESVNNDISSWTKGRSGEALSLLKKRFSHRPVQEKFVCLNCGFETHADEQAALNIARSWLFLRSQEYKKYQTNKTTGNTDKRAFVETWQSFYRKKLKEVWKPAV

SEQ ID NO: 33014 - protein, 978 aa, synthetic construct
  REGION 1..978: note = engineered CasX variant
QEIKRISKIRRRLVKDSNTKKAGKTGPMKTLLVRVMTPDLRERLENLRKKPENIPQPISNTSRANLNKLLTDYTEMKKAILHVYWEEFQKDPVGLMSRVAQPASKKIDQNKLKPEMDEKGNLTTAGFACSQCGQPLFVYKLEQVSEKGKAYTNYFGRCNVAEHEKLILLAQLKPEKDSDEAVTYSLGKFGQRALDFYSIHVTKESTHPVKPLAQIAGNRYASTPVGKALSDACMGTIASFLSKYQDIIIEHQKVVKGNQKRLESLRELAGKENLEYPSVTLPPQPHTKEGVDAYNEVIARVRMWVNLNLWQKLKLSRDDAKPLLRLKGFPSFPLVERQANEVDWWDMVCNVKKLINEKKEDGKVFWQNLAGYKRQEALRPYLSSEEDRKKGKKFARYQLGDLLLHLEKKHGEDWGKVYDEAWERIDKKVEGLSKHIKLEEERRSEDAQSKAALTDWLRAKASFVIEGLKEADKDEFCRCELKLQKWYGDLRGKPFAIEAENSILDISGFSKQYNCAFIWQKDGVKKLNLYLIINYFKGGKLRFKKIKPEAFEANRFYTVINKKSGEIVPMEVNFNFDDPNLIILPLAFGKRQGREFIWNDLLSLETGSLKLANGRVIEKTLYNRRTRQDEPALFVALTFERREVLDSSNIKPMNLIGVDRGENIPAVIALTDPEGCPLSRFKDSLGNPTHILRIRESYKEKQRTIQAKKEVEQRRAGGYSRKYASKAKNLADDMVRNTARDLLYYAVTQDAMLIFENLSRGFGRQGKRTFMAERQYTRMEDWLTAKLAYEGLPSKTYLSKTLAQYTSKTCSNCGFTITSADYDRVLEKLKKTATGWMTTINGKELKVEGQITYYNRYKRQNVVKDLSVELDRLSEESVNNDISSWTKGRSGEALSLLKKRFSHRPVQEKFVCLNCGFETHADEQAALNIARSWLFLRSQEYKKYQTNKTTGNTDKRAFVETWQSFYRKKLKEVWKPAV

SEQ ID NO: 33015 - protein, 978 aa, synthetic construct
  REGION 1..978: note = engineered CasX variant
QEIKRISKIRRRLVKDSNTKKAGKTGPMKTLLVRVMTPDLRERLENLRKKPENIPQPISNTSRANLNKLLTDYTEMKKAILHVYWEEFQKDPVGLMSRVAQPASKKIDQNKLKPEMDEKGNLTTAGFACSQCGQPLFVYKLEQVSEKGKAYTNYFGRCNVAEHEKLILLAQLKPEKDSDEAVTYSLGKFGQRALDFYSIHVTKESTHPVKPLAQIAGNRYASAPVGKALSDACMGTIASFLSKYQDIIIEHQKVVKGNQKRLESLRELAGKENLEYPSVTLPPQPHTKEGVDAYNEVIARVRMWVNLNLWQKLKLSRDDAKPLLRLKGFPSFPLVERQANEVDWWDMVCNVKKLINEKKEDGKVFWQNLAGYKRQEALRPYLSSEEDRKKGKKFARYQLGDLLLHLEKKHGEDWGKVYDEAWERIDKKVEGLSKHIKLEEERRSEDAQSKAALTDWLRAKASFVIEGLKEADKDEFCRCELKLQKWYGDLRGKPFAIEAENSILDISGFSKQYNCAFIWQKDGVKKLNLYLIINYFKGGKLRFKKIKPEAFEANRFYTVINKKSGEIVPMEVNFNFDDPNLIILPLAFGKRQGREFIWNDLLSLETGSLKLANGRVIEKTLYNRRTRQDEPALFVALTFERREVLDSSNIKPMNLIGVDRGENIPAVIALTDPEGCPLSRFKDSLGNPTHILRIRESYKEKQRTIQAKKEVEQRRAGGYSRKYASKAKNLADDMVRNTARDLLYYAVTQDAMLIFENLSRGFGRQGKRTFMAERQYTRMEDWLTAKLAYEGLPSKTYLSKTLAQYTSKTCSNCGFTITSADYDRVLEKLKKTATGWMTTINGKELKVEGQITYYNRYKRQNVVKDLSVELDRLSEESVNNDISSWTKGRSGEALSLLKKRFSHRPVQEKFVCLNCGFETHADEQAALNIARSWLFLRSQEYKKYQTNKTTGNTDKRAFVETWQSFYRKKLKEVWKPAV

SEQ ID NO: 33016 - protein, 978 aa, synthetic construct
  REGION 1..978: note = engineered CasX variant
QEIKRISKIRRRLVKDSNTKKAGKTGPMKTLLVRVMTPDLRERLENLRKKPENIPQPISNTSRANLNKLLTDYTEMKKAILHVYWEEFQKDPVGLMSRVAQPASKKIDQNKLKPEMDEKGNLTTAGFACSQCGQPLFVYKLEQVSEKGKAYTNYFGRCNVAEHEKLILLAQLKPEKDSDEAVTYSLGKFGQRALDFYSIHVTKESTHPVKPLAQIAGNRYASVPVGKALSDACMGTIASFLSKYQDIIIEHQKVVKGNQKRLESLRELAGKENLEYPSVTLPPQPHTKEGVDAYNEVIARVRMWVNLNLWQKLKLSRDDAKPLLRLKGFPSFPLVERQANEVDWWDMVCNVKKLINEKKEDGKVFWQNLAGYKRQEALRPYLSSEEDRKKGKKFARYQLGDLLLHLEKKHGEDWGKVYDEAWERIDKKVEGLSKHIKLEEERRSEDAQSKAALTDWLRAKASFVIEGLKEADKDEFCRCELKLQKWYGDLRGKPFAIEAENSILDISGFSKQYNCAFIWQKDGVKKLNLYLIINYFKGGKLRFKKIKPEAFEANRFYTVINKKSGEIVPMEVNFNFDDPNLIILPLAFGKRQGREFIWNDLLSLETGSLKLANGRVIEKTLYNRRTRQDEPALFVALTFERREVLDSSNIKPMNLIGVDRGENIPAVIALTDPEGCPLSRFKDSLGNPTHILRIRESYKEKQRTIQAKKEVEQRRAGGYSRKYASKAKNLADDMVRNTARDLLYYAVTQDAMLIFENLSRGFGRQGKRTFMAERQYTRMEDWLTAKLAYEGLPSKTYLSKTLAQYTSKTCSNCGFTITSADYDRVLEKLKKTATGWMTTINGKELKVEGQITYYNRYKRQNVVKDLSVELDRLSEESVNNDISSWTKGRSGEALSLLKKRFSHRPVQEKFVCLNCGFETHADEQAALNIARSWLFLRSQEYKKYQTNKTTGNTDKRAFVETWQSFYRKKLKEVWKPAV

SEQ ID NO: 33017 - protein, 978 aa, synthetic construct
  REGION 1..978: note = engineered CasX variant
QEIKRISKIRRRLVKDSNTKKAGKTGPMKTLLVRVMTPDLRERLENLRKKPENIPQPISNTSRANLNKLLTDYTEMKKAILHVYWEEFQKDPVGLMSRVAQPASKKIDQNKLKPEMDEKGNLTTAGFACSQCGQPLFVYKLEQVSEKGKAYTNYFGRCNVAEHEKLIKLAQLKPEKDSDEAVTYSLGKFGQRALDFYSIHVTKESTHPVKPLAQIAGNRYASGPVGKALSDACMGTIASFLSKYQDIIIEHQKVVKGNQKRLESLRELAGKENLEYPSVTLPPQPHTKEGVDAYNEVIARVRMWVNLNLWQKLKLSRDDAKPLLRLKGFPSFPLVERQANEVDWWDMVCNVKKLINEKKEDGKVFWQNLAGYKRQEALRPYLSSEEDRKKGKKFARYQLGDLLLHLEKKHGEDWGKVYDEAWERIDKKVEGLSKHIKLEEERRSEDAQSKAALTDWLRAKASFVIEGLKEADKDEFCRCELKLQKWYGDLRGKPFAIEAENSILDISGFSKQYNCAFIWQKDGVKKLNLYLIINYFKGGKLRFKKIKPEAFEANRFYTVINKKSGEIVPMEVNFNFDDPNLIILPLAFGKRQGREFIWNDLLSLETGSLKLANGRVIEKTLYNRRTRQDEPALFVALTFERREVLDSSNIKPMNLIGVDRGENIPAVIALTDPEGCPLSRFKDSLGNPTHILRIRESYKEKQRTIQAKKEVEQRRAGGYSRKYASKAKNLADDMVRNTARDLLYYAVTQDAMLIFENLSRGFGRQGKRTFMAERQYTRMEDWLTAKLAYEGLPSKTYLSKTLAQYTSKTCSNCGFTITSADYDRVLEKLKKTATGWMTTINGKELKVEGQITYYNRYKRQNVVKDLSVELDRLSEESVNNDISSWTKGRSGEALSLLKKRFSHRPVQEKFVCLNCGFETHADEQAALNIARSWLFLRSQEYKKYQTNKTTGNTDKRAFVETWQSFYRKKLKEVWKPAV

SEQ ID NO: 33018 - protein, 977 aa, synthetic construct
  REGION 1..977: note = engineered CasX variant
QEIKRISKIRRRLVKDSNTKKAGKTGPMKTLLVRVMTPDLRERLENLRKKPENIPQPISNTSRANLNKLLTDYTEMKKAILHVYWEEFQKDPVGLMSRVAQPASKKIDQNKLKPEMDEKGNLTTAGFACSQCGQPLFVYKLEQVSEKGKAYTNYFGRCNVAEHEKLILLAQLKPEKDSDEAVTYSLGKFGQRALDFYSIHVTKESTHPVKPLAQIAGNRYASPVGKALSDACMGTIASFLSKYQDIIIEHQKVVKGNQKRLESLRELAGKENLEYPSVTLPPQPHTKEGVDAYNEVIARVRMWVNLNLWQKLKLSRDDAKPLLRLKGFPSFPLVERQANEVDWWDMVCNVKKLINEKKEDGKVFWQNLAGYKRQEALRPYLSSEEDRKKGKKFARYQLGDLLLHLEKKHGEDWGKVYDEAWERIDKKVEGLSKHIKLEEERRSEDAQSKAALTDWLRAKASFVIEGLKEADKDEFCRCELKLQKWYGDLRGKPFAIEAENSILDISGFSKQYNCAFIWQKDGVKKLNLYLIINYFKGGKLRFKKIKPEAFEANRFYTVINKKSGEIVPMEVNFNFDDPNLIILPLAFGKRQGREFIWNDLLSLETGSLKLANGRVIEKTLYNRRTRQDEPALFVALTFERREVLDSSNIKPMNLIGVDRGENIPAVIALTDPEGCPLSRFKDSLGNPTHILRIRESYKEKQRTIQAKKEVEQRRAGGYSRKYASKAKNLADDMVRNTARDLLYYAVTQDAMLIFENLSRGFGRQGKRTFMAERQYTRMEDWLTAKLAYEGLPSKTYLSKTLAQYTSKTCSNCGFTITSADYDRVLEKLKKTATGWMTTINGKELKVEGQITYYNRYKRQNVVKDLSVELDRLSEESVNNDISSWTKGRSGEALSLLKKRFSHRPVQEKFVCLNCGFETHADEQAALNIARSWLFLRSQEYKKYQTNKTTGNTDKRAFVETWQSFYRKKLKEVWKPAV

SEQ ID NO: 33019 - protein, 978 aa, synthetic construct
  REGION 1..978: note = engineered CasX variant
QEIKRISKIRRRLVKDSNTKKAGKTGPMKTLLVRVMTPDLRERLENLRKKPENIPQPISNTSRANLNKLLTDYTEMKKAILHVYWEEFQKDPVGLMSRVAQPASKKIDQNKLKPEMDEKGNLTTAGFACSQCGQPLFVYKLEQVSEKGKAYTNYFGRCNVAEHEKLILLAQLKPEKDSDEAVTYSLGKFGQRALDFYSIHVTKESTHPVKPLAQIAGNRYASYPVGKALSDACMGTIASFLSKYQDIIIEHQKVVKGNQKRLESLRELAGKENLEYPSVTLPPQPHTKEGVDAYNEVIARVRMWVNLNLWQKLKLSRDDAKPLLRLKGFPSFPLVERQANEVDWWDMVCNVKKLINEKKEDGKVFWQNLAGYKRQEALRPYLSSEEDRKKGKKFARYQLGDLLLHLEKKHGEDWGKVYDEAWERIDKKVEGLSKHIKLEEERRSEDAQSKAALTDWLRAKASFVIEGLKEADKDEFCRCELKLQKWYGDLRGKPFAIEAENSILDISGFSKQYNCAFIWQKDGVKKLNLYLIINYFKGGKLRFKKIKPEAFEANRFYTVINKKSGEIVPMEVNFNFDDPNLIILPLAFGKRQGREFIWNDLLSLETGSLKLANGRVIEKTLYNRRTRQDEPALFVALTFERREVLDSSNIKPMNLIGVDRGENIPAVIALTDPEGCPLSRFKDSLGNPTHILRIGESYKEKQRTIQAKKEVEQRRAGGYSRKYASKAKNLADDMVRNTARDLLYYAVTQDAMLIFENLSRGFGRQGKRTFSAERQYTRMEDWLTAKLAYEGLPSKTYLSKTLAQYTSKTCSNCGFTITSADYDRVLEKLKKTATGWMTTINGKELKVEGQITYYNRYKRQNVVKDLSVELDRLSEESVNNDISSWTKGRSGEALSLLKKRFSHRPVQEKFVCLNCGFETHADEQAALNIARSWLFLRSQEYKKYQTNKTTGNTDKRAFVETWQSFYRKKLKEVWKPAV

SEQ ID NO: 33020 - protein, 978 aa, synthetic construct
  REGION 1..978: note = engineered CasX variant
QEIKRISKIRRRLVKDSNTKKAGKTGPMKTLLVRVMTPDLRERLENLRKKPENIPQPISNTSRANLNKLLTDYTEMKKAILHVYWEEFQKDPVGLMSRVAQPASKKIDQNKLKPEMDEKGNLTTAGFACSQCGQPLFVYKLEQVSEKGKAYTNYFGRCNVAEHEKLILLAQLKPEKDSDEAVTYSLGKFGQRALDFYSIHVTKESTHPVKPLAQIAGNRYASHPVGKALSDACMGTIASFLSKYQDIIIEHQKVVKGNQKRLESLRELAGKENLEYPSVTLPPQPHTKEGVDAYNEVIARVRMWVNLNLWQKLKLSRDDAKPLLRLKGFPSFPLVERQANEVDWWDMVCNVKKLINEKKEDGKVFWQNLAGYKRQEALRPYLSSEEDRKKGKKFARYQLGDLLLHLEKKHGEDWGKVYDEAWERIDKKVEGLSKHIKLEEERRSEDAQSKAALTDWLRAKASFVIEGLKEADKDEFCRCELKLQKWYGDLRGKPFAIEAENSILDISGFSKQYNCAFIWQKDGVKKLNLYLIINYFKGGKLRFKKIKPEAFEANRFYTVINKKSGEIVPMEVNFNFDDPNLIILPLAFGKRQGREFIWNDLLSLETGSLKLANGRVIEKTLYNRRTRQDEPALFVALTFERREVLDSSNIKPMNLIGVDRGENIPAVIALTDPEGCPLSRFKDSLGNPTHILRIGESYKEKQRTIQAKKEVEQRRAGGYSRKYASKAKNLADDMVRNTARDLLYYAVTQDAMLIFENLSRGFGRQGKRTFSAERQYTRMEDWLTAKLAYEGLPSKTYLSKTLAQYTSKTCSNCGFTITSADYDRVLEKLKKTATGWMTTINGKELKVEGQITYYNRYKRQNVVKDLSVELDRLSEESVNNDISSWTKGRSGEALSLLKKRFSHRPVQEKFVCLNCGFETHADEQAALNIARSWLFLRSQEYKKYQTNKTTGNTDKRAFVETWQSFYRKKLKEVWKPAV

SEQ ID NO: 33021 - protein, 978 aa, synthetic construct
  REGION 1..978: note = engineered CasX variant
QEIKRISKIRRRLVKDSNTKKAGKTGPMKTLLVRVMTPDLRERLENLRKKPENIPQPISNTSRANLNKLLTDYTEMKKAILHVYWEEFQKDPVGLMSRVAQPASKKIDQNKLKPEMDEKGNLTTAGFACSQCGQPLFVYKLEQVSEKGKAYTNYFGRCNVAEHEKLILLAQLKPEKDSDEAVTYSLGKFGQRALDFYSIHVTKESTHPVKPLAQIAGNRYASSPVGKALSDACMGTIASFLSKYQDIIIEHQKVVKGNQKRLESLRELAGKENLEYPSVTLPPQPHTKEGVDAYNEVIARVRMWVNLNLWQKLKLSRDDAKPLLRLKGFPSFPLVERQANEVDWWDMVCNVKKLINEKKEDGKVFWQNLAGYKRQEALRPYLSSEEDRKKGKKFARYQLGDLLLHLEKKHGEDWGKVYDEAWERIDKKVEGLSKHIKLEEERRSEDAQSKAALTDWLRAKASFVIEGLKEADKDEFCRCELKLQKWYGDLRGKPFAIEAENSILDISGFSKQYNCAFIWQKDGVKKLNLYLIINYFKGGKLRFKKIKPEAFEANRFYTVINKKSGEIVPMEVNFNFDDPNLIILPLAFGKRQGREFIWNDLLSLETGSLKLANGRVIEKTLYNRRTRQDEPALFVALTFERREVLDSSNIKPMNLIGVDRGENIPAVIALTDPEGCPLSRFKDSLGNPTHILRIGESYKEKQRTIQAKKEVEQRRAGGYSRKYASKAKNLADDMVRNTARDLLYYAVTQDAMLIFENLSRGFGRQGKRTFSAERQYTRMEDWLTAKLAYEGLPSKTYLSKTLAQYTSKTCSNCGFTITSADYDRVLEKLKKTATGWMTTINGKELKVEGQITYYNRYKRQNVVKDLSVELDRLSEESVNNDISSWTKGRSGEALSLLKKRFSHRPVQEKFVCLNCGFETHADEQAALNIARSWLFLRSQEYKKYQTNKTTGNTDKRAFVETWQSFYRKKLKEVWKPAV

SEQ ID NO: 33022 - protein, 978 aa, synthetic construct
  REGION 1..978: note = engineered CasX variant
QEIKRISKIRRRLVKDSNTKKAGKTGPMKTLLVRVMTPDLRERLENLRKKPENIPQPISNTSRANLNKLLTDYTEMKKAILHVYWEEFQKDPVGLMSRVAQPASKKIDQNKLKPEMDEKGNLTTAGFACSQCGQPLFVYKLEQVSEKGKAYTNYFGRCNVAEHEKLILLAQLKPEKDSDEAVTYSLGKFGQRALDFYSIHVTKESTHPVKPLAQIAGNRYASTPVGKALSDACMGTIASFLSKYQDIIIEHQKVVKGNQKRLESLRELAGKENLEYPSVTLPPQPHTKEGVDAYNEVIARVRMWVNLNLWQKLKLSRDDAKPLLRLKGFPSFPLVERQANEVDWWDMVCNVKKLINEKKEDGKVFWQNLAGYKRQEALRPYLSSEEDRKKGKKFARYQLGDLLLHLEKKHGEDWGKVYDEAWERIDKKVEGLSKHIKLEEERRSEDAQSKAALTDWLRAKASFVIEGLKEADKDEFCRCELKLQKWYGDLRGKPFAIEAENSILDISGFSKQYNCAFIWQKDGVKKLNLYLIINYFKGGKLRFKKIKPEAFEANRFYTVINKKSGEIVPMEVNFNFDDPNLIILPLAFGKRQGREFIWNDLLSLETGSLKLANGRVIEKTLYNRRTRQDEPALFVALTFERREVLDSSNIKPMNLIGVDRGENIPAVIALTDPEGCPLSRFKDSLGNPTHILRIGESYKEKQRTIQAKKEVEQRRAGGYSRKYASKAKNLADDMVRNTARDLLYYAVTQDAMLIFENLSRGFGRQGKRTFSAERQYTRMEDWLTAKLAYEGLPSKTYLSKTLAQYTSKTCSNCGFTITSADYDRVLEKLKKTATGWMTTINGKELKVEGQITYYNRYKRQNVVKDLSVELDRLSEESVNNDISSWTKGRSGEALSLLKKRFSHRPVQEKFVCLNCGFETHADEQAALNIARSWLFLRSQEYKKYQTNKTTGNTDKRAFVETWQSFYRKKLKEVWKPAV

SEQ ID NO: 33023 - protein, 978 aa, synthetic construct
  REGION 1..978: note = engineered CasX variant
QEIKRISKIRRRLVKDSNTKKAGKTGPMKTLLVRVMTPDLRERLENLRKKPENIPQPISNTSRANLNKLLTDYTEMKKAILHVYWEEFQKDPVGLMSRVAQPASKKIDQNKLKPEMDEKGNLTTAGFACSQCGQPLFVYKLEQVSEKGKAYTNYFGRCNVAEHEKLILLAQLKPEKDSDEAVTYSLGKFGQRALDFYSIHVTKESTHPVKPLAQIAGNRYASAPVGKALSDACMGTIASFLSKYQDIIIEHQKVVKGNQKRLESLRELAGKENLEYPSVTLPPQPHTKEGVDAYNEVIARVRMWVNLNLWQKLKLSRDDAKPLLRLKGFPSFPLVERQANEVDWWDMVCNVKKLINEKKEDGKVFWQNLAGYKRQEALRPYLSSEEDRKKGKKFARYQLGDLLLHLEKKHGEDWGKVYDEAWERIDKKVEGLSKHIKLEEERRSEDAQSKAALTDWLRAKASFVIEGLKEADKDEFCRCELKLQKWYGDLRGKPFAIEAENSILDISGFSKQYNCAFIWQKDGVKKLNLYLIINYFKGGKLRFKKIKPEAFEANRFYTVINKKSGEIVPMEVNFNFDDPNLIILPLAFGKRQGREFIWNDLLSLETGSLKLANGRVIEKTLYNRRTRQDEPALFVALTFERREVLDSSNIKPMNLIGVDRGENIPAVIALTDPEGCPLSRFKDSLGNPTHILRIGESYKEKQRTIQAKKEVEQRRAGGYSRKYASKAKNLADDMVRNTARDLLYYAVTQDAMLIFENLSRGFGRQGKRTFSAERQYTRMEDWLTAKLAYEGLPSKTYLSKTLAQYTSKTCSNCGFTITSADYDRVLEKLKKTATGWMTTINGKELKVEGQITYYNRYKRQNVVKDLSVELDRLSEESVNNDISSWTKGRSGEALSLLKKRFSHRPVQEKFVCLNCGFETHADEQAALNIARSWLFLRSQEYKKYQTNKTTGNTDKRAFVETWQSFYRKKLKEVWKPAV

SEQ ID NO: 33024 - protein, 978 aa, synthetic construct
  REGION 1..978: note = engineered CasX variant
QEIKRISKIRRRLVKDSNTKKAGKTGPMKTLLVRVMTPDLRERLENLRKKPENIPQPISNTSRANLNKLLTDYTEMKKAILHVYWEEFQKDPVGLMSRVAQPASKKIDQNKLKPEMDEKGNLTTAGFACSQCGQPLFVYKLEQVSEKGKAYTNYFGRCNVAEHEKLILLAQLKPEKDSDEAVTYSLGKFGQRALDFYSIHVTKESTHPVKPLAQIAGNRYASVPVGKALSDACMGTIASFLSKYQDIIIEHQKVVKGNQKRLESLRELAGKENLEYPSVTLPPQPHTKEGVDAYNEVIARVRMWVNLNLWQKLKLSRDDAKPLLRLKGFPSFPLVERQANEVDWWDMVCNVKKLINEKKEDGKVFWQNLAGYKRQEALRPYLSSEEDRKKGKKFARYQLGDLLLHLEKKHGEDWGKVYDEAWERIDKKVEGLSKHIKLEEERRSEDAQSKAALTDWLRAKASFVIEGLKEADKDEFCRCELKLQKWYGDLRGKPFAIEAENSILDISGFSKQYNCAFIWQKDGVKKLNLYLIINYFKGGKLRFKKIKPEAFEANRFYTVINKKSGEIVPMEVNFNFDDPNLIILPLAFGKRQGREFIWNDLLSLETGSLKLANGRVIEKTLYNRRTRQDEPALFVALTFERREVLDSSNIKPMNLIGVDRGENIPAVIALTDPEGCPLSRFKDSLGNPTHILRIGESYKEKQRTIQAKKEVEQRRAGGYSRKYASKAKNLADDMVRNTARDLLYYAVTQDAMLIFENLSRGFGRQGKRTFSAERQYTRMEDWLTAKLAYEGLPSKTYLSKTLAQYTSKTCSNCGFTITSADYDRVLEKLKKTATGWMTTINGKELKVEGQITYYNRYKRQNVVKDLSVELDRLSEESVNNDISSWTKGRSGEALSLLKKRFSHRPVQEKFVCLNCGFETHADEQAALNIARSWLFLRSQEYKKYQTNKTTGNTDKRAFVETWQSFYRKKLKEVWKPAV

SEQ ID NO: 33025 - protein, 978 aa, synthetic construct
  REGION 1..978: note = engineered CasX variant
QEIKRISKIRRRLVKDSNTKKAGKTGPMKTLLVRVMTPDLRERLENLRKKPENIPQPISNTSRANLNKLLTDYTEMKKAILHVYWEEFQKDPVGLMSRVAQPASKKIDQNKLKPEMDEKGNLTTAGFACSQCGQPLFVYKLEQVSEKGKAYTNYFGRCNVAEHEKLIKLAQLKPEKDSDEAVTYSLGKFGQRALDFYSIHVTKESTHPVKPLAQIAGNRYASGPVGKALSDACMGTIASFLSKYQDIIIEHQKVVKGNQKRLESLRELAGKENLEYPSVTLPPQPHTKEGVDAYNEVIARVRMWVNLNLWQKLKLSRDDAKPLLRLKGFPSFPLVERQANEVDWWDMVCNVKKLINEKKEDGKVFWQNLAGYKRQEALRPYLSSEEDRKKGKKFARYQLGDLLLHLEKKHGEDWGKVYDEAWERIDKKVEGLSKHIKLEEERRSEDAQSKAALTDWLRAKASFVIEGLKEADKDEFCRCELKLQKWYGDLRGKPFAIEAENSILDISGFSKQYNCAFIWQKDGVKKLNLYLIINYFKGGKLRFKKIKPEAFEANRFYTVINKKSGEIVPMEVNFNFDDPNLIILPLAFGKRQGREFIWNDLLSLETGSLKLANGRVIEKTLYNRRTRQDEPALFVALTFERREVLDSSNIKPMNLIGVDRGENIPAVIALTDPEGCPLSRFKDSLGNPTHILRIGESYKEKQRTIQAKKEVEQRRAGGYSRKYASKAKNLADDMVRNTARDLLYYAVTQDAMLIFENLSRGFGRQGKRTFSAERQYTRMEDWLTAKLAYEGLPSKTYLSKTLAQYTSKTCSNCGFTITSADYDRVLEKLKKTATGWMTTINGKELKVEGQITYYNRYKRQNVVKDLSVELDRLSEESVNNDISSWTKGRSGEALSLLKKRFSHRPVQEKFVCLNCGFETHADEQAALNIARSWLFLRSQEYKKYQTNKTTGNTDKRAFVETWQSFYRKKLKEVWKPAV

SEQ ID NO: 33026 - protein, 977 aa, synthetic construct
  REGION 1..977: note = engineered CasX variant
QEIKRISKIRRRLVKDSNTKKAGKTGPMKTLLVRVMTPDLRERLENLRKKPENIPQPISNTSRANLNKLLTDYTEMKKAILHVYWEEFQKDPVGLMSRVAQPASKKIDQNKLKPEMDEKGNLTTAGFACSQCGQPLFVYKLEQVSEKGKAYTNYFGRCNVAEHEKLILLAQLKPEKDSDEAVTYSLGKFGQRALDFYSIHVTKESTHPVKPLAQIAGNRYASPVGKALSDACMGTIASFLSKYQDIIIEHQKVVKGNQKRLESLRELAGKENLEYPSVTLPPQPHTKEGVDAYNEVIARVRMWVNLNLWQKLKLSRDDAKPLLRLKGFPSFPLVERQANEVDWWDMVCNVKKLINEKKEDGKVFWQNLAGYKRQEALRPYLSSEEDRKKGKKFARYQLGDLLLHLEKKHGEDWGKVYDEAWERIDKKVEGLSKHIKLEEERRSEDAQSKAALTDWLRAKASFVIEGLKEADKDEFCRCELKLQKWYGDLRGKPFAIEAENSILDISGFSKQYNCAFIWQKDGVKKLNLYLIINYFKGGKLRFKKIKPEAFEANRFYTVINKKSGEIVPMEVNFNFDDPNLIILPLAFGKRQGREFIWNDLLSLETGSLKLANGRVIEKTLYNRRTRQDEPALFVALTFERREVLDSSNIKPMNLIGVDRGENIPAVIALTDPEGCPLSRFKDSLGNPTHILRIGESYKEKQRTIQAKKEVEQRRAGGYSRKYASKAKNLADDMVRNTARDLLYYAVTQDAMLIFENLSRGFGRQGKRTFSAERQYTRMEDWLTAKLAYEGLPSKTYLSKTLAQYTSKTCSNCGFTITSADYDRVLEKLKKTATGWMTTINGKELKVEGQITYYNRYKRQNVVKDLSVELDRLSEESVNNDISSWTKGRSGEALSLLKKRFSHRPVQEKFVCLNCGFETHADEQAALNIARSWLFLRSQEYKKYQTNKTTGNTDKRAFVETWQSFYRKKLKEVWKPAV

SEQ ID NO: 33027 - protein, 978 aa, synthetic construct
  REGION 1..978: note = engineered CasX variant
QEIKRISKIRRRLVKDSNTKKAGKTGPMKTLLVRVMTPDLRERLENLRKKPENIPQPISNTSRANLNKLLTDYTEMKKAILHVYWEEFQKDPVGLMSRVAQPASKKIDQNKLKPEMDEKGNLTTAGFACSQCGQPLFVYKLEQVSEKGKAYTNYFGRCNVAEHEKLILLAQLKPEKDSDEAVTYSLGKFGQRALDFYSIHVTKESTHPVKPLAQIAGNRYASYPVGKALSDACMGTIASFLSKYQDIIIEHQKVVKGNQKRLESLRELAGKENLEYPSVTLPPQPHTKEGVDAYNEVIARVRMWVNLNLWQKLKLSRDDAKPLLRLKGFPSFPLVERQANEVDWWDMVCNVKKLINEKKEDGKVFWQNLAGYKRQEALRPYLSSEEDRKKGKKFARYQLGDLLLHLEKKHGEDWGKVYDEAWERIDKKVEGLSKHIKLEEERRSEDAQSKAALTDWLRAKASFVIEGLKEADKDEFCRCELKLQKWYGDLRGKPFAIEAENSILDISGFSKQYNCAFIWQKDGVKKLNLYLIINYFKGGKLRFKKIKPEAFEANRFYTVINKKSGEIVPMEVNFNFDDPNLIILPLAFGKRQGREFIWNDLLSLETGSLKLANGRVIEKTLYNRRTRQDEPALFVALTFERREVLDSSNIKPMNLIGVDRGENIPAVIALTDPEGCPLSRFKDSLGNPTHILRIGESYKEKQRTIQAKKEVEQRRAGGYSRKYASKAKNLADDMVRNTARDLLYYAVTQDAMLIFENLSRGFGRQGKRTFMAERQYTRMEDWLTAKLAYEGLPSKTYLSKTLAQYTSKTCSNCGFTITSADYDRVLEKLKKTATGWMTTINGKELKVEGQITYYNRYKRQNVVKDLSVELDRLSEESVNNDISSWDKGRSGEALSLLKKRFSHRPVQEKFVCLNCGFETHADEQAALNIARSWLFLRSQEYKKYQTNKTTGNTDKRAFVETWQSFYRKKLKEVWKPAV

SEQ ID NO: 33028 - protein, 978 aa, synthetic construct
  REGION 1..978: note = engineered CasX variant
QEIKRISKIRRRLVKDSNTKKAGKTGPMKTLLVRVMTPDLRERLENLRKKPENIPQPISNTSRANLNKLLTDYTEMKKAILHVYWEEFQKDPVGLMSRVAQPASKKIDQNKLKPEMDEKGNLTTAGFACSQCGQPLFVYKLEQVSEKGKAYTNYFGRCNVAEHEKLILLAQLKPEKDSDEAVTYSLGKFGQRALDFYSIHVTKESTHPVKPLAQIAGNRYASHPVGKALSDACMGTIASFLSKYQDIIIEHQKVVKGNQKRLESLRELAGKENLEYPSVTLPPQPHTKEGVDAYNEVIARVRMWVNLNLWQKLKLSRDDAKPLLRLKGFPSFPLVERQANEVDWWDMVCNVKKLINEKKEDGKVFWQNLAGYKRQEALRPYLSSEEDRKKGKKFARYQLGDLLLHLEKKHGEDWGKVYDEAWERIDKKVEGLSKHIKLEEERRSEDAQSKAALTDWLRAKASFVIEGLKEADKDEFCRCELKLQKWYGDLRGKPFAIEAENSILDISGFSKQYNCAFIWQKDGVKKLNLYLIINYFKGGKLRFKKIKPEAFEANRFYTVINKKSGEIVPMEVNFNFDDPNLIILPLAFGKRQGREFIWNDLLSLETGSLKLANGRVIEKTLYNRRTRQDEPALFVALTFERREVLDSSNIKPMNLIGVDRGENIPAVIALTDPEGCPLSRFKDSLGNPTHILRIGESYKEKQRTIQAKKEVEQRRAGGYSRKYASKAKNLADDMVRNTARDLLYYAVTQDAMLIFENLSRGFGRQGKRTFMAERQYTRMEDWLTAKLAYEGLPSKTYLSKTLAQYTSKTCSNCGFTITSADYDRVLEKLKKTATGWMTTINGKELKVEGQITYYNRYKRQNVVKDLSVELDRLSEESVNNDISSWDKGRSGEALSLLKKRFSHRPVQEKFVCLNCGFETHADEQAALNIARSWLFLRSQEYKKYQTNKTTGNTDKRAFVETWQSFYRKKLKEVWKPAV

SEQ ID NO: 33029 - protein, 978 aa, synthetic construct
  REGION 1..978: note = engineered CasX variant
QEIKRISKIRRRLVKDSNTKKAGKTGPMKTLLVRVMTPDLRERLENLRKKPENIPQPISNTSRANLNKLLTDYTEMKKAILHVYWEEFQKDPVGLMSRVAQPASKKIDQNKLKPEMDEKGNLTTAGFACSQCGQPLFVYKLEQVSEKGKAYTNYFGRCNVAEHEKLILLAQLKPEKDSDEAVTYSLGKFGQRALDFYSIHVTKESTHPVKPLAQIAGNRYASSPVGKALSDACMGTIASFLSKYQDIIIEHQKVVKGNQKRLESLRELAGKENLEYPSVTLPPQPHTKEGVDAYNEVIARVRMWVNLNLWQKLKLSRDDAKPLLRLKGFPSFPLVERQANEVDWWDMVCNVKKLINEKKEDGKVFWQNLAGYKRQEALRPYLSSEEDRKKGKKFARYQLGDLLLHLEKKHGEDWGKVYDEAWERIDKKVEGLSKHIKLEEERRSEDAQSKAALTDWLRAKASFVIEGLKEADKDEFCRCELKLQKWYGDLRGKPFAIEAENSILDISGFSKQYNCAFIWQKDGVKKLNLYLIINYFKGGKLRFKKIKPEAFEANRFYTVINKKSGEIVPMEVNFNFDDPNLIILPLAFGKRQGREFIWNDLLSLETGSLKLANGRVIEKTLYNRRTRQDEPALFVALTFERREVLDSSNIKPMNLIGVDRGENIPAVIALTDPEGCPLSRFKDSLGNPTHILRIGESYKEKQRTIQAKKEVEQRRAGGYSRKYASKAKNLADDMVRNTARDLLYYAVTQDAMLIFENLSRGFGRQGKRTFMAERQYTRMEDWLTAKLAYEGLPSKTYLSKTLAQYTSKTCSNCGFTITSADYDRVLEKLKKTATGWMTTINGKELKVEGQITYYNRYKRQNVVKDLSVELDRLSEESVNNDISSWDKGRSGEALSLLKKRFSHRPVQEKFVCLNCGFETHADEQAALNIARSWLFLRSQEYKKYQTNKTTGNTDKRAFVETWQSFYRKKLKEVWKPAV

SEQ ID NO: 33030 - protein, 978 aa, synthetic construct
  REGION 1..978: note = engineered CasX variant
QEIKRISKIRRRLVKDSNTKKAGKTGPMKTLLVRVMTPDLRERLENLRKKPENIPQPISNTSRANLNKLLTDYTEMKKAILHVYWEEFQKDPVGLMSRVAQPASKKIDQNKLKPEMDEKGNLTTAGFACSQCGQPLFVYKLEQVSEKGKAYTNYFGRCNVAEHEKLILLAQLKPEKDSDEAVTYSLGKFGQRALDFYSIHVTKESTHPVKPLAQIAGNRYASTPVGKALSDACMGTIASFLSKYQDIIIEHQKVVKGNQKRLESLRELAGKENLEYPSVTLPPQPHTKEGVDAYNEVIARVRMWVNLNLWQKLKLSRDDAKPLLRLKGFPSFPLVERQANEVDWWDMVCNVKKLINEKKEDGKVFWQNLAGYKRQEALRPYLSSEEDRKKGKKFARYQLGDLLLHLEKKHGEDWGKVYDEAWERIDKKVEGLSKHIKLEEERRSEDAQSKAALTDWLRAKASFVIEGLKEADKDEFCRCELKLQKWYGDLRGKPFAIEAENSILDISGFSKQYNCAFIWQKDGVKKLNLYLIINYFKGGKLRFKKIKPEAFEANRFYTVINKKSGEIVPMEVNFNFDDPNLIILPLAFGKRQGREFIWNDLLSLETGSLKLANGRVIEKTLYNRRTRQDEPALFVALTFERREVLDSSNIKPMNLIGVDRGENIPAVIALTDPEGCPLSRFKDSLGNPTHILRIGESYKEKQRTIQAKKEVEQRRAGGYSRKYASKAKNLADDMVRNTARDLLYYAVTQDAMLIFENLSRGFGRQGKRTFMAERQYTRMEDWLTAKLAYEGLPSKTYLSKTLAQYTSKTCSNCGFTITSADYDRVLEKLKKTATGWMTTINGKELKVEGQITYYNRYKRQNVVKDLSVELDRLSEESVNNDISSWDKGRSGEALSLLKKRFSHRPVQEKFVCLNCGFETHADEQAALNIARSWLFLRSQEYKKYQTNKTTGNTDKRAFVETWQSFYRKKLKEVWKPAV

SEQ ID NO: 33031 - protein, 978 aa, synthetic construct
  REGION 1..978: note = engineered CasX variant
QEIKRISKIRRRLVKDSNTKKAGKTGPMKTLLVRVMTPDLRERLENLRKKPENIPQPISNTSRANLNKLLTDYTEMKKAILHVYWEEFQKDPVGLMSRVAQPASKKIDQNKLKPEMDEKGNLTTAGFACSQCGQPLFVYKLEQVSEKGKAYTNYFGRCNVAEHEKLILLAQLKPEKDSDEAVTYSLGKFGQRALDFYSIHVTKESTHPVKPLAQIAGNRYASAPVGKALSDACMGTIASFLSKYQDIIIEHQKVVKGNQKRLESLRELAGKENLEYPSVTLPPQPHTKEGVDAYNEVIARVRMWVNLNLWQKLKLSRDDAKPLLRLKGFPSFPLVERQANEVDWWDMVCNVKKLINEKKEDGKVFWQNLAGYKRQEALRPYLSSEEDRKKGKKFARYQLGDLLLHLEKKHGEDWGKVYDEAWERIDKKVEGLSKHIKLEEERRSEDAQSKAALTDWLRAKASFVIEGLKEADKDEFCRCELKLQKWYGDLRGKPFAIEAENSILDISGFSKQYNCAFIWQKDGVKKLNLYLIINYFKGGKLRFKKIKPEAFEANRFYTVINKKSGEIVPMEVNFNFDDPNLIILPLAFGKRQGREFIWNDLLSLETGSLKLANGRVIEKTLYNRRTRQDEPALFVALTFERREVLDSSNIKPMNLIGVDRGENIPAVIALTDPEGCPLSRFKDSLGNPTHILRIGESYKEKQRTIQAKKEVEQRRAGGYSRKYASKAKNLADDMVRNTARDLLYYAVTQDAMLIFENLSRGFGRQGKRTFMAERQYTRMEDWLTAKLAYEGLPSKTYLSKTLAQYTSKTCSNCGFTITSADYDRVLEKLKKTATGWMTTINGKELKVEGQITYYNRYKRQNVVKDLSVELDRLSEESVNNDISSWDKGRSGEALSLLKKRFSHRPVQEKFVCLNCGFETHADEQAALNIARSWLFLRSQEYKKYQTNKTTGNTDKRAFVETWQSFYRKKLKEVWKPAV

SEQ ID NO: 33032 - protein, 978 aa, synthetic construct
  REGION 1..978: note = engineered CasX variant
QEIKRISKIRRRLVKDSNTKKAGKTGPMKTLLVRVMTPDLRERLENLRKKPENIPQPISNTSRANLNKLLTDYTEMKKAILHVYWEEFQKDPVGLMSRVAQPASKKIDQNKLKPEMDEKGNLTTAGFACSQCGQPLFVYKLEQVSEKGKAYTNYFGRCNVAEHEKLILLAQLKPEKDSDEAVTYSLGKFGQRALDFYSIHVTKESTHPVKPLAQIAGNRYASVPVGKALSDACMGTIASFLSKYQDIIIEHQKVVKGNQKRLESLRELAGKENLEYPSVTLPPQPHTKEGVDAYNEVIARVRMWVNLNLWQKLKLSRDDAKPLLRLKGFPSFPLVERQANEVDWWDMVCNVKKLINEKKEDGKVFWQNLAGYKRQEALRPYLSSEEDRKKGKKFARYQLGDLLLHLEKKHGEDWGKVYDEAWERIDKKVEGLSKHIKLEEERRSEDAQSKAALTDWLRAKASFVIEGLKEADKDEFCRCELKLQKWYGDLRGKPFAIEAENSILDISGFSKQYNCAFIWQKDGVKKLNLYLIINYFKGGKLRFKKIKPEAFEANRFYTVINKKSGEIVPMEVNFNFDDPNLIILPLAFGKRQGREFIWNDLLSLETGSLKLANGRVIEKTLYNRRTRQDEPALFVALTFERREVLDSSNIKPMNLIGVDRGENIPAVIALTDPEGCPLSRFKDSLGNPTHILRIGESYKEKQRTIQAKKEVEQRRAGGYSRKYASKAKNLADDMVRNTARDLLYYAVTQDAMLIFENLSRGFGRQGKRTFMAERQYTRMEDWLTAKLAYEGLPSKTYLSKTLAQYTSKTCSNCGFTITSADYDRVLEKLKKTATGWMTTINGKELKVEGQITYYNRYKRQNVVKDLSVELDRLSEESVNNDISSWDKGRSGEALSLLKKRFSHRPVQEKFVCLNCGFETHADEQAALNIARSWLFLRSQEYKKYQTNKTTGNTDKRAFVETWQSFYRKKLKEVWKPAV

SEQ ID NO: 33033 - protein, 978 aa, synthetic construct
  REGION 1..978: note = engineered CasX variant
QEIKRISKIRRRLVKDSNTKKAGKTGPMKTLLVRVMTPDLRERLENLRKKPENIPQPISNTSRANLNKLLTDYTEMKKAILHVYWEEFQKDPVGLMSRVAQPASKKIDQNKLKPEMDEKGNLTTAGFACSQCGQPLFVYKLEQVSEKGKAYTNYFGRCNVAEHEKLIKLAQLKPEKDSDEAVTYSLGKFGQRALDFYSIHVTKESTHPVKPLAQIAGNRYASGPVGKALSDACMGTIASFLSKYQDIIIEHQKVVKGNQKRLESLRELAGKENLEYPSVTLPPQPHTKEGVDAYNEVIARVRMWVNLNLWQKLKLSRDDAKPLLRLKGFPSFPLVERQANEVDWWDMVCNVKKLINEKKEDGKVFWQNLAGYKRQEALRPYLSSEEDRKKGKKFARYQLGDLLLHLEKKHGEDWGKVYDEAWERIDKKVEGLSKHIKLEEERRSEDAQSKAALTDWLRAKASFVIEGLKEADKDEFCRCELKLQKWYGDLRGKPFAIEAENSILDISGFSKQYNCAFIWQKDGVKKLNLYLIINYFKGGKLRFKKIKPEAFEANRFYTVINKKSGEIVPMEVNFNFDDPNLIILPLAFGKRQGREFIWNDLLSLETGSLKLANGRVIEKTLYNRRTRQDEPALFVALTFERREVLDSSNIKPMNLIGVDRGENIPAVIALTDPEGCPLSRFKDSLGNPTHILRIGESYKEKQRTIQAKKEVEQRRAGGYSRKYASKAKNLADDMVRNTARDLLYYAVTQDAMLIFENLSRGFGRQGKRTFMAERQYTRMEDWLTAKLAYEGLPSKTYLSKTLAQYTSKTCSNCGFTITSADYDRVLEKLKKTATGWMTTINGKELKVEGQITYYNRYKRQNVVKDLSVELDRLSEESVNNDISSWDKGRSGEALSLLKKRFSHRPVQEKFVCLNCGFETHADEQAALNIARSWLFLRSQEYKKYQTNKTTGNTDKRAFVETWQSFYRKKLKEVWKPAV

SEQ ID NO: 33034 - protein, 977 aa, synthetic construct
  REGION 1..977: note = engineered CasX variant
QEIKRISKIRRRLVKDSNTKKAGKTGPMKTLLVRVMTPDLRERLENLRKKPENIPQPISNTSRANLNKLLTDYTEMKKAILHVYWEEFQKDPVGLMSRVAQPASKKIDQNKLKPEMDEKGNLTTAGFACSQCGQPLFVYKLEQVSEKGKAYTNYFGRCNVAEHEKLILLAQLKPEKDSDEAVTYSLGKFGQRALDFYSIHVTKESTHPVKPLAQIAGNRYASPVGKALSDACMGTIASFLSKYQDIIIEHQKVVKGNQKRLESLRELAGKENLEYPSVTLPPQPHTKEGVDAYNEVIARVRMWVNLNLWQKLKLSRDDAKPLLRLKGFPSFPLVERQANEVDWWDMVCNVKKLINEKKEDGKVFWQNLAGYKRQEALRPYLSSEEDRKKGKKFARYQLGDLLLHLEKKHGEDWGKVYDEAWERIDKKVEGLSKHIKLEEERRSEDAQSKAALTDWLRAKASFVIEGLKEADKDEFCRCELKLQKWYGDLRGKPFAIEAENSILDISGFSKQYNCAFIWQKDGVKKLNLYLIINYFKGGKLRFKKIKPEAFEANRFYTVINKKSGEIVPMEVNFNFDDPNLIILPLAFGKRQGREFIWNDLLSLETGSLKLANGRVIEKTLYNRRTRQDEPALFVALTFERREVLDSSNIKPMNLIGVDRGENIPAVIALTDPEGCPLSRFKDSLGNPTHILRIGESYKEKQRTIQAKKEVEQRRAGGYSRKYASKAKNLADDMVRNTARDLLYYAVTQDAMLIFENLSRGFGRQGKRTFMAERQYTRMEDWLTAKLAYEGLPSKTYLSKTLAQYTSKTCSNCGFTITSADYDRVLEKLKKTATGWMTTINGKELKVEGQITYYNRYKRQNVVKDLSVELDRLSEESVNNDISSWDKGRSGEALSLLKKRFSHRPVQEKFVCLNCGFETHADEQAALNIARSWLFLRSQEYKKYQTNKTTGNTDKRAFVETWQSFYRKKLKEVWKPAV

SEQ ID NO: 33035 - protein, 978 aa, synthetic construct
  REGION 1..978: note = engineered CasX variant
QEIKRISKIRRRLVKDSNTKKAGKTGPMKTLLVRVMTPDLRERLENLRKKPENIPQPISNTSRANLNKLLTDYTEMKKAILHVYWEEFQVDPVGLMSRVAQPASKKIDQNKLKPEMDEKGNLTTAGFACSQCGQPLFVYKLEQVSEKGKAYTNYFGRCNVAEHEKLILLAQLKPEKDSDEAVTYSLGKFGQRALDFYSIHVTKESTHPVKPLAQIAGNRYASYPVGKALSDACMGTIASFLSKYQDIIIEHQKVVKGNQKRLESLRELAGKENLEYPSVTLPPQPHTKEGVDAYNEVIARVRMWVNLNLWQKLKLSRDDAKPLLRLKGFPSFPLVERQANEVDWWDMVCNVKKLINEKKEDGKVFWQNLAGYKRQEALRPYLSSEEDRKKGKKFARYQLGDLLLHLEKKHGEDWGKVYDEAWERIDKKVEGLSKHIKLEEERRSEDAQSKAALTDWLRAKASFVIEGLKEADKDEFCRCELKLQKWYGDLRGKPFAIEAENSILDISGFSKQYNCAFIWQKDGVKKLNLYLIINYFKGGKLRFKKIKPEAFEANRFYTVINKKSGEIVPMEVNFNFDDPNLIILPLAFGKRQGREFIWNDLLSLETGSLKLANGRVIEKTLYNRRTRQDEPALFVALTFERREVLDSSNIKPMNLIGVDRGENIPAVIALTDPEGCPLSRFKDSLGNPTHILRIGESYKEKQRTIQAKKEVEQRRAGGYSRKYASKAKNLADDMVRNTARDLLYYAVTQDAMLIFENLSRGFGRQGKRTFMAERQYTRMEDWLTAKLAYEGLPSKTYLSKTLAQYTSKTCSNCGFTITSADYDRVLEKLKKTATGWMTTINGKELKVEGQITYYNRYKRQNVVKDLSVELDRLSEESVNNDISSWTKGRSGEALSLLKKRFSHRPVQEKFVCLNCGFETHADEQAALNIARSWLFLRSQEYKKYQTNKTTGNTDKRAFVETWQSFYRKKLKEVWKPAV

SEQ ID NO: 33036 - protein, 978 aa, synthetic construct
  REGION 1..978: note = engineered CasX variant
QEIKRISKIRRRLVKDSNTKKAGKTGPMKTLLVRVMTPDLRERLENLRKKPENIPQPISNTSRANLNKLLTDYTEMKKAILHVYWEEFQVDPVGLMSRVAQPASKKIDQNKLKPEMDEKGNLTTAGFACSQCGQPLFVYKLEQVSEKGKAYTNYFGRCNVAEHEKLILLAQLKPEKDSDEAVTYSLGKFGQRALDFYSIHVTKESTHPVKPLAQIAGNRYASHPVGKALSDACMGTIASFLSKYQDIIIEHQKVVKGNQKRLESLRELAGKENLEYPSVTLPPQPHTKEGVDAYNEVIARVRMWVNLNLWQKLKLSRDDAKPLLRLKGFPSFPLVERQANEVDWWDMVCNVKKLINEKKEDGKVFWQNLAGYKRQEALRPYLSSEEDRKKGKKFARYQLGDLLLHLEKKHGEDWGKVYDEAWERIDKKVEGLSKHIKLEEERRSEDAQSKAALTDWLRAKASFVIEGLKEADKDEFCRCELKLQKWYGDLRGKPFAIEAENSILDISGFSKQYNCAFIWQKDGVKKLNLYLIINYFKGGKLRFKKIKPEAFEANRFYTVINKKSGEIVPMEVNFNFDDPNLIILPLAFGKRQGREFIWNDLLSLETGSLKLANGRVIEKTLYNRRTRQDEPALFVALTFERREVLDSSNIKPMNLIGVDRGENIPAVIALTDPEGCPLSRFKDSLGNPTHILRIGESYKEKQRTIQAKKEVEQRRAGGYSRKYASKAKNLADDMVRNTARDLLYYAVTQDAMLIFENLSRGFGRQGKRTFMAERQYTRMEDWLTAKLAYEGLPSKTYLSKTLAQYTSKTCSNCGFTITSADYDRVLEKLKKTATGWMTTINGKELKVEGQITYYNRYKRQNVVKDLSVELDRLSEESVNNDISSWTKGRSGEALSLLKKRFSHRPVQEKFVCLNCGFETHADEQAALNIARSWLFLRSQEYKKYQTNKTTGNTDKRAFVETWQSFYRKKLKEVWKPAV

SEQ ID NO: 33037 - protein, 978 aa, synthetic construct
  REGION 1..978: note = engineered CasX variant
QEIKRISKIRRRLVKDSNTKKAGKTGPMKTLLVRVMTPDLRERLENLRKKPENIPQPISNTSRANLNKLLTDYTEMKKAILHVYWEEFQVDPVGLMSRVAQPASKKIDQNKLKPEMDEKGNLTTAGFACSQCGQPLFVYKLEQVSEKGKAYTNYFGRCNVAEHEKLILLAQLKPEKDSDEAVTYSLGKFGQRALDFYSIHVTKESTHPVKPLAQIAGNRYASSPVGKALSDACMGTIASFLSKYQDIIIEHQKVVKGNQKRLESLRELAGKENLEYPSVTLPPQPHTKEGVDAYNEVIARVRMWVNLNLWQKLKLSRDDAKPLLRLKGFPSFPLVERQANEVDWWDMVCNVKKLINEKKEDGKVFWQNLAGYKRQEALRPYLSSEEDRKKGKKFARYQLGDLLLHLEKKHGEDWGKVYDEAWERIDKKVEGLSKHIKLEEERRSEDAQSKAALTDWLRAKASFVIEGLKEADKDEFCRCELKLQKWYGDLRGKPFAIEAENSILDISGFSKQYNCAFIWQKDGVKKLNLYLIINYFKGGKLRFKKIKPEAFEANRFYTVINKKSGEIVPMEVNFNFDDPNLIILPLAFGKRQGREFIWNDLLSLETGSLKLANGRVIEKTLYNRRTRQDEPALFVALTFERREVLDSSNIKPMNLIGVDRGENIPAVIALTDPEGCPLSRFKDSLGNPTHILRIGESYKEKQRTIQAKKEVEQRRAGGYSRKYASKAKNLADDMVRNTARDLLYYAVTQDAMLIFENLSRGFGRQGKRTFMAERQYTRMEDWLTAKLAYEGLPSKTYLSKTLAQYTSKTCSNCGFTITSADYDRVLEKLKKTATGWMTTINGKELKVEGQITYYNRYKRQNVVKDLSVELDRLSEESVNNDISSWTKGRSGEALSLLKKRFSHRPVQEKFVCLNCGFETHADEQAALNIARSWLFLRSQEYKKYQTNKTTGNTDKRAFVETWQSFYRKKLKEVWKPAV

SEQ ID NO: 33038 - protein, 978 aa, synthetic construct
  REGION 1..978: note = engineered CasX variant
QEIKRISKIRRRLVKDSNTKKAGKTGPMKTLLVRVMTPDLRERLENLRKKPENIPQPISNTSRANLNKLLTDYTEMKKAILHVYWEEFQVDPVGLMSRVAQPASKKIDQNKLKPEMDEKGNLTTAGFACSQCGQPLFVYKLEQVSEKGKAYTNYFGRCNVAEHEKLILLAQLKPEKDSDEAVTYSLGKFGQRALDFYSIHVTKESTHPVKPLAQIAGNRYASTPVGKALSDACMGTIASFLSKYQDIIIEHQKVVKGNQKRLESLRELAGKENLEYPSVTLPPQPHTKEGVDAYNEVIARVRMWVNLNLWQKLKLSRDDAKPLLRLKGFPSFPLVERQANEVDWWDMVCNVKKLINEKKEDGKVFWQNLAGYKRQEALRPYLSSEEDRKKGKKFARYQLGDLLLHLEKKHGEDWGKVYDEAWERIDKKVEGLSKHIKLEEERRSEDAQSKAALTDWLRAKASFVIEGLKEADKDEFCRCELKLQKWYGDLRGKPFAIEAENSILDISGFSKQYNCAFIWQKDGVKKLNLYLIINYFKGGKLRFKKIKPEAFEANRFYTVINKKSGEIVPMEVNFNFDDPNLIILPLAFGKRQGREFIWNDLLSLETGSLKLANGRVIEKTLYNRRTRQDEPALFVALTFERREVLDSSNIKPMNLIGVDRGENIPAVIALTDPEGCPLSRFKDSLGNPTHILRIGESYKEKQRTIQAKKEVEQRRAGGYSRKYASKAKNLADDMVRNTARDLLYYAVTQDAMLIFENLSRGFGRQGKRTFMAERQYTRMEDWLTAKLAYEGLPSKTYLSKTLAQYTSKTCSNCGFTITSADYDRVLEKLKKTATGWMTTINGKELKVEGQITYYNRYKRQNVVKDLSVELDRLSEESVNNDISSWTKGRSGEALSLLKKRFSHRPVQEKFVCLNCGFETHADEQAALNIARSWLFLRSQEYKKYQTNKTTGNTDKRAFVETWQSFYRKKLKEVWKPAV

SEQ ID NO: 33039 - protein, 978 aa, synthetic construct
  REGION 1..978: note = engineered CasX variant
QEIKRISKIRRRLVKDSNTKKAGKTGPMKTLLVRVMTPDLRERLENLRKKPENIPQPISNTSRANLNKLLTDYTEMKKAILHVYWEEFQVDPVGLMSRVAQPASKKIDQNKLKPEMDEKGNLTTAGFACSQCGQPLFVYKLEQVSEKGKAYTNYFGRCNVAEHEKLILLAQLKPEKDSDEAVTYSLGKFGQRALDFYSIHVTKESTHPVKPLAQIAGNRYASAPVGKALSDACMGTIASFLSKYQDIIIEHQKVVKGNQKRLESLRELAGKENLEYPSVTLPPQPHTKEGVDAYNEVIARVRMWVNLNLWQKLKLSRDDAKPLLRLKGFPSFPLVERQANEVDWWDMVCNVKKLINEKKEDGKVFWQNLAGYKRQEALRPYLSSEEDRKKGKKFARYQLGDLLLHLEKKHGEDWGKVYDEAWERIDKKVEGLSKHIKLEEERRSEDAQSKAALTDWLRAKASFVIEGLKEADKDEFCRCELKLQKWYGDLRGKPFAIEAENSILDISGFSKQYNCAFIWQKDGVKKLNLYLIINYFKGGKLRFKKIKPEAFEANRFYTVINKKSGEIVPMEVNFNFDDPNLIILPLAFGKRQGREFIWNDLLSLETGSLKLANGRVIEKTLYNRRTRQDEPALFVALTFERREVLDSSNIKPMNLIGVDRGENIPAVIALTDPEGCPLSRFKDSLGNPTHILRIGESYKEKQRTIQAKKEVEQRRAGGYSRKYASKAKNLADDMVRNTARDLLYYAVTQDAMLIFENLSRGFGRQGKRTFMAERQYTRMEDWLTAKLAYEGLPSKTYLSKTLAQYTSKTCSNCGFTITSADYDRVLEKLKKTATGWMTTINGKELKVEGQITYYNRYKRQNVVKDLSVELDRLSEESVNNDISSWTKGRSGEALSLLKKRFSHRPVQEKFVCLNCGFETHADEQAALNIARSWLFLRSQEYKKYQTNKTTGNTDKRAFVETWQSFYRKKLKEVWKPAV

SEQ ID NO: 33040 - protein, 978 aa, synthetic construct
  REGION 1..978: note = engineered CasX variant
QEIKRISKIRRRLVKDSNTKKAGKTGPMKTLLVRVMTPDLRERLENLRKKPENIPQPISNTSRANLNKLLTDYTEMKKAILHVYWEEFQVDPVGLMSRVAQPASKKIDQNKLKPEMDEKGNLTTAGFACSQCGQPLFVYKLEQVSEKGKAYTNYFGRCNVAEHEKLILLAQLKPEKDSDEAVTYSLGKFGQRALDFYSIHVTKESTHPVKPLAQIAGNRYASVPVGKALSDACMGTIASFLSKYQDIIIEHQKVVKGNQKRLESLRELAGKENLEYPSVTLPPQPHTKEGVDAYNEVIARVRMWVNLNLWQKLKLSRDDAKPLLRLKGFPSFPLVERQANEVDWWDMVCNVKKLINEKKEDGKVFWQNLAGYKRQEALRPYLSSEEDRKKGKKFARYQLGDLLLHLEKKHGEDWGKVYDEAWERIDKKVEGLSKHIKLEEERRSEDAQSKAALTDWLRAKASFVIEGLKEADKDEFCRCELKLQKWYGDLRGKPFAIEAENSILDISGFSKQYNCAFIWQKDGVKKLNLYLIINYFKGGKLRFKKIKPEAFEANRFYTVINKKSGEIVPMEVNFNFDDPNLIILPLAFGKRQGREFIWNDLLSLETGSLKLANGRVIEKTLYNRRTRQDEPALFVALTFERREVLDSSNIKPMNLIGVDRGENIPAVIALTDPEGCPLSRFKDSLGNPTHILRIGESYKEKQRTIQAKKEVEQRRAGGYSRKYASKAKNLADDMVRNTARDLLYYAVTQDAMLIFENLSRGFGRQGKRTFMAERQYTRMEDWLTAKLAYEGLPSKTYLSKTLAQYTSKTCSNCGFTITSADYDRVLEKLKKTATGWMTTINGKELKVEGQITYYNRYKRQNVVKDLSVELDRLSEESVNNDISSWTKGRSGEALSLLKKRFSHRPVQEKFVCLNCGFETHADEQAALNIARSWLFLRSQEYKKYQTNKTTGNTDKRAFVETWQSFYRKKLKEVWKPAV

SEQ ID NO: 33041 - protein, 978 aa, synthetic construct
  REGION 1..978: note = engineered CasX variant
QEIKRISKIRRRLVKDSNTKKAGKTGPMKTLLVRVMTPDLRERLENLRKKPENIPQPISNTSRANLNKLLTDYTEMKKAILHVYWEEFQVDPVGLMSRVAQPASKKIDQNKLKPEMDEKGNLTTAGFACSQCGQPLFVYKLEQVSEKGKAYTNYFGRCNVAEHEKLIKLAQLKPEKDSDEAVTYSLGKFGQRALDFYSIHVTKESTHPVKPLAQIAGNRYASGPVGKALSDACMGTIASFLSKYQDIIIEHQKVVKGNQKRLESLRELAGKENLEYPSVTLPPQPHTKEGVDAYNEVIARVRMWVNLNLWQKLKLSRDDAKPLLRLKGFPSFPLVERQANEVDWWDMVCNVKKLINEKKEDGKVFWQNLAGYKRQEALRPYLSSEEDRKKGKKFARYQLGDLLLHLEKKHGEDWGKVYDEAWERIDKKVEGLSKHIKLEEERRSEDAQSKAALTDWLRAKASFVIEGLKEADKDEFCRCELKLQKWYGDLRGKPFAIEAENSILDISGFSKQYNCAFIWQKDGVKKLNLYLIINYFKGGKLRFKKIKPEAFEANRFYTVINKKSGEIVPMEVNFNFDDPNLIILPLAFGKRQGREFIWNDLLSLETGSLKLANGRVIEKTLYNRRTRQDEPALFVALTFERREVLDSSNIKPMNLIGVDRGENIPAVIALTDPEGCPLSRFKDSLGNPTHILRIGESYKEKQRTIQAKKEVEQRRAGGYSRKYASKAKNLADDMVRNTARDLLYYAVTQDAMLIFENLSRGFGRQGKRTFMAERQYTRMEDWLTAKLAYEGLPSKTYLSKTLAQYTSKTCSNCGFTITSADYDRVLEKLKKTATGWMTTINGKELKVEGQITYYNRYKRQNVVKDLSVELDRLSEESVNNDISSWTKGRSGEALSLLKKRFSHRPVQEKFVCLNCGFETHADEQAALNIARSWLFLRSQEYKKYQTNKTTGNTDKRAFVETWQSFYRKKLKEVWKPAV

SEQ ID NO: 33042 - protein, 977 aa, synthetic construct
  REGION 1..977: note = engineered CasX variant
QEIKRISKIRRRLVKDSNTKKAGKTGPMKTLLVRVMTPDLRERLENLRKKPENIPQPISNTSRANLNKLLTDYTEMKKAILHVYWEEFQVDPVGLMSRVAQPASKKIDQNKLKPEMDEKGNLTTAGFACSQCGQPLFVYKLEQVSEKGKAYTNYFGRCNVAEHEKLILLAQLKPEKDSDEAVTYSLGKFGQRALDFYSIHVTKESTHPVKPLAQIAGNRYASPVGKALSDACMGTIASFLSKYQDIIIEHQKVVKGNQKRLESLRELAGKENLEYPSVTLPPQPHTKEGVDAYNEVIARVRMWVNLNLWQKLKLSRDDAKPLLRLKGFPSFPLVERQANEVDWWDMVCNVKKLINEKKEDGKVFWQNLAGYKRQEALRPYLSSEEDRKKGKKFARYQLGDLLLHLEKKHGEDWGKVYDEAWERIDKKVEGLSKHIKLEEERRSEDAQSKAALTDWLRAKASFVIEGLKEADKDEFCRCELKLQKWYGDLRGKPFAIEAENSILDISGFSKQYNCAFIWQKDGVKKLNLYLIINYFKGGKLRFKKIKPEAFEANRFYTVINKKSGEIVPMEVNFNFDDPNLIILPLAFGKRQGREFIWNDLLSLETGSLKLANGRVIEKTLYNRRTRQDEPALFVALTFERREVLDSSNIKPMNLIGVDRGENIPAVIALTDPEGCPLSRFKDSLGNPTHILRIGESYKEKQRTIQAKKEVEQRRAGGYSRKYASKAKNLADDMVRNTARDLLYYAVTQDAMLIFENLSRGFGRQGKRTFMAERQYTRMEDWLTAKLAYEGLPSKTYLSKTLAQYTSKTCSNCGFTITSADYDRVLEKLKKTATGWMTTINGKELKVEGQITYYNRYKRQNVVKDLSVELDRLSEESVNNDISSWTKGRSGEALSLLKKRFSHRPVQEKFVCLNCGFETHADEQAALNIARSWLFLRSQEYKKYQTNKTTGNTDKRAFVETWQSFYRKKLKEVWKPAV

SEQ ID NO: 33043 - protein, 978 aa, synthetic construct
  REGION 1..978: note = engineered CasX variant
QEIKRLSKIRRRLVKDSNTKKAGKTGPMKTLLVRVMTPDLRERLENLRKKPENIPQPISNTSRANLNKLLTDYTEMKKAILHVYWEEFQKDPVGLMSRVAQPASKKIDQNKLKPEMDEKGNLTTAGFACSQCGQPLFVYKLEQVSEKGKAYTNYFGRCNVAEHEKLILLAQLKPEKDSDEAVTYSLGKFGQRALDFYSIHVTKESTHPVKPLAQIAGNRYASYPVGKALSDACMGTIASFLSKYQDIIIEHQKVVKGNQKRLESLRELAGKENLEYPSVTLPPQPHTKEGVDAYNEVIARVRMWVNLNLWQKLKLSRDDAKPLLRLKGFPSFPLVERQANEVDWWDMVCNVKKLINEKKEDGKVFWQNLAGYKRQEALRPYLSSEEDRKKGKKFARYQLGDLLLHLEKKHGEDWGKVYDEAWERIDKKVEGLSKHIKLEEERRSEDAQSKAALTDWLRAKASFVIEGLKEADKDEFCRCELKLQKWYGDLRGKPFAIEAENSILDISGFSKQYNCAFIWQKDGVKKLNLYLIINYFKGGKLRFKKIKPEAFEANRFYTVINKKSGEIVPMEVNFNFDDPNLIILPLAFGKRQGREFIWNDLLSLETGSLKLANGRVIEKTLYNRRTRQDEPALFVALTFERREVLDSSNIKPMNLIGVDRGENIPAVIALTDPEGCPLSRFKDSLGNPTHILRIGESYKEKQRTIQAKKEVEQRRAGGYSRKYASKAKNLADDMVRNTARDLLYYAVTQDAMLIFENLSRGFGRQGKRTFMAERQYTRMEDWLTAKLAYEGLPSKTYLSKTLAQYTSKTCSNCGFTITSADYDRVLEKLKKTATGWMTTINGKELKVEGQITYYNRYKRQNVVKDLSVELDRLSEESVNNDISSWTKGRSGEALSLLKKRFSHRPVQEKFVCLNCGFETHADEQAALNIARSWLFLRSQEYKKYQTNKTTGNTDKRAFVETWQSFYRKKLKEVWKPAV

SEQ ID NO: 33044 - protein, 978 aa, synthetic construct
  REGION 1..978: note = engineered CasX variant
QEIKRLSKIRRRLVKDSNTKKAGKTGPMKTLLVRVMTPDLRERLENLRKKPENIPQPISNTSRANLNKLLTDYTEMKKAILHVYWEEFQKDPVGLMSRVAQPASKKIDQNKLKPEMDEKGNLTTAGFACSQCGQPLFVYKLEQVSEKGKAYTNYFGRCNVAEHEKLILLAQLKPEKDSDEAVTYSLGKFGQRALDFYSIHVTKESTHPVKPLAQIAGNRYASHPVGKALSDACMGTIASFLSKYQDIIIEHQKVVKGNQKRLESLRELAGKENLEYPSVTLPPQPHTKEGVDAYNEVIARVRMWVNLNLWQKLKLSRDDAKPLLRLKGFPSFPLVERQANEVDWWDMVCNVKKLINEKKEDGKVFWQNLAGYKRQEALRPYLSSEEDRKKGKKFARYQLGDLLLHLEKKHGEDWGKVYDEAWERIDKKVEGLSKHIKLEEERRSEDAQSKAALTDWLRAKASFVIEGLKEADKDEFCRCELKLQKWYGDLRGKPFAIEAENSILDISGFSKQYNCAFIWQKDGVKKLNLYLIINYFKGGKLRFKKIKPEAFEANRFYTVINKKSGEIVPMEVNFNFDDPNLIILPLAFGKRQGREFIWNDLLSLETGSLKLANGRVIEKTLYNRRTRQDEPALFVALTFERREVLDSSNIKPMNLIGVDRGENIPAVIALTDPEGCPLSRFKDSLGNPTHILRIGESYKEKQRTIQAKKEVEQRRAGGYSRKYASKAKNLADDMVRNTARDLLYYAVTQDAMLIFENLSRGFGRQGKRTFMAERQYTRMEDWLTAKLAYEGLPSKTYLSKTLAQYTSKTCSNCGFTITSADYDRVLEKLKKTATGWMTTINGKELKVEGQITYYNRYKRQNVVKDLSVELDRLSEESVNNDISSWTKGRSGEALSLLKKRFSHRPVQEKFVCLNCGFETHADEQAALNIARSWLFLRSQEYKKYQTNKTTGNTDKRAFVETWQSFYRKKLKEVWKPAV

SEQ ID NO: 33045 - protein, 978 aa, synthetic construct
  REGION 1..978: note = engineered CasX variant
QEIKRLSKIRRRLVKDSNTKKAGKTGPMKTLLVRVMTPDLRERLENLRKKPENIPQPISNTSRANLNKLLTDYTEMKKAILHVYWEEFQKDPVGLMSRVAQPASKKIDQNKLKPEMDEKGNLTTAGFACSQCGQPLFVYKLEQVSEKGKAYTNYFGRCNVAEHEKLILLAQLKPEKDSDEAVTYSLGKFGQRALDFYSIHVTKESTHPVKPLAQIAGNRYASSPVGKALSDACMGTIASFLSKYQDIIIEHQKVVKGNQKRLESLRELAGKENLEYPSVTLPPQPHTKEGVDAYNEVIARVRMWVNLNLWQKLKLSRDDAKPLLRLKGFPSFPLVERQANEVDWWDMVCNVKKLINEKKEDGKVFWQNLAGYKRQEALRPYLSSEEDRKKGKKFARYQLGDLLLHLEKKHGEDWGKVYDEAWERIDKKVEGLSKHIKLEEERRSEDAQSKAALTDWLRAKASFVIEGLKEADKDEFCRCELKLQKWYGDLRGKPFAIEAENSILDISGFSKQYNCAFIWQKDGVKKLNLYLIINYFKGGKLRFKKIKPEAFEANRFYTVINKKSGEIVPMEVNFNFDDPNLIILPLAFGKRQGREFIWNDLLSLETGSLKLANGRVIEKTLYNRRTRQDEPALFVALTFERREVLDSSNIKPMNLIGVDRGENIPAVIALTDPEGCPLSRFKDSLGNPTHILRIGESYKEKQRTIQAKKEVEQRRAGGYSRKYASKAKNLADDMVRNTARDLLYYAVTQDAMLIFENLSRGFGRQGKRTFMAERQYTRMEDWLTAKLAYEGLPSKTYLSKTLAQYTSKTCSNCGFTITSADYDRVLEKLKKTATGWMTTINGKELKVEGQITYYNRYKRQNVVKDLSVELDRLSEESVNNDISSWTKGRSGEALSLLKKRFSHRPVQEKFVCLNCGFETHADEQAALNIARSWLFLRSQEYKKYQTNKTTGNTDKRAFVETWQSFYRKKLKEVWKPAV

SEQ ID NO: 33046 - protein, 978 aa, synthetic construct
  REGION 1..978: note = engineered CasX variant
QEIKRLSKIRRRLVKDSNTKKAGKTGPMKTLLVRVMTPDLRERLENLRKKPENIPQPISNTSRANLNKLLTDYTEMKKAILHVYWEEFQKDPVGLMSRVAQPASKKIDQNKLKPEMDEKGNLTTAGFACSQCGQPLFVYKLEQVSEKGKAYTNYFGRCNVAEHEKLILLAQLKPEKDSDEAVTYSLGKFGQRALDFYSIHVTKESTHPVKPLAQIAGNRYASTPVGKALSDACMGTIASFLSKYQDIIIEHQKVVKGNQKRLESLRELAGKENLEYPSVTLPPQPHTKEGVDAYNEVIARVRMWVNLNLWQKLKLSRDDAKPLLRLKGFPSFPLVERQANEVDWWDMVCNVKKLINEKKEDGKVFWQNLAGYKRQEALRPYLSSEEDRKKGKKFARYQLGDLLLHLEKKHGEDWGKVYDEAWERIDKKVEGLSKHIKLEEERRSEDAQSKAALTDWLRAKASFVIEGLKEADKDEFCRCELKLQKWYGDLRGKPFAIEAENSILDISGFSKQYNCAFIWQKDGVKKLNLYLIINYFKGGKLRFKKIKPEAFEANRFYTVINKKSGEIVPMEVNFNFDDPNLIILPLAFGKRQGREFIWNDLLSLETGSLKLANGRVIEKTLYNRRTRQDEPALFVALTFERREVLDSSNIKPMNLIGVDRGENIPAVIALTDPEGCPLSRFKDSLGNPTHILRIGESYKEKQRTIQAKKEVEQRRAGGYSRKYASKAKNLADDMVRNTARDLLYYAVTQDAMLIFENLSRGFGRQGKRTFMAERQYTRMEDWLTAKLAYEGLPSKTYLSKTLAQYTSKTCSNCGFTITSADYDRVLEKLKKTATGWMTTINGKELKVEGQITYYNRYKRQNVVKDLSVELDRLSEESVNNDISSWTKGRSGEALSLLKKRFSHRPVQEKFVCLNCGFETHADEQAALNIARSWLFLRSQEYKKYQTNKTTGNTDKRAFVETWQSFYRKKLKEVWKPAV

SEQ ID NO: 33047 - protein, 978 aa, synthetic construct
  REGION 1..978: note = engineered CasX variant
QEIKRLSKIRRRLVKDSNTKKAGKTGPMKTLLVRVMTPDLRERLENLRKKPENIPQPISNTSRANLNKLLTDYTEMKKAILHVYWEEFQKDPVGLMSRVAQPASKKIDQNKLKPEMDEKGNLTTAGFACSQCGQPLFVYKLEQVSEKGKAYTNYFGRCNVAEHEKLILLAQLKPEKDSDEAVTYSLGKFGQRALDFYSIHVTKESTHPVKPLAQIAGNRYASAPVGKALSDACMGTIASFLSKYQDIIIEHQKVVKGNQKRLESLRELAGKENLEYPSVTLPPQPHTKEGVDAYNEVIARVRMWVNLNLWQKLKLSRDDAKPLLRLKGFPSFPLVERQANEVDWWDMVCNVKKLINEKKEDGKVFWQNLAGYKRQEALRPYLSSEEDRKKGKKFARYQLGDLLLHLEKKHGEDWGKVYDEAWERIDKKVEGLSKHIKLEEERRSEDAQSKAALTDWLRAKASFVIEGLKEADKDEFCRCELKLQKWYGDLRGKPFAIEAENSILDISGFSKQYNCAFIWQKDGVKKLNLYLIINYFKGGKLRFKKIKPEAFEANRFYTVINKKSGEIVPMEVNFNFDDPNLIILPLAFGKRQGREFIWNDLLSLETGSLKLANGRVIEKTLYNRRTRQDEPALFVALTFERREVLDSSNIKPMNLIGVDRGENIPAVIALTDPEGCPLSRFKDSLGNPTHILRIGESYKEKQRTIQAKKEVEQRRAGGYSRKYASKAKNLADDMVRNTARDLLYYAVTQDAMLIFENLSRGFGRQGKRTFMAERQYTRMEDWLTAKLAYEGLPSKTYLSKTLAQYTSKTCSNCGFTITSADYDRVLEKLKKTATGWMTTINGKELKVEGQITYYNRYKRQNVVKDLSVELDRLSEESVNNDISSWTKGRSGEALSLLKKRFSHRPVQEKFVCLNCGFETHADEQAALNIARSWLFLRSQEYKKYQTNKTTGNTDKRAFVETWQSFYRKKLKEVWKPAV

SEQ ID NO: 33048 - protein, 978 aa, synthetic construct
  REGION 1..978: note = engineered CasX variant
QEIKRLSKIRRRLVKDSNTKKAGKTGPMKTLLVRVMTPDLRERLENLRKKPENIPQPISNTSRANLNKLLTDYTEMKKAILHVYWEEFQKDPVGLMSRVAQPASKKIDQNKLKPEMDEKGNLTTAGFACSQCGQPLFVYKLEQVSEKGKAYTNYFGRCNVAEHEKLILLAQLKPEKDSDEAVTYSLGKFGQRALDFYSIHVTKESTHPVKPLAQIAGNRYASVPVGKALSDACMGTIASFLSKYQDIIIEHQKVVKGNQKRLESLRELAGKENLEYPSVTLPPQPHTKEGVDAYNEVIARVRMWVNLNLWQKLKLSRDDAKPLLRLKGFPSFPLVERQANEVDWWDMVCNVKKLINEKKEDGKVFWQNLAGYKRQEALRPYLSSEEDRKKGKKFARYQLGDLLLHLEKKHGEDWGKVYDEAWERIDKKVEGLSKHIKLEEERRSEDAQSKAALTDWLRAKASFVIEGLKEADKDEFCRCELKLQKWYGDLRGKPFAIEAENSILDISGFSKQYNCAFIWQKDGVKKLNLYLIINYFKGGKLRFKKIKPEAFEANRFYTVINKKSGEIVPMEVNFNFDDPNLIILPLAFGKRQGREFIWNDLLSLETGSLKLANGRVIEKTLYNRRTRQDEPALFVALTFERREVLDSSNIKPMNLIGVDRGENIPAVIALTDPEGCPLSRFKDSLGNPTHILRIGESYKEKQRTIQAKKEVEQRRAGGYSRKYASKAKNLADDMVRNTARDLLYYAVTQDAMLIFENLSRGFGRQGKRTFMAERQYTRMEDWLTAKLAYEGLPSKTYLSKTLAQYTSKTCSNCGFTITSADYDRVLEKLKKTATGWMTTINGKELKVEGQITYYNRYKRQNVVKDLSVELDRLSEESVNNDISSWTKGRSGEALSLLKKRFSHRPVQEKFVCLNCGFETHADEQAALNIARSWLFLRSQEYKKYQTNKTTGNTDKRAFVETWQSFYRKKLKEVWKPAV

SEQ ID NO: 33049 - protein, 978 aa, synthetic construct
  REGION 1..978: note = engineered CasX variant
QEIKRLSKIRRRLVKDSNTKKAGKTGPMKTLLVRVMTPDLRERLENLRKKPENIPQPISNTSRANLNKLLTDYTEMKKAILHVYWEEFQKDPVGLMSRVAQPASKKIDQNKLKPEMDEKGNLTTAGFACSQCGQPLFVYKLEQVSEKGKAYTNYFGRCNVAEHEKLIKLAQLKPEKDSDEAVTYSLGKFGQRALDFYSIHVTKESTHPVKPLAQIAGNRYASGPVGKALSDACMGTIASFLSKYQDIIIEHQKVVKGNQKRLESLRELAGKENLEYPSVTLPPQPHTKEGVDAYNEVIARVRMWVNLNLWQKLKLSRDDAKPLLRLKGFPSFPLVERQANEVDWWDMVCNVKKLINEKKEDGKVFWQNLAGYKRQEALRPYLSSEEDRKKGKKFARYQLGDLLLHLEKKHGEDWGKVYDEAWERIDKKVEGLSKHIKLEEERRSEDAQSKAALTDWLRAKASFVIEGLKEADKDEFCRCELKLQKWYGDLRGKPFAIEAENSILDISGFSKQYNCAFIWQKDGVKKLNLYLIINYFKGGKLRFKKIKPEAFEANRFYTVINKKSGEIVPMEVNFNFDDPNLIILPLAFGKRQGREFIWNDLLSLETGSLKLANGRVIEKTLYNRRTRQDEPALFVALTFERREVLDSSNIKPMNLIGVDRGENIPAVIALTDPEGCPLSRFKDSLGNPTHILRIGESYKEKQRTIQAKKEVEQRRAGGYSRKYASKAKNLADDMVRNTARDLLYYAVTQDAMLIFENLSRGFGRQGKRTFMAERQYTRMEDWLTAKLAYEGLPSKTYLSKTLAQYTSKTCSNCGFTITSADYDRVLEKLKKTATGWMTTINGKELKVEGQITYYNRYKRQNVVKDLSVELDRLSEESVNNDISSWTKGRSGEALSLLKKRFSHRPVQEKFVCLNCGFETHADEQAALNIARSWLFLRSQEYKKYQTNKTTGNTDKRAFVETWQSFYRKKLKEVWKPAV

SEQ ID NO: 33050 - protein, 977 aa, synthetic construct
  REGION 1..977: note = engineered CasX variant
QEIKRLSKIRRRLVKDSNTKKAGKTGPMKTLLVRVMTPDLRERLENLRKKPENIPQPISNTSRANLNKLLTDYTEMKKAILHVYWEEFQKDPVGLMSRVAQPASKKIDQNKLKPEMDEKGNLTTAGFACSQCGQPLFVYKLEQVSEKGKAYTNYFGRCNVAEHEKLILLAQLKPEKDSDEAVTYSLGKFGQRALDFYSIHVTKESTHPVKPLAQIAGNRYASPVGKALSDACMGTIASFLSKYQDIIIEHQKVVKGNQKRLESLRELAGKENLEYPSVTLPPQPHTKEGVDAYNEVIARVRMWVNLNLWQKLKLSRDDAKPLLRLKGFPSFPLVERQANEVDWWDMVCNVKKLINEKKEDGKVFWQNLAGYKRQEALRPYLSSEEDRKKGKKFARYQLGDLLLHLEKKHGEDWGKVYDEAWERIDKKVEGLSKHIKLEEERRSEDAQSKAALTDWLRAKASFVIEGLKEADKDEFCRCELKLQKWYGDLRGKPFAIEAENSILDISGFSKQYNCAFIWQKDGVKKLNLYLIINYFKGGKLRFKKIKPEAFEANRFYTVINKKSGEIVPMEVNFNFDDPNLIILPLAFGKRQGREFIWNDLLSLETGSLKLANGRVIEKTLYNRRTRQDEPALFVALTFERREVLDSSNIKPMNLIGVDRGENIPAVIALTDPEGCPLSRFKDSLGNPTHILRIGESYKEKQRTIQAKKEVEQRRAGGYSRKYASKAKNLADDMVRNTARDLLYYAVTQDAMLIFENLSRGFGRQGKRTFMAERQYTRMEDWLTAKLAYEGLPSKTYLSKTLAQYTSKTCSNCGFTITSADYDRVLEKLKKTATGWMTTINGKELKVEGQITYYNRYKRQNVVKDLSVELDRLSEESVNNDISSWTKGRSGEALSLLKKRFSHRPVQEKFVCLNCGFETHADEQAALNIARSWLFLRSQEYKKYQTNKTTGNTDKRAFVETWQSFYRKKLKEVWKPAV

SEQ ID NO: 33051 - protein, 978 aa, synthetic construct
  REGION 1..978: note = engineered CasX variant
QEIKRISKIRRRLVKDSNTKKAGKTGPMKTLLVRVMTPDLRERLENLRKKPENIPQPISNTSRANLNKLLTDYTEMKKAILHVYWEEFQKDPVGLMSRVAQPASKKIDQNKLKPEMDEKGNLTTAGFACSQCGQPLFVYKLEQVSEKGKAYTNYVGRCNVAEHEKLILLAQLKPEKDSDEAVTYSLGKFGQRALDFYSIHVTKESTHPVKPLAQIAGNRYASYPVGKALSDACMGTIASFLSKYQDIIIEHQKVVKGNQKRLESLRELAGKENLEYPSVTLPPQPHTKEGVDAYNEVIARVRMWVNLNLWQKLKLSRDDAKPLLRLKGFPSFPLVERQANEVDWWDMVCNVKKLINEKKEDGKVFWQNLAGYKRQEALRPYLSSEEDRKKGKKFARYQLGDLLLHLEKKHGEDWGKVYDEAWERIDKKVEGLSKHIKLEEERRSEDAQSKAALTDWLRAKASFVIEGLKEADKDEFCRCELKLQKWYGDLRGKPFAIEAENSILDISGFSKQYNCAFIWQKDGVKKLNLYLIINYFKGGKLRFKKIKPEAFEANRFYTVINKKSGEIVPMEVNFNFDDPNLIILPLAFGKRQGREFIWNDLLSLETGSLKLANGRVIEKTLYNRRTRQDEPALFVALTFERREVLDSSNIKPMNLIGVDRGENIPAVIALTDPEGCPLSRFKDSLGNPTHILRIGESYKEKQRTIQAKKEVEQRRAGGYSRKYASKAKNLADDMVRNTARDLLYYAVTQDAMLIFENLSRGFGRQGKRTFMAERQYTRMEDWLTAKLAYEGLPSKTYLSKTLAQYTSKTCSNCGFTITSADYDRVLEKLKKTATGWMTTINGKELKVEGQITYYNRYKRQNVVKDLSVELDRLSEESVNNDISSWTKGRSGEALSLLKKRFSHRPVQEKFVCLNCGFETHADEQAALNIARSWLFLRSQEYKKYQTNKTTGNTDKRAFVETWQSFYRKKLKEVWKPAV

SEQ ID NO: 33052 - protein, 978 aa, synthetic construct
  REGION 1..978: note = engineered CasX variant
QEIKRISKIRRRLVKDSNTKKAGKTGPMKTLLVRVMTPDLRERLENLRKKPENIPQPISNTSRANLNKLLTDYTEMKKAILHVYWEEFQKDPVGLMSRVAQPASKKIDQNKLKPEMDEKGNLTTAGFACSQCGQPLFVYKLEQVSEKGKAYTNYVGRCNVAEHEKLILLAQLKPEKDSDEAVTYSLGKFGQRALDFYSIHVTKESTHPVKPLAQIAGNRYASHPVGKALSDACMGTIASFLSKYQDIIIEHQKVVKGNQKRLESLRELAGKENLEYPSVTLPPQPHTKEGVDAYNEVIARVRMWVNLNLWQKLKLSRDDAKPLLRLKGFPSFPLVERQANEVDWWDMVCNVKKLINEKKEDGKVFWQNLAGYKRQEALRPYLSSEEDRKKGKKFARYQLGDLLLHLEKKHGEDWGKVYDEAWERIDKKVEGLSKHIKLEEERRSEDAQSKAALTDWLRAKASFVIEGLKEADKDEFCRCELKLQKWYGDLRGKPFAIEAENSILDISGFSKQYNCAFIWQKDGVKKLNLYLIINYFKGGKLRFKKIKPEAFEANRFYTVINKKSGEIVPMEVNFNFDDPNLIILPLAFGKRQGREFIWNDLLSLETGSLKLANGRVIEKTLYNRRTRQDEPALFVALTFERREVLDSSNIKPMNLIGVDRGENIPAVIALTDPEGCPLSRFKDSLGNPTHILRIGESYKEKQRTIQAKKEVEQRRAGGYSRKYASKAKNLADDMVRNTARDLLYYAVTQDAMLIFENLSRGFGRQGKRTFMAERQYTRMEDWLTAKLAYEGLPSKTYLSKTLAQYTSKTCSNCGFTITSADYDRVLEKLKKTATGWMTTINGKELKVEGQITYYNRYKRQNVVKDLSVELDRLSEESVNNDISSWTKGRSGEALSLLKKRFSHRPVQEKFVCLNCGFETHADEQAALNIARSWLFLRSQEYKKYQTNKTTGNTDKRAFVETWQSFYRKKLKEVWKPAV

SEQ ID NO: 33053 - protein, 978 aa, synthetic construct
  REGION 1..978: note = engineered CasX variant
QEIKRISKIRRRLVKDSNTKKAGKTGPMKTLLVRVMTPDLRERLENLRKKPENIPQPISNTSRANLNKLLTDYTEMKKAILHVYWEEFQKDPVGLMSRVAQPASKKIDQNKLKPEMDEKGNLTTAGFACSQCGQPLFVYKLEQVSEKGKAYTNYVGRCNVAEHEKLILLAQLKPEKDSDEAVTYSLGKFGQRALDFYSIHVTKESTHPVKPLAQIAGNRYASSPVGKALSDACMGTIASFLSKYQDIIIEHQKVVKGNQKRLESLRELAGKENLEYPSVTLPPQPHTKEGVDAYNEVIARVRMWVNLNLWQKLKLSRDDAKPLLRLKGFPSFPLVERQANEVDWWDMVCNVKKLINEKKEDGKVFWQNLAGYKRQEALRPYLSSEEDRKKGKKFARYQLGDLLLHLEKKHGEDWGKVYDEAWERIDKKVEGLSKHIKLEEERRSEDAQSKAALTDWLRAKASFVIEGLKEADKDEFCRCELKLQKWYGDLRGKPFAIEAENSILDISGFSKQYNCAFIWQKDGVKKLNLYLIINYFKGGKLRFKKIKPEAFEANRFYTVINKKSGEIVPMEVNFNFDDPNLIILPLAFGKRQGREFIWNDLLSLETGSLKLANGRVIEKTLYNRRTRQDEPALFVALTFERREVLDSSNIKPMNLIGVDRGENIPAVIALTDPEGCPLSRFKDSLGNPTHILRIGESYKEKQRTIQAKKEVEQRRAGGYSRKYASKAKNLADDMVRNTARDLLYYAVTQDAMLIFENLSRGFGRQGKRTFMAERQYTRMEDWLTAKLAYEGLPSKTYLSKTLAQYTSKTCSNCGFTITSADYDRVLEKLKKTATGWMTTINGKELKVEGQITYYNRYKRQNVVKDLSVELDRLSEESVNNDISSWTKGRSGEALSLLKKRFSHRPVQEKFVCLNCGFETHADEQAALNIARSWLFLRSQEYKKYQTNKTTGNTDKRAFVETWQSFYRKKLKEVWKPAV

SEQ ID NO: 33054 - protein, 978 aa, synthetic construct
  REGION 1..978: note = engineered CasX variant
QEIKRISKIRRRLVKDSNTKKAGKTGPMKTLLVRVMTPDLRERLENLRKKPENIPQPISNTSRANLNKLLTDYTEMKKAILHVYWEEFQKDPVGLMSRVAQPASKKIDQNKLKPEMDEKGNLTTAGFACSQCGQPLFVYKLEQVSEKGKAYTNYVGRCNVAEHEKLILLAQLKPEKDSDEAVTYSLGKFGQRALDFYSIHVTKESTHPVKPLAQIAGNRYASTPVGKALSDACMGTIASFLSKYQDIIIEHQKVVKGNQKRLESLRELAGKENLEYPSVTLPPQPHTKEGVDAYNEVIARVRMWVNLNLWQKLKLSRDDAKPLLRLKGFPSFPLVERQANEVDWWDMVCNVKKLINEKKEDGKVFWQNLAGYKRQEALRPYLSSEEDRKKGKKFARYQLGDLLLHLEKKHGEDWGKVYDEAWERIDKKVEGLSKHIKLEEERRSEDAQSKAALTDWLRAKASFVIEGLKEADKDEFCRCELKLQKWYGDLRGKPFAIEAENSILDISGFSKQYNCAFIWQKDGVKKLNLYLIINYFKGGKLRFKKIKPEAFEANRFYTVINKKSGEIVPMEVNFNFDDPNLIILPLAFGKRQGREFIWNDLLSLETGSLKLANGRVIEKTLYNRRTRQDEPALFVALTFERREVLDSSNIKPMNLIGVDRGENIPAVIALTDPEGCPLSRFKDSLGNPTHILRIGESYKEKQRTIQAKKEVEQRRAGGYSRKYASKAKNLADDMVRNTARDLLYYAVTQDAMLIFENLSRGFGRQGKRTFMAERQYTRMEDWLTAKLAYEGLPSKTYLSKTLAQYTSKTCSNCGFTITSADYDRVLEKLKKTATGWMTTINGKELKVEGQITYYNRYKRQNVVKDLSVELDRLSEESVNNDISSWTKGRSGEALSLLKKRFSHRPVQEKFVCLNCGFETHADEQAALNIARSWLFLRSQEYKKYQTNKTTGNTDKRAFVETWQSFYRKKLKEVWKPAV

SEQ ID NO: 33055 - protein, 978 aa, synthetic construct
  REGION 1..978: note = engineered CasX variant
QEIKRISKIRRRLVKDSNTKKAGKTGPMKTLLVRVMTPDLRERLENLRKKPENIPQPISNTSRANLNKLLTDYTEMKKAILHVYWEEFQKDPVGLMSRVAQPASKKIDQNKLKPEMDEKGNLTTAGFACSQCGQPLFVYKLEQVSEKGKAYTNYVGRCNVAEHEKLILLAQLKPEKDSDEAVTYSLGKFGQRALDFYSIHVTKESTHPVKPLAQIAGNRYASAPVGKALSDACMGTIASFLSKYQDIIIEHQKVVKGNQKRLESLRELAGKENLEYPSVTLPPQPHTKEGVDAYNEVIARVRMWVNLNLWQKLKLSRDDAKPLLRLKGFPSFPLVERQANEVDWWDMVCNVKKLINEKKEDGKVFWQNLAGYKRQEALRPYLSSEEDRKKGKKFARYQLGDLLLHLEKKHGEDWGKVYDEAWERIDKKVEGLSKHIKLEEERRSEDAQSKAALTDWLRAKASFVIEGLKEADKDEFCRCELKLQKWYGDLRGKPFAIEAENSILDISGFSKQYNCAFIWQKDGVKKLNLYLIINYFKGGKLRFKKIKPEAFEANRFYTVINKKSGEIVPMEVNFNFDDPNLIILPLAFGKRQGREFIWNDLLSLETGSLKLANGRVIEKTLYNRRTRQDEPALFVALTFERREVLDSSNIKPMNLIGVDRGENIPAVIALTDPEGCPLSRFKDSLGNPTHILRIGESYKEKQRTIQAKKEVEQRRAGGYSRKYASKAKNLADDMVRNTARDLLYYAVTQDAMLIFENLSRGFGRQGKRTFMAERQYTRMEDWLTAKLAYEGLPSKTYLSKTLAQYTSKTCSNCGFTITSADYDRVLEKLKKTATGWMTTINGKELKVEGQITYYNRYKRQNVVKDLSVELDRLSEESVNNDISSWTKGRSGEALSLLKKRFSHRPVQEKFVCLNCGFETHADEQAALNIARSWLFLRSQEYKKYQTNKTTGNTDKRAFVETWQSFYRKKLKEVWKPAV

SEQ ID NO: 33056 - protein, 978 aa, synthetic construct
  REGION 1..978: note = engineered CasX variant
QEIKRISKIRRRLVKDSNTKKAGKTGPMKTLLVRVMTPDLRERLENLRKKPENIPQPISNTSRANLNKLLTDYTEMKKAILHVYWEEFQKDPVGLMSRVAQPASKKIDQNKLKPEMDEKGNLTTAGFACSQCGQPLFVYKLEQVSEKGKAYTNYVGRCNVAEHEKLILLAQLKPEKDSDEAVTYSLGKFGQRALDFYSIHVTKESTHPVKPLAQIAGNRYASVPVGKALSDACMGTIASFLSKYQDIIIEHQKVVKGNQKRLESLRELAGKENLEYPSVTLPPQPHTKEGVDAYNEVIARVRMWVNLNLWQKLKLSRDDAKPLLRLKGFPSFPLVERQANEVDWWDMVCNVKKLINEKKEDGKVFWQNLAGYKRQEALRPYLSSEEDRKKGKKFARYQLGDLLLHLEKKHGEDWGKVYDEAWERIDKKVEGLSKHIKLEEERRSEDAQSKAALTDWLRAKASFVIEGLKEADKDEFCRCELKLQKWYGDLRGKPFAIEAENSILDISGFSKQYNCAFIWQKDGVKKLNLYLIINYFKGGKLRFKKIKPEAFEANRFYTVINKKSGEIVPMEVNFNFDDPNLIILPLAFGKRQGREFIWNDLLSLETGSLKLANGRVIEKTLYNRRTRQDEPALFVALTFERREVLDSSNIKPMNLIGVDRGENIPAVIALTDPEGCPLSRFKDSLGNPTHILRIGESYKEKQRTIQAKKEVEQRRAGGYSRKYASKAKNLADDMVRNTARDLLYYAVTQDAMLIFENLSRGFGRQGKRTFMAERQYTRMEDWLTAKLAYEGLPSKTYLSKTLAQYTSKTCSNCGFTITSADYDRVLEKLKKTATGWMTTINGKELKVEGQITYYNRYKRQNVVKDLSVELDRLSEESVNNDISSWTKGRSGEALSLLKKRFSHRPVQEKFVCLNCGFETHADEQAALNIARSWLFLRSQEYKKYQTNKTTGNTDKRAFVETWQSFYRKKLKEVWKPAV

SEQ ID NO: 33057 - protein, 978 aa, synthetic construct
  REGION 1..978: note = engineered CasX variant
QEIKRISKIRRRLVKDSNTKKAGKTGPMKTLLVRVMTPDLRERLENLRKKPENIPQPISNTSRANLNKLLTDYTEMKKAILHVYWEEFQKDPVGLMSRVAQPASKKIDQNKLKPEMDEKGNLTTAGFACSQCGQPLFVYKLEQVSEKGKAYTNYVGRCNVAEHEKLIKLAQLKPEKDSDEAVTYSLGKFGQRALDFYSIHVTKESTHPVKPLAQIAGNRYASGPVGKALSDACMGTIASFLSKYQDIIIEHQKVVKGNQKRLESLRELAGKENLEYPSVTLPPQPHTKEGVDAYNEVIARVRMWVNLNLWQKLKLSRDDAKPLLRLKGFPSFPLVERQANEVDWWDMVCNVKKLINEKKEDGKVFWQNLAGYKRQEALRPYLSSEEDRKKGKKFARYQLGDLLLHLEKKHGEDWGKVYDEAWERIDKKVEGLSKHIKLEEERRSEDAQSKAALTDWLRAKASFVIEGLKEADKDEFCRCELKLQKWYGDLRGKPFAIEAENSILDISGFSKQYNCAFIWQKDGVKKLNLYLIINYFKGGKLRFKKIKPEAFEANRFYTVINKKSGEIVPMEVNFNFDDPNLIILPLAFGKRQGREFIWNDLLSLETGSLKLANGRVIEKTLYNRRTRQDEPALFVALTFERREVLDSSNIKPMNLIGVDRGENIPAVIALTDPEGCPLSRFKDSLGNPTHILRIGESYKEKQRTIQAKKEVEQRRAGGYSRKYASKAKNLADDMVRNTARDLLYYAVTQDAMLIFENLSRGFGRQGKRTFMAERQYTRMEDWLTAKLAYEGLPSKTYLSKTLAQYTSKTCSNCGFTITSADYDRVLEKLKKTATGWMTTINGKELKVEGQITYYNRYKRQNVVKDLSVELDRLSEESVNNDISSWTKGRSGEALSLLKKRFSHRPVQEKFVCLNCGFETHADEQAALNIARSWLFLRSQEYKKYQTNKTTGNTDKRAFVETWQSFYRKKLKEVWKPAV

SEQ ID NO: 33058 - protein, 977 aa, synthetic construct
  REGION 1..977: note = engineered CasX variant
QEIKRISKIRRRLVKDSNTKKAGKTGPMKTLLVRVMTPDLRERLENLRKKPENIPQPISNTSRANLNKLLTDYTEMKKAILHVYWEEFQKDPVGLMSRVAQPASKKIDQNKLKPEMDEKGNLTTAGFACSQCGQPLFVYKLEQVSEKGKAYTNYVGRCNVAEHEKLILLAQLKPEKDSDEAVTYSLGKFGQRALDFYSIHVTKESTHPVKPLAQIAGNRYASPVGKALSDACMGTIASFLSKYQDIIIEHQKVVKGNQKRLESLRELAGKENLEYPSVTLPPQPHTKEGVDAYNEVIARVRMWVNLNLWQKLKLSRDDAKPLLRLKGFPSFPLVERQANEVDWWDMVCNVKKLINEKKEDGKVFWQNLAGYKRQEALRPYLSSEEDRKKGKKFARYQLGDLLLHLEKKHGEDWGKVYDEAWERIDKKVEGLSKHIKLEEERRSEDAQSKAALTDWLRAKASFVIEGLKEADKDEFCRCELKLQKWYGDLRGKPFAIEAENSILDISGFSKQYNCAFIWQKDGVKKLNLYLIINYFKGGKLRFKKIKPEAFEANRFYTVINKKSGEIVPMEVNFNFDDPNLIILPLAFGKRQGREFIWNDLLSLETGSLKLANGRVIEKTLYNRRTRQDEPALFVALTFERREVLDSSNIKPMNLIGVDRGENIPAVIALTDPEGCPLSRFKDSLGNPTHILRIGESYKEKQRTIQAKKEVEQRRAGGYSRKYASKAKNLADDMVRNTARDLLYYAVTQDAMLIFENLSRGFGRQGKRTFMAERQYTRMEDWLTAKLAYEGLPSKTYLSKTLAQYTSKTCSNCGFTITSADYDRVLEKLKKTATGWMTTINGKELKVEGQITYYNRYKRQNVVKDLSVELDRLSEESVNNDISSWTKGRSGEALSLLKKRFSHRPVQEKFVCLNCGFETHADEQAALNIARSWLFLRSQEYKKYQTNKTTGNTDKRAFVETWQSFYRKKLKEVWKPAV

SEQ ID NO: 33059 - protein, 978 aa, synthetic construct
  REGION 1..978: note = engineered CasX variant
QEIKRISKIRRRLVKDSNTKKAGKTGPMKTLLVRVMTPDLRERLENLRKKPENIPQPISNTSRANLNKLLTDYTEMKKAILHVYWEEFQKDPVGLMSRVAQPASKKIDQNKLKPEMDEKGNLTTAGFACSQCGQPLFVYKLEQVSEKGKAYTNYFGRCNVAEHEKLILLAQLKPEKDSDEAVTYSLGKFGQRALDFYSIHVTKESTHPVKPLAQIAGNRYASYPVGKALSDACMGTIASFLSKYQDIIIEHQKVVKGNQKRLESLRELAGKENLEYPSVTLPPQPHTKEGVDAYNEVIARVRMWVNLNLWQKLKLSRDDAKPLLRLKGFPSFPLVERQANEVDWWDMVCNVKKLINEKKEDGKVFWQNLAGYKRQEALRPYLSSEEDRKKGKKFARYQLGDLLLHLEKKHGEDWGKVYDEAWERIDKKVEGLSKHIKLEEERRSEDAQSKAALTDWLRAKASFVIEGLKEADKDEFCRCELKLQKWYGDLRGKPFAIEAENSILDISGFSKQYNCAFIWQKDGVKKLNLYLIINYFKGGKLRFKKIKPEAFEANRFYTVINKKSGEIVPMEVNFNFDDPNLIILPLAFGKRQGREFIWNDLLSLETGSLKLANGRVIEKTLYNRRTRQDEPALFVALTFERREVLDSSNIKPMNLIGVDRGENIPAVIALTDPEGCPLSRFKDSLGNPTHILRIGESYKEKQRTIQAKKEVEQRRAGGYSRKYASKAKNLADDMVRNTARDLLYYAVTQDAMLIFENLSRGFGRQGKRTFMAERQYTRMEDWLTAKLAYEGLASKTYLSKTLAQYTSKTCSNCGFTITSADYDRVLEKLKKTATGWMTTINGKELKVEGQITYYNRYKRQNVVKDLSVELDRLSEESVNNDISSWTKGRSGEALSLLKKRFSHRPVQEKFVCLNCGFETHADEQAALNIARSWLFLRSQEYKKYQTNKTTGNTDKRAFVETWQSFYRKKLKEVWKPAV

SEQ ID NO: 33060 - protein, 978 aa, synthetic construct
  REGION 1..978: note = engineered CasX variant
QEIKRISKIRRRLVKDSNTKKAGKTGPMKTLLVRVMTPDLRERLENLRKKPENIPQPISNTSRANLNKLLTDYTEMKKAILHVYWEEFQKDPVGLMSRVAQPASKKIDQNKLKPEMDEKGNLTTAGFACSQCGQPLFVYKLEQVSEKGKAYTNYFGRCNVAEHEKLILLAQLKPEKDSDEAVTYSLGKFGQRALDFYSIHVTKESTHPVKPLAQIAGNRYASHPVGKALSDACMGTIASFLSKYQDIIIEHQKVVKGNQKRLESLRELAGKENLEYPSVTLPPQPHTKEGVDAYNEVIARVRMWVNLNLWQKLKLSRDDAKPLLRLKGFPSFPLVERQANEVDWWDMVCNVKKLINEKKEDGKVFWQNLAGYKRQEALRPYLSSEEDRKKGKKFARYQLGDLLLHLEKKHGEDWGKVYDEAWERIDKKVEGLSKHIKLEEERRSEDAQSKAALTDWLRAKASFVIEGLKEADKDEFCRCELKLQKWYGDLRGKPFAIEAENSILDISGFSKQYNCAFIWQKDGVKKLNLYLIINYFKGGKLRFKKIKPEAFEANRFYTVINKKSGEIVPMEVNFNFDDPNLIILPLAFGKRQGREFIWNDLLSLETGSLKLANGRVIEKTLYNRRTRQDEPALFVALTFERREVLDSSNIKPMNLIGVDRGENIPAVIALTDPEGCPLSRFKDSLGNPTHILRIGESYKEKQRTIQAKKEVEQRRAGGYSRKYASKAKNLADDMVRNTARDLLYYAVTQDAMLIFENLSRGFGRQGKRTFMAERQYTRMEDWLTAKLAYEGLASKTYLSKTLAQYTSKTCSNCGFTITSADYDRVLEKLKKTATGWMTTINGKELKVEGQITYYNRYKRQNVVKDLSVELDRLSEESVNNDISSWTKGRSGEALSLLKKRFSHRPVQEKFVCLNCGFETHADEQAALNIARSWLFLRSQEYKKYQTNKTTGNTDKRAFVETWQSFYRKKLKEVWKPAV

SEQ ID NO: 33061 - protein, 978 aa, synthetic construct
  REGION 1..978: note = engineered CasX variant
QEIKRISKIRRRLVKDSNTKKAGKTGPMKTLLVRVMTPDLRERLENLRKKPENIPQPISNTSRANLNKLLTDYTEMKKAILHVYWEEFQKDPVGLMSRVAQPASKKIDQNKLKPEMDEKGNLTTAGFACSQCGQPLFVYKLEQVSEKGKAYTNYFGRCNVAEHEKLILLAQLKPEKDSDEAVTYSLGKFGQRALDFYSIHVTKESTHPVKPLAQIAGNRYASSPVGKALSDACMGTIASFLSKYQDIIIEHQKVVKGNQKRLESLRELAGKENLEYPSVTLPPQPHTKEGVDAYNEVIARVRMWVNLNLWQKLKLSRDDAKPLLRLKGFPSFPLVERQANEVDWWDMVCNVKKLINEKKEDGKVFWQNLAGYKRQEALRPYLSSEEDRKKGKKFARYQLGDLLLHLEKKHGEDWGKVYDEAWERIDKKVEGLSKHIKLEEERRSEDAQSKAALTDWLRAKASFVIEGLKEADKDEFCRCELKLQKWYGDLRGKPFAIEAENSILDISGFSKQYNCAFIWQKDGVKKLNLYLIINYFKGGKLRFKKIKPEAFEANRFYTVINKKSGEIVPMEVNFNFDDPNLIILPLAFGKRQGREFIWNDLLSLETGSLKLANGRVIEKTLYNRRTRQDEPALFVALTFERREVLDSSNIKPMNLIGVDRGENIPAVIALTDPEGCPLSRFKDSLGNPTHILRIGESYKEKQRTIQAKKEVEQRRAGGYSRKYASKAKNLADDMVRNTARDLLYYAVTQDAMLIFENLSRGFGRQGKRTFMAERQYTRMEDWLTAKLAYEGLASKTYLSKTLAQYTSKTCSNCGFTITSADYDRVLEKLKKTATGWMTTINGKELKVEGQITYYNRYKRQNVVKDLSVELDRLSEESVNNDISSWTKGRSGEALSLLKKRFSHRPVQEKFVCLNCGFETHADEQAALNIARSWLFLRSQEYKKYQTNKTTGNTDKRAFVETWQSFYRKKLKEVWKPAV

SEQ ID NO: 33062 - protein, 978 aa, synthetic construct
  REGION 1..978: note = engineered CasX variant
QEIKRISKIRRRLVKDSNTKKAGKTGPMKTLLVRVMTPDLRERLENLRKKPENIPQPISNTSRANLNKLLTDYTEMKKAILHVYWEEFQKDPVGLMSRVAQPASKKIDQNKLKPEMDEKGNLTTAGFACSQCGQPLFVYKLEQVSEKGKAYTNYFGRCNVAEHEKLILLAQLKPEKDSDEAVTYSLGKFGQRALDFYSIHVTKESTHPVKPLAQIAGNRYASTPVGKALSDACMGTIASFLSKYQDIIIEHQKVVKGNQKRLESLRELAGKENLEYPSVTLPPQPHTKEGVDAYNEVIARVRMWVNLNLWQKLKLSRDDAKPLLRLKGFPSFPLVERQANEVDWWDMVCNVKKLINEKKEDGKVFWQNLAGYKRQEALRPYLSSEEDRKKGKKFARYQLGDLLLHLEKKHGEDWGKVYDEAWERIDKKVEGLSKHIKLEEERRSEDAQSKAALTDWLRAKASFVIEGLKEADKDEFCRCELKLQKWYGDLRGKPFAIEAENSILDISGFSKQYNCAFIWQKDGVKKLNLYLIINYFKGGKLRFKKIKPEAFEANRFYTVINKKSGEIVPMEVNFNFDDPNLIILPLAFGKRQGREFIWNDLLSLETGSLKLANGRVIEKTLYNRRTRQDEPALFVALTFERREVLDSSNIKPMNLIGVDRGENIPAVIALTDPEGCPLSRFKDSLGNPTHILRIGESYKEKQRTIQAKKEVEQRRAGGYSRKYASKAKNLADDMVRNTARDLLYYAVTQDAMLIFENLSRGFGRQGKRTFMAERQYTRMEDWLTAKLAYEGLASKTYLSKTLAQYTSKTCSNCGFTITSADYDRVLEKLKKTATGWMTTINGKELKVEGQITYYNRYKRQNVVKDLSVELDRLSEESVNNDISSWTKGRSGEALSLLKKRFSHRPVQEKFVCLNCGFETHADEQAALNIARSWLFLRSQEYKKYQTNKTTGNTDKRAFVETWQSFYRKKLKEVWKPAV

SEQ ID NO: 33063 - protein, 978 aa, synthetic construct
  REGION 1..978: note = engineered CasX variant
QEIKRISKIRRRLVKDSNTKKAGKTGPMKTLLVRVMTPDLRERLENLRKKPENIPQPISNTSRANLNKLLTDYTEMKKAILHVYWEEFQKDPVGLMSRVAQPASKKIDQNKLKPEMDEKGNLTTAGFACSQCGQPLFVYKLEQVSEKGKAYTNYFGRCNVAEHEKLILLAQLKPEKDSDEAVTYSLGKFGQRALDFYSIHVTKESTHPVKPLAQIAGNRYASAPVGKALSDACMGTIASFLSKYQDIIIEHQKVVKGNQKRLESLRELAGKENLEYPSVTLPPQPHTKEGVDAYNEVIARVRMWVNLNLWQKLKLSRDDAKPLLRLKGFPSFPLVERQANEVDWWDMVCNVKKLINEKKEDGKVFWQNLAGYKRQEALRPYLSSEEDRKKGKKFARYQLGDLLLHLEKKHGEDWGKVYDEAWERIDKKVEGLSKHIKLEEERRSEDAQSKAALTDWLRAKASFVIEGLKEADKDEFCRCELKLQKWYGDLRGKPFAIEAENSILDISGFSKQYNCAFIWQKDGVKKLNLYLIINYFKGGKLRFKKIKPEAFEANRFYTVINKKSGEIVPMEVNFNFDDPNLIILPLAFGKRQGREFIWNDLLSLETGSLKLANGRVIEKTLYNRRTRQDEPALFVALTFERREVLDSSNIKPMNLIGVDRGENIPAVIALTDPEGCPLSRFKDSLGNPTHILRIGESYKEKQRTIQAKKEVEQRRAGGYSRKYASKAKNLADDMVRNTARDLLYYAVTQDAMLIFENLSRGFGRQGKRTFMAERQYTRMEDWLTAKLAYEGLASKTYLSKTLAQYTSKTCSNCGFTITSADYDRVLEKLKKTATGWMTTINGKELKVEGQITYYNRYKRQNVVKDLSVELDRLSEESVNNDISSWTKGRSGEALSLLKKRFSHRPVQEKFVCLNCGFETHADEQAALNIARSWLFLRSQEYKKYQTNKTTGNTDKRAFVETWQSFYRKKLKEVWKPAV

SEQ ID NO: 33064 - protein, 978 aa, synthetic construct
  REGION 1..978: note = engineered CasX variant
QEIKRISKIRRRLVKDSNTKKAGKTGPMKTLLVRVMTPDLRERLENLRKKPENIPQPISNTSRANLNKLLTDYTEMKKAILHVYWEEFQKDPVGLMSRVAQPASKKIDQNKLKPEMDEKGNLTTAGFACSQCGQPLFVYKLEQVSEKGKAYTNYFGRCNVAEHEKLILLAQLKPEKDSDEAVTYSLGKFGQRALDFYSIHVTKESTHPVKPLAQIAGNRYASVPVGKALSDACMGTIASFLSKYQDIIIEHQKVVKGNQKRLESLRELAGKENLEYPSVTLPPQPHTKEGVDAYNEVIARVRMWVNLNLWQKLKLSRDDAKPLLRLKGFPSFPLVERQANEVDWWDMVCNVKKLINEKKEDGKVFWQNLAGYKRQEALRPYLSSEEDRKKGKKFARYQLGDLLLHLEKKHGEDWGKVYDEAWERIDKKVEGLSKHIKLEEERRSEDAQSKAALTDWLRAKASFVIEGLKEADKDEFCRCELKLQKWYGDLRGKPFAIEAENSILDISGFSKQYNCAFIWQKDGVKKLNLYLIINYFKGGKLRFKKIKPEAFEANRFYTVINKKSGEIVPMEVNFNFDDPNLIILPLAFGKRQGREFIWNDLLSLETGSLKLANGRVIEKTLYNRRTRQDEPALFVALTFERREVLDSSNIKPMNLIGVDRGENIPAVIALTDPEGCPLSRFKDSLGNPTHILRIGESYKEKQRTIQAKKEVEQRRAGGYSRKYASKAKNLADDMVRNTARDLLYYAVTQDAMLIFENLSRGFGRQGKRTFMAERQYTRMEDWLTAKLAYEGLASKTYLSKTLAQYTSKTCSNCGFTITSADYDRVLEKLKKTATGWMTTINGKELKVEGQITYYNRYKRQNVVKDLSVELDRLSEESVNNDISSWTKGRSGEALSLLKKRFSHRPVQEKFVCLNCGFETHADEQAALNIARSWLFLRSQEYKKYQTNKTTGNTDKRAFVETWQSFYRKKLKEVWKPAV

SEQ ID NO: 33065 - protein, 978 aa, synthetic construct
  REGION 1..978: note = engineered CasX variant
QEIKRISKIRRRLVKDSNTKKAGKTGPMKTLLVRVMTPDLRERLENLRKKPENIPQPISNTSRANLNKLLTDYTEMKKAILHVYWEEFQKDPVGLMSRVAQPASKKIDQNKLKPEMDEKGNLTTAGFACSQCGQPLFVYKLEQVSEKGKAYTNYFGRCNVAEHEKLIKLAQLKPEKDSDEAVTYSLGKFGQRALDFYSIHVTKESTHPVKPLAQIAGNRYASGPVGKALSDACMGTIASFLSKYQDIIIEHQKVVKGNQKRLESLRELAGKENLEYPSVTLPPQPHTKEGVDAYNEVIARVRMWVNLNLWQKLKLSRDDAKPLLRLKGFPSFPLVERQANEVDWWDMVCNVKKLINEKKEDGKVFWQNLAGYKRQEALRPYLSSEEDRKKGKKFARYQLGDLLLHLEKKHGEDWGKVYDEAWERIDKKVEGLSKHIKLEEERRSEDAQSKAALTDWLRAKASFVIEGLKEADKDEFCRCELKLQKWYGDLRGKPFAIEAENSILDISGFSKQYNCAFIWQKDGVKKLNLYLIINYFKGGKLRFKKIKPEAFEANRFYTVINKKSGEIVPMEVNFNFDDPNLIILPLAFGKRQGREFIWNDLLSLETGSLKLANGRVIEKTLYNRRTRQDEPALFVALTFERREVLDSSNIKPMNLIGVDRGENIPAVIALTDPEGCPLSRFKDSLGNPTHILRIGESYKEKQRTIQAKKEVEQRRAGGYSRKYASKAKNLADDMVRNTARDLLYYAVTQDAMLIFENLSRGFGRQGKRTFMAERQYTRMEDWLTAKLAYEGLASKTYLSKTLAQYTSKTCSNCGFTITSADYDRVLEKLKKTATGWMTTINGKELKVEGQITYYNRYKRQNVVKDLSVELDRLSEESVNNDISSWTKGRSGEALSLLKKRFSHRPVQEKFVCLNCGFETHADEQAALNIARSWLFLRSQEYKKYQTNKTTGNTDKRAFVETWQSFYRKKLKEVWKPAV

SEQ ID NO: 33066 - protein, 977 aa, synthetic construct
  REGION 1..977: note = engineered CasX variant
QEIKRISKIRRRLVKDSNTKKAGKTGPMKTLLVRVMTPDLRERLENLRKKPENIPQPISNTSRANLNKLLTDYTEMKKAILHVYWEEFQKDPVGLMSRVAQPASKKIDQNKLKPEMDEKGNLTTAGFACSQCGQPLFVYKLEQVSEKGKAYTNYFGRCNVAEHEKLILLAQLKPEKDSDEAVTYSLGKFGQRALDFYSIHVTKESTHPVKPLAQIAGNRYASPVGKALSDACMGTIASFLSKYQDIIIEHQKVVKGNQKRLESLRELAGKENLEYPSVTLPPQPHTKEGVDAYNEVIARVRMWVNLNLWQKLKLSRDDAKPLLRLKGFPSFPLVERQANEVDWWDMVCNVKKLINEKKEDGKVFWQNLAGYKRQEALRPYLSSEEDRKKGKKFARYQLGDLLLHLEKKHGEDWGKVYDEAWERIDKKVEGLSKHIKLEEERRSEDAQSKAALTDWLRAKASFVIEGLKEADKDEFCRCELKLQKWYGDLRGKPFAIEAENSILDISGFSKQYNCAFIWQKDGVKKLNLYLIINYFKGGKLRFKKIKPEAFEANRFYTVINKKSGEIVPMEVNFNFDDPNLIILPLAFGKRQGREFIWNDLLSLETGSLKLANGRVIEKTLYNRRTRQDEPALFVALTFERREVLDSSNIKPMNLIGVDRGENIPAVIALTDPEGCPLSRFKDSLGNPTHILRIGESYKEKQRTIQAKKEVEQRRAGGYSRKYASKAKNLADDMVRNTARDLLYYAVTQDAMLIFENLSRGFGRQGKRTFMAERQYTRMEDWLTAKLAYEGLASKTYLSKTLAQYTSKTCSNCGFTITSADYDRVLEKLKKTATGWMTTINGKELKVEGQITYYNRYKRQNVVKDLSVELDRLSEESVNNDISSWTKGRSGEALSLLKKRFSHRPVQEKFVCLNCGFETHADEQAALNIARSWLFLRSQEYKKYQTNKTTGNTDKRAFVETWQSFYRKKLKEVWKPAV

SEQ ID NO: 33067 - protein, 978 aa, synthetic construct
  REGION 1..978: note = engineered CasX variant
QEIKRISKIRRRLVKDSNTKKAGKTGPMKTLLVRVMTPDLRERLENLRKKPENIPQPISNTSRANLNKLLTDYTEMKKAILHVYWEEFQKDPVGLMSRVAQPASKKIDQNKLKPEMDEKGNLTTAGFACSQCGQPLFVYKLEQVSEKGKAYTNYFGRCNVAEHEKLILLAQLKPEKDSDEAVTYSLGKFGQRALDFYSIHVTKESTHPVKPLAQIAGNRYASYPVGKALSDACMGTIASFLSKYQDIIIEHQKVVKGNQKRLESLRELAGKENLEYPSVTLPPQPHTKEGVDAYNEVIARVRMWVNLNLWQKLKLSRDDAKPLLRLKGFPSFPLVERQANEVDWWDMVCNVKKLINEKKEDGKVFWQNLAGYKRQEALRPYLSSEEDRKKGKKFARYQLGDLLLHLEKKHGEDWGKVYDEAWERIDKKVEGLSKHIKLEEERRSEDAQSKAALTDWLRAKASFVIEGLKEADKDEFCRCELKLQKWYGDLRGKPFAIEAENSILDISGFSKQYNCAFIWQKDGVKKLNLYLIINYFKGGKLRFKKIKPEAFEANRFYTVINKKSGEIVPMEVNFNFDDPNLIILPLAFGKRQGREFIWNDLLSLETGSLKLANGRVIEKTLYNRRTRQDEPALFVALTFERREVLDSSNIKPMNLIGVDRGENIPAVIALTDPEGCPLSRFKDSLGNPTHILRIGESYKEKQRTIQAKKEVEQRRAGGYSRKYASKAKNLADDMVRNTARDLLYYAVTQDAMLIFENLSRGFGRQGKRTFMAERQYTRMEDWLTAKLAYEGLPSKVYLSKTLAQYTSKTCSNCGFTITSADYDRVLEKLKKTATGWMTTINGKELKVEGQITYYNRYKRQNVVKDLSVELDRLSEESVNNDISSWTKGRSGEALSLLKKRFSHRPVQEKFVCLNCGFETHADEQAALNIARSWLFLRSQEYKKYQTNKTTGNTDKRAFVETWQSFYRKKLKEVWKPAV

SEQ ID NO: 33068 - protein, 978 aa, synthetic construct
  REGION 1..978: note = engineered CasX variant
QEIKRISKIRRRLVKDSNTKKAGKTGPMKTLLVRVMTPDLRERLENLRKKPENIPQPISNTSRANLNKLLTDYTEMKKAILHVYWEEFQKDPVGLMSRVAQPASKKIDQNKLKPEMDEKGNLTTAGFACSQCGQPLFVYKLEQVSEKGKAYTNYFGRCNVAEHEKLILLAQLKPEKDSDEAVTYSLGKFGQRALDFYSIHVTKESTHPVKPLAQIAGNRYASHPVGKALSDACMGTIASFLSKYQDIIIEHQKVVKGNQKRLESLRELAGKENLEYPSVTLPPQPHTKEGVDAYNEVIARVRMWVNLNLWQKLKLSRDDAKPLLRLKGFPSFPLVERQANEVDWWDMVCNVKKLINEKKEDGKVFWQNLAGYKRQEALRPYLSSEEDRKKGKKFARYQLGDLLLHLEKKHGEDWGKVYDEAWERIDKKVEGLSKHIKLEEERRSEDAQSKAALTDWLRAKASFVIEGLKEADKDEFCRCELKLQKWYGDLRGKPFAIEAENSILDISGFSKQYNCAFIWQKDGVKKLNLYLIINYFKGGKLRFKKIKPEAFEANRFYTVINKKSGEIVPMEVNFNFDDPNLIILPLAFGKRQGREFIWNDLLSLETGSLKLANGRVIEKTLYNRRTRQDEPALFVALTFERREVLDSSNIKPMNLIGVDRGENIPAVIALTDPEGCPLSRFKDSLGNPTHILRIGESYKEKQRTIQAKKEVEQRRAGGYSRKYASKAKNLADDMVRNTARDLLYYAVTQDAMLIFENLSRGFGRQGKRTFMAERQYTRMEDWLTAKLAYEGLPSKVYLSKTLAQYTSKTCSNCGFTITSADYDRVLEKLKKTATGWMTTINGKELKVEGQITYYNRYKRQNVVKDLSVELDRLSEESVNNDISSWTKGRSGEALSLLKKRFSHRPVQEKFVCLNCGFETHADEQAALNIARSWLFLRSQEYKKYQTNKTTGNTDKRAFVETWQSFYRKKLKEVWKPAV

SEQ ID NO: 33069 - protein, 978 aa, synthetic construct
  REGION 1..978: note = engineered CasX variant
QEIKRISKIRRRLVKDSNTKKAGKTGPMKTLLVRVMTPDLRERLENLRKKPENIPQPISNTSRANLNKLLTDYTEMKKAILHVYWEEFQKDPVGLMSRVAQPASKKIDQNKLKPEMDEKGNLTTAGFACSQCGQPLFVYKLEQVSEKGKAYTNYFGRCNVAEHEKLILLAQLKPEKDSDEAVTYSLGKFGQRALDFYSIHVTKESTHPVKPLAQIAGNRYASSPVGKALSDACMGTIASFLSKYQDIIIEHQKVVKGNQKRLESLRELAGKENLEYPSVTLPPQPHTKEGVDAYNEVIARVRMWVNLNLWQKLKLSRDDAKPLLRLKGFPSFPLVERQANEVDWWDMVCNVKKLINEKKEDGKVFWQNLAGYKRQEALRPYLSSEEDRKKGKKFARYQLGDLLLHLEKKHGEDWGKVYDEAWERIDKKVEGLSKHIKLEEERRSEDAQSKAALTDWLRAKASFVIEGLKEADKDEFCRCELKLQKWYGDLRGKPFAIEAENSILDISGFSKQYNCAFIWQKDGVKKLNLYLIINYFKGGKLRFKKIKPEAFEANRFYTVINKKSGEIVPMEVNFNFDDPNLIILPLAFGKRQGREFIWNDLLSLETGSLKLANGRVIEKTLYNRRTRQDEPALFVALTFERREVLDSSNIKPMNLIGVDRGENIPAVIALTDPEGCPLSRFKDSLGNPTHILRIGESYKEKQRTIQAKKEVEQRRAGGYSRKYASKAKNLADDMVRNTARDLLYYAVTQDAMLIFENLSRGFGRQGKRTFMAERQYTRMEDWLTAKLAYEGLPSKVYLSKTLAQYTSKTCSNCGFTITSADYDRVLEKLKKTATGWMTTINGKELKVEGQITYYNRYKRQNVVKDLSVELDRLSEESVNNDISSWTKGRSGEALSLLKKRFSHRPVQEKFVCLNCGFETHADEQAALNIARSWLFLRSQEYKKYQTNKTTGNTDKRAFVETWQSFYRKKLKEVWKPAV

SEQ ID NO: 33070 - protein, 978 aa, synthetic construct
  REGION 1..978: note = engineered CasX variant
QEIKRISKIRRRLVKDSNTKKAGKTGPMKTLLVRVMTPDLRERLENLRKKPENIPQPISNTSRANLNKLLTDYTEMKKAILHVYWEEFQKDPVGLMSRVAQPASKKIDQNKLKPEMDEKGNLTTAGFACSQCGQPLFVYKLEQVSEKGKAYTNYFGRCNVAEHEKLILLAQLKPEKDSDEAVTYSLGKFGQRALDFYSIHVTKESTHPVKPLAQIAGNRYASTPVGKALSDACMGTIASFLSKYQDIIIEHQKVVKGNQKRLESLRELAGKENLEYPSVTLPPQPHTKEGVDAYNEVIARVRMWVNLNLWQKLKLSRDDAKPLLRLKGFPSFPLVERQANEVDWWDMVCNVKKLINEKKEDGKVFWQNLAGYKRQEALRPYLSSEEDRKKGKKFARYQLGDLLLHLEKKHGEDWGKVYDEAWERIDKKVEGLSKHIKLEEERRSEDAQSKAALTDWLRAKASFVIEGLKEADKDEFCRCELKLQKWYGDLRGKPFAIEAENSILDISGFSKQYNCAFIWQKDGVKKLNLYLIINYFKGGKLRFKKIKPEAFEANRFYTVINKKSGEIVPMEVNFNFDDPNLIILPLAFGKRQGREFIWNDLLSLETGSLKLANGRVIEKTLYNRRTRQDEPALFVALTFERREVLDSSNIKPMNLIGVDRGENIPAVIALTDPEGCPLSRFKDSLGNPTHILRIGESYKEKQRTIQAKKEVEQRRAGGYSRKYASKAKNLADDMVRNTARDLLYYAVTQDAMLIFENLSRGFGRQGKRTFMAERQYTRMEDWLTAKLAYEGLPSKVYLSKTLAQYTSKTCSNCGFTITSADYDRVLEKLKKTATGWMTTINGKELKVEGQITYYNRYKRQNVVKDLSVELDRLSEESVNNDISSWTKGRSGEALSLLKKRFSHRPVQEKFVCLNCGFETHADEQAALNIARSWLFLRSQEYKKYQTNKTTGNTDKRAFVETWQSFYRKKLKEVWKPAV

SEQ ID NO: 33071 - protein, 978 aa, synthetic construct
  REGION 1..978: note = engineered CasX variant
QEIKRISKIRRRLVKDSNTKKAGKTGPMKTLLVRVMTPDLRERLENLRKKPENIPQPISNTSRANLNKLLTDYTEMKKAILHVYWEEFQKDPVGLMSRVAQPASKKIDQNKLKPEMDEKGNLTTAGFACSQCGQPLFVYKLEQVSEKGKAYTNYFGRCNVAEHEKLILLAQLKPEKDSDEAVTYSLGKFGQRALDFYSIHVTKESTHPVKPLAQIAGNRYASAPVGKALSDACMGTIASFLSKYQDIIIEHQKVVKGNQKRLESLRELAGKENLEYPSVTLPPQPHTKEGVDAYNEVIARVRMWVNLNLWQKLKLSRDDAKPLLRLKGFPSFPLVERQANEVDWWDMVCNVKKLINEKKEDGKVFWQNLAGYKRQEALRPYLSSEEDRKKGKKFARYQLGDLLLHLEKKHGEDWGKVYDEAWERIDKKVEGLSKHIKLEEERRSEDAQSKAALTDWLRAKASFVIEGLKEADKDEFCRCELKLQKWYGDLRGKPFAIEAENSILDISGFSKQYNCAFIWQKDGVKKLNLYLIINYFKGGKLRFKKIKPEAFEANRFYTVINKKSGEIVPMEVNFNFDDPNLIILPLAFGKRQGREFIWNDLLSLETGSLKLANGRVIEKTLYNRRTRQDEPALFVALTFERREVLDSSNIKPMNLIGVDRGENIPAVIALTDPEGCPLSRFKDSLGNPTHILRIGESYKEKQRTIQAKKEVEQRRAGGYSRKYASKAKNLADDMVRNTARDLLYYAVTQDAMLIFENLSRGFGRQGKRTFMAERQYTRMEDWLTAKLAYEGLPSKVYLSKTLAQYTSKTCSNCGFTITSADYDRVLEKLKKTATGWMTTINGKELKVEGQITYYNRYKRQNVVKDLSVELDRLSEESVNNDISSWTKGRSGEALSLLKKRFSHRPVQEKFVCLNCGFETHADEQAALNIARSWLFLRSQEYKKYQTNKTTGNTDKRAFVETWQSFYRKKLKEVWKPAV

SEQ ID NO: 33072 - protein, 978 aa, synthetic construct
  REGION 1..978: note = engineered CasX variant
QEIKRISKIRRRLVKDSNTKKAGKTGPMKTLLVRVMTPDLRERLENLRKKPENIPQPISNTSRANLNKLLTDYTEMKKAILHVYWEEFQKDPVGLMSRVAQPASKKIDQNKLKPEMDEKGNLTTAGFACSQCGQPLFVYKLEQVSEKGKAYTNYFGRCNVAEHEKLILLAQLKPEKDSDEAVTYSLGKFGQRALDFYSIHVTKESTHPVKPLAQIAGNRYASVPVGKALSDACMGTIASFLSKYQDIIIEHQKVVKGNQKRLESLRELAGKENLEYPSVTLPPQPHTKEGVDAYNEVIARVRMWVNLNLWQKLKLSRDDAKPLLRLKGFPSFPLVERQANEVDWWDMVCNVKKLINEKKEDGKVFWQNLAGYKRQEALRPYLSSEEDRKKGKKFARYQLGDLLLHLEKKHGEDWGKVYDEAWERIDKKVEGLSKHIKLEEERRSEDAQSKAALTDWLRAKASFVIEGLKEADKDEFCRCELKLQKWYGDLRGKPFAIEAENSILDISGFSKQYNCAFIWQKDGVKKLNLYLIINYFKGGKLRFKKIKPEAFEANRFYTVINKKSGEIVPMEVNFNFDDPNLIILPLAFGKRQGREFIWNDLLSLETGSLKLANGRVIEKTLYNRRTRQDEPALFVALTFERREVLDSSNIKPMNLIGVDRGENIPAVIALTDPEGCPLSRFKDSLGNPTHILRIGESYKEKQRTIQAKKEVEQRRAGGYSRKYASKAKNLADDMVRNTARDLLYYAVTQDAMLIFENLSRGFGRQGKRTFMAERQYTRMEDWLTAKLAYEGLPSKVYLSKTLAQYTSKTCSNCGFTITSADYDRVLEKLKKTATGWMTTINGKELKVEGQITYYNRYKRQNVVKDLSVELDRLSEESVNNDISSWTKGRSGEALSLLKKRFSHRPVQEKFVCLNCGFETHADEQAALNIARSWLFLRSQEYKKYQTNKTTGNTDKRAFVETWQSFYRKKLKEVWKPAV

SEQ ID NO: 33073 - protein, 978 aa, synthetic construct
  REGION 1..978: note = engineered CasX variant
QEIKRISKIRRRLVKDSNTKKAGKTGPMKTLLVRVMTPDLRERLENLRKKPENIPQPISNTSRANLNKLLTDYTEMKKAILHVYWEEFQKDPVGLMSRVAQPASKKIDQNKLKPEMDEKGNLTTAGFACSQCGQPLFVYKLEQVSEKGKAYTNYFGRCNVAEHEKLIKLAQLKPEKDSDEAVTYSLGKFGQRALDFYSIHVTKESTHPVKPLAQIAGNRYASGPVGKALSDACMGTIASFLSKYQDIIIEHQKVVKGNQKRLESLRELAGKENLEYPSVTLPPQPHTKEGVDAYNEVIARVRMWVNLNLWQKLKLSRDDAKPLLRLKGFPSFPLVERQANEVDWWDMVCNVKKLINEKKEDGKVFWQNLAGYKRQEALRPYLSSEEDRKKGKKFARYQLGDLLLHLEKKHGEDWGKVYDEAWERIDKKVEGLSKHIKLEEERRSEDAQSKAALTDWLRAKASFVIEGLKEADKDEFCRCELKLQKWYGDLRGKPFAIEAENSILDISGFSKQYNCAFIWQKDGVKKLNLYLIINYFKGGKLRFKKIKPEAFEANRFYTVINKKSGEIVPMEVNFNFDDPNLIILPLAFGKRQGREFIWNDLLSLETGSLKLANGRVIEKTLYNRRTRQDEPALFVALTFERREVLDSSNIKPMNLIGVDRGENIPAVIALTDPEGCPLSRFKDSLGNPTHILRIGESYKEKQRTIQAKKEVEQRRAGGYSRKYASKAKNLADDMVRNTARDLLYYAVTQDAMLIFENLSRGFGRQGKRTFMAERQYTRMEDWLTAKLAYEGLPSKVYLSKTLAQYTSKTCSNCGFTITSADYDRVLEKLKKTATGWMTTINGKELKVEGQITYYNRYKRQNVVKDLSVELDRLSEESVNNDISSWTKGRSGEALSLLKKRFSHRPVQEKFVCLNCGFETHADEQAALNIARSWLFLRSQEYKKYQTNKTTGNTDKRAFVETWQSFYRKKLKEVWKPAV

SEQ ID NO: 33074 - protein, 977 aa, synthetic construct
  REGION 1..977: note = engineered CasX variant
QEIKRISKIRRRLVKDSNTKKAGKTGPMKTLLVRVMTPDLRERLENLRKKPENIPQPISNTSRANLNKLLTDYTEMKKAILHVYWEEFQKDPVGLMSRVAQPASKKIDQNKLKPEMDEKGNLTTAGFACSQCGQPLFVYKLEQVSEKGKAYTNYFGRCNVAEHEKLILLAQLKPEKDSDEAVTYSLGKFGQRALDFYSIHVTKESTHPVKPLAQIAGNRYASPVGKALSDACMGTIASFLSKYQDIIIEHQKVVKGNQKRLESLRELAGKENLEYPSVTLPPQPHTKEGVDAYNEVIARVRMWVNLNLWQKLKLSRDDAKPLLRLKGFPSFPLVERQANEVDWWDMVCNVKKLINEKKEDGKVFWQNLAGYKRQEALRPYLSSEEDRKKGKKFARYQLGDLLLHLEKKHGEDWGKVYDEAWERIDKKVEGLSKHIKLEEERRSEDAQSKAALTDWLRAKASFVIEGLKEADKDEFCRCELKLQKWYGDLRGKPFAIEAENSILDISGFSKQYNCAFIWQKDGVKKLNLYLIINYFKGGKLRFKKIKPEAFEANRFYTVINKKSGEIVPMEVNFNFDDPNLIILPLAFGKRQGREFIWNDLLSLETGSLKLANGRVIEKTLYNRRTRQDEPALFVALTFERREVLDSSNIKPMNLIGVDRGENIPAVIALTDPEGCPLSRFKDSLGNPTHILRIGESYKEKQRTIQAKKEVEQRRAGGYSRKYASKAKNLADDMVRNTARDLLYYAVTQDAMLIFENLSRGFGRQGKRTFMAERQYTRMEDWLTAKLAYEGLPSKVYLSKTLAQYTSKTCSNCGFTITSADYDRVLEKLKKTATGWMTTINGKELKVEGQITYYNRYKRQNVVKDLSVELDRLSEESVNNDISSWTKGRSGEALSLLKKRFSHRPVQEKFVCLNCGFETHADEQAALNIARSWLFLRSQEYKKYQTNKTTGNTDKRAFVETWQSFYRKKLKEVWKPAV

SEQ ID NO: 33075 - protein, 979 aa, synthetic construct
  REGION 1..979: note = engineered CasX variant
QEIKRISKIRRRLVKDSNTKKAGKTGPMKTLLVRVMTPDLRERLENLRKKPENIPQPISNTSRANLNKLLTDYTEMKKAILHVYWEEFQKDPVGLMSRVAQPASKKIDQNKLKPEMDEKGNLTTAGFACSQCGQPLFVYKLEQVSEKGKAYTNYFGRCNVAEHEKLILLAQLKPEKDSDEAVTYSLGKFGQRALDFYSIHVTKESTHPVKPLAQIAGNRYASYPVGKALSDACMGTIASFLSKYQDIIIEHQKVVKGNQKRLESLRELAGKENLEYPSVTLPPQPHTKEGVDAYNEVIARVRMWVNLNLWQKLKLSRDDAKPLLRLKGFPSFPLVERQANEVDWWDMVCNVKKLINEKKEDGKVFWQNLAGYKRQEALRPYLSSEEDRKKGKKFARYQLGDLLLHLEKKHGEDWGKVYDEAWERIDKKVEGLSKHIKLEEERRSEDAQSKAALTDWLRAKASFVIEGLKEADKDEFCRCELKLQKWYGDLRGKPFAIEAENSILDISGFSKQYNCAFIWQKDGVKKLNLYLIINYFKGGKLRFKKIKPEAFEANRFYTVINKKSGEIVPMEVNFNFDDPNLIILPLAFGKRQGREFIWNDLLSLETGSLKLANGRVIEKTLYNRRTRQDEPALFVALTFERREVLDSSNIKPMNLIGVDRGENIPAVIALTDPEGCPLSRFKDSLGNPTHILRIGESYKEKQRTIQAKKEVEQRRAGGYSRKYASKAKNLADDMVRNTARDLLYYAVTQDAMLIFENLSRGFGRQGKRTFMAERQYTRMEDWLTAKLAYEGPLPSKTYLSKTLAQYTSKTCSNCGFTITSADYDRVLEKLKKTATGWMTTINGKELKVEGQITYYNRYKRQNVVKDLSVELDRLSEESVNNDISSWTKGRSGEALSLLKKRFSHRPVQEKFVCLNCGFETHADEQAALNIARSWLFLRSQEYKKYQTNKTTGNTDKRAFVETWQSFYRKKLKEVWKPAV

SEQ ID NO: 33076 - protein, 979 aa, synthetic construct
  REGION 1..979: note = engineered CasX variant
QEIKRISKIRRRLVKDSNTKKAGKTGPMKTLLVRVMTPDLRERLENLRKKPENIPQPISNTSRANLNKLLTDYTEMKKAILHVYWEEFQKDPVGLMSRVAQPASKKIDQNKLKPEMDEKGNLTTAGFACSQCGQPLFVYKLEQVSEKGKAYTNYFGRCNVAEHEKLILLAQLKPEKDSDEAVTYSLGKFGQRALDFYSIHVTKESTHPVKPLAQIAGNRYASHPVGKALSDACMGTIASFLSKYQDIIIEHQKVVKGNQKRLESLRELAGKENLEYPSVTLPPQPHTKEGVDAYNEVIARVRMWVNLNLWQKLKLSRDDAKPLLRLKGFPSFPLVERQANEVDWWDMVCNVKKLINEKKEDGKVFWQNLAGYKRQEALRPYLSSEEDRKKGKKFARYQLGDLLLHLEKKHGEDWGKVYDEAWERIDKKVEGLSKHIKLEEERRSEDAQSKAALTDWLRAKASFVIEGLKEADKDEFCRCELKLQKWYGDLRGKPFAIEAENSILDISGFSKQYNCAFIWQKDGVKKLNLYLIINYFKGGKLRFKKIKPEAFEANRFYTVINKKSGEIVPMEVNFNFDDPNLIILPLAFGKRQGREFIWNDLLSLETGSLKLANGRVIEKTLYNRRTRQDEPALFVALTFERREVLDSSNIKPMNLIGVDRGENIPAVIALTDPEGCPLSRFKDSLGNPTHILRIGESYKEKQRTIQAKKEVEQRRAGGYSRKYASKAKNLADDMVRNTARDLLYYAVTQDAMLIFENLSRGFGRQGKRTFMAERQYTRMEDWLTAKLAYEGPLPSKTYLSKTLAQYTSKTCSNCGFTITSADYDRVLEKLKKTATGWMTTINGKELKVEGQITYYNRYKRQNVVKDLSVELDRLSEESVNNDISSWTKGRSGEALSLLKKRFSHRPVQEKFVCLNCGFETHADEQAALNIARSWLFLRSQEYKKYQTNKTTGNTDKRAFVETWQSFYRKKLKEVWKPAV

SEQ ID NO: 33077 - protein, 979 aa, synthetic construct
  REGION 1..979: note = engineered CasX variant
QEIKRISKIRRRLVKDSNTKKAGKTGPMKTLLVRVMTPDLRERLENLRKKPENIPQPISNTSRANLNKLLTDYTEMKKAILHVYWEEFQKDPVGLMSRVAQPASKKIDQNKLKPEMDEKGNLTTAGFACSQCGQPLFVYKLEQVSEKGKAYTNYFGRCNVAEHEKLILLAQLKPEKDSDEAVTYSLGKFGQRALDFYSIHVTKESTHPVKPLAQIAGNRYASSPVGKALSDACMGTIASFLSKYQDIIIEHQKVVKGNQKRLESLRELAGKENLEYPSVTLPPQPHTKEGVDAYNEVIARVRMWVNLNLWQKLKLSRDDAKPLLRLKGFPSFPLVERQANEVDWWDMVCNVKKLINEKKEDGKVFWQNLAGYKRQEALRPYLSSEEDRKKGKKFARYQLGDLLLHLEKKHGEDWGKVYDEAWERIDKKVEGLSKHIKLEEERRSEDAQSKAALTDWLRAKASFVIEGLKEADKDEFCRCELKLQKWYGDLRGKPFAIEAENSILDISGFSKQYNCAFIWQKDGVKKLNLYLIINYFKGGKLRFKKIKPEAFEANRFYTVINKKSGEIVPMEVNFNFDDPNLIILPLAFGKRQGREFIWNDLLSLETGSLKLANGRVIEKTLYNRRTRQDEPALFVALTFERREVLDSSNIKPMNLIGVDRGENIPAVIALTDPEGCPLSRFKDSLGNPTHILRIGESYKEKQRTIQAKKEVEQRRAGGYSRKYASKAKNLADDMVRNTARDLLYYAVTQDAMLIFENLSRGFGRQGKRTFMAERQYTRMEDWLTAKLAYEGPLPSKTYLSKTLAQYTSKTCSNCGFTITSADYDRVLEKLKKTATGWMTTINGKELKVEGQITYYNRYKRQNVVKDLSVELDRLSEESVNNDISSWTKGRSGEALSLLKKRFSHRPVQEKFVCLNCGFETHADEQAALNIARSWLFLRSQEYKKYQTNKTTGNTDKRAFVETWQSFYRKKLKEVWKPAV

SEQ ID NO: 33078 - protein, 979 aa, synthetic construct
  REGION 1..979: note = engineered CasX variant
QEIKRISKIRRRLVKDSNTKKAGKTGPMKTLLVRVMTPDLRERLENLRKKPENIPQPISNTSRANLNKLLTDYTEMKKAILHVYWEEFQKDPVGLMSRVAQPASKKIDQNKLKPEMDEKGNLTTAGFACSQCGQPLFVYKLEQVSEKGKAYTNYFGRCNVAEHEKLILLAQLKPEKDSDEAVTYSLGKFGQRALDFYSIHVTKESTHPVKPLAQIAGNRYASTPVGKALSDACMGTIASFLSKYQDIIIEHQKVVKGNQKRLESLRELAGKENLEYPSVTLPPQPHTKEGVDAYNEVIARVRMWVNLNLWQKLKLSRDDAKPLLRLKGFPSFPLVERQANEVDWWDMVCNVKKLINEKKEDGKVFWQNLAGYKRQEALRPYLSSEEDRKKGKKFARYQLGDLLLHLEKKHGEDWGKVYDEAWERIDKKVEGLSKHIKLEEERRSEDAQSKAALTDWLRAKASFVIEGLKEADKDEFCRCELKLQKWYGDLRGKPFAIEAENSILDISGFSKQYNCAFIWQKDGVKKLNLYLIINYFKGGKLRFKKIKPEAFEANRFYTVINKKSGEIVPMEVNFNFDDPNLIILPLAFGKRQGREFIWNDLLSLETGSLKLANGRVIEKTLYNRRTRQDEPALFVALTFERREVLDSSNIKPMNLIGVDRGENIPAVIALTDPEGCPLSRFKDSLGNPTHILRIGESYKEKQRTIQAKKEVEQRRAGGYSRKYASKAKNLADDMVRNTARDLLYYAVTQDAMLIFENLSRGFGRQGKRTFMAERQYTRMEDWLTAKLAYEGPLPSKTYLSKTLAQYTSKTCSNCGFTITSADYDRVLEKLKKTATGWMTTINGKELKVEGQITYYNRYKRQNVVKDLSVELDRLSEESVNNDISSWTKGRSGEALSLLKKRFSHRPVQEKFVCLNCGFETHADEQAALNIARSWLFLRSQEYKKYQTNKTTGNTDKRAFVETWQSFYRKKLKEVWKPAV

SEQ ID NO: 33079 - protein, 979 aa, synthetic construct
  REGION 1..979: note = engineered CasX variant
QEIKRISKIRRRLVKDSNTKKAGKTGPMKTLLVRVMTPDLRERLENLRKKPENIPQPISNTSRANLNKLLTDYTEMKKAILHVYWEEFQKDPVGLMSRVAQPASKKIDQNKLKPEMDEKGNLTTAGFACSQCGQPLFVYKLEQVSEKGKAYTNYFGRCNVAEHEKLILLAQLKPEKDSDEAVTYSLGKFGQRALDFYSIHVTKESTHPVKPLAQIAGNRYASAPVGKALSDACMGTIASFLSKYQDIIIEHQKVVKGNQKRLESLRELAGKENLEYPSVTLPPQPHTKEGVDAYNEVIARVRMWVNLNLWQKLKLSRDDAKPLLRLKGFPSFPLVERQANEVDWWDMVCNVKKLINEKKEDGKVFWQNLAGYKRQEALRPYLSSEEDRKKGKKFARYQLGDLLLHLEKKHGEDWGKVYDEAWERIDKKVEGLSKHIKLEEERRSEDAQSKAALTDWLRAKASFVIEGLKEADKDEFCRCELKLQKWYGDLRGKPFAIEAENSILDISGFSKQYNCAFIWQKDGVKKLNLYLIINYFKGGKLRFKKIKPEAFEANRFYTVINKKSGEIVPMEVNFNFDDPNLIILPLAFGKRQGREFIWNDLLSLETGSLKLANGRVIEKTLYNRRTRQDEPALFVALTFERREVLDSSNIKPMNLIGVDRGENIPAVIALTDPEGCPLSRFKDSLGNPTHILRIGESYKEKQRTIQAKKEVEQRRAGGYSRKYASKAKNLADDMVRNTARDLLYYAVTQDAMLIFENLSRGFGRQGKRTFMAERQYTRMEDWLTAKLAYEGPLPSKTYLSKTLAQYTSKTCSNCGFTITSADYDRVLEKLKKTATGWMTTINGKELKVEGQITYYNRYKRQNVVKDLSVELDRLSEESVNNDISSWTKGRSGEALSLLKKRFSHRPVQEKFVCLNCGFETHADEQAALNIARSWLFLRSQEYKKYQTNKTTGNTDKRAFVETWQSFYRKKLKEVWKPAV

SEQ ID NO: 33080 - protein, 979 aa, synthetic construct
  REGION 1..979: note = engineered CasX variant
QEIKRISKIRRRLVKDSNTKKAGKTGPMKTLLVRVMTPDLRERLENLRKKPENIPQPISNTSRANLNKLLTDYTEMKKAILHVYWEEFQKDPVGLMSRVAQPASKKIDQNKLKPEMDEKGNLTTAGFACSQCGQPLFVYKLEQVSEKGKAYTNYFGRCNVAEHEKLILLAQLKPEKDSDEAVTYSLGKFGQRALDFYSIHVTKESTHPVKPLAQIAGNRYASVPVGKALSDACMGTIASFLSKYQDIIIEHQKVVKGNQKRLESLRELAGKENLEYPSVTLPPQPHTKEGVDAYNEVIARVRMWVNLNLWQKLKLSRDDAKPLLRLKGFPSFPLVERQANEVDWWDMVCNVKKLINEKKEDGKVFWQNLAGYKRQEALRPYLSSEEDRKKGKKFARYQLGDLLLHLEKKHGEDWGKVYDEAWERIDKKVEGLSKHIKLEEERRSEDAQSKAALTDWLRAKASFVIEGLKEADKDEFCRCELKLQKWYGDLRGKPFAIEAENSILDISGFSKQYNCAFIWQKDGVKKLNLYLIINYFKGGKLRFKKIKPEAFEANRFYTVINKKSGEIVPMEVNFNFDDPNLIILPLAFGKRQGREFIWNDLLSLETGSLKLANGRVIEKTLYNRRTRQDEPALFVALTFERREVLDSSNIKPMNLIGVDRGENIPAVIALTDPEGCPLSRFKDSLGNPTHILRIGESYKEKQRTIQAKKEVEQRRAGGYSRKYASKAKNLADDMVRNTARDLLYYAVTQDAMLIFENLSRGFGRQGKRTFMAERQYTRMEDWLTAKLAYEGPLPSKTYLSKTLAQYTSKTCSNCGFTITSADYDRVLEKLKKTATGWMTTINGKELKVEGQITYYNRYKRQNVVKDLSVELDRLSEESVNNDISSWTKGRSGEALSLLKKRFSHRPVQEKFVCLNCGFETHADEQAALNIARSWLFLRSQEYKKYQTNKTTGNTDKRAFVETWQSFYRKKLKEVWKPAV

SEQ ID NO: 33081 - protein, 979 aa, synthetic construct
  REGION 1..979: note = engineered CasX variant
QEIKRISKIRRRLVKDSNTKKAGKTGPMKTLLVRVMTPDLRERLENLRKKPENIPQPISNTSRANLNKLLTDYTEMKKAILHVYWEEFQKDPVGLMSRVAQPASKKIDQNKLKPEMDEKGNLTTAGFACSQCGQPLFVYKLEQVSEKGKAYTNYFGRCNVAEHEKLIKLAQLKPEKDSDEAVTYSLGKFGQRALDFYSIHVTKESTHPVKPLAQIAGNRYASGPVGKALSDACMGTIASFLSKYQDIIIEHQKVVKGNQKRLESLRELAGKENLEYPSVTLPPQPHTKEGVDAYNEVIARVRMWVNLNLWQKLKLSRDDAKPLLRLKGFPSFPLVERQANEVDWWDMVCNVKKLINEKKEDGKVFWQNLAGYKRQEALRPYLSSEEDRKKGKKFARYQLGDLLLHLEKKHGEDWGKVYDEAWERIDKKVEGLSKHIKLEEERRSEDAQSKAALTDWLRAKASFVIEGLKEADKDEFCRCELKLQKWYGDLRGKPFAIEAENSILDISGFSKQYNCAFIWQKDGVKKLNLYLIINYFKGGKLRFKKIKPEAFEANRFYTVINKKSGEIVPMEVNFNFDDPNLIILPLAFGKRQGREFIWNDLLSLETGSLKLANGRVIEKTLYNRRTRQDEPALFVALTFERREVLDSSNIKPMNLIGVDRGENIPAVIALTDPEGCPLSRFKDSLGNPTHILRIGESYKEKQRTIQAKKEVEQRRAGGYSRKYASKAKNLADDMVRNTARDLLYYAVTQDAMLIFENLSRGFGRQGKRTFMAERQYTRMEDWLTAKLAYEGPLPSKTYLSKTLAQYTSKTCSNCGFTITSADYDRVLEKLKKTATGWMTTINGKELKVEGQITYYNRYKRQNVVKDLSVELDRLSEESVNNDISSWTKGRSGEALSLLKKRFSHRPVQEKFVCLNCGFETHADEQAALNIARSWLFLRSQEYKKYQTNKTTGNTDKRAFVETWQSFYRKKLKEVWKPAV

SEQ ID NO: 33082 - protein, 978 aa, synthetic construct
  REGION 1..978: note = engineered CasX variant
QEIKRISKIRRRLVKDSNTKKAGKTGPMKTLLVRVMTPDLRERLENLRKKPENIPQPISNTSRANLNKLLTDYTEMKKAILHVYWEEFQKDPVGLMSRVAQPASKKIDQNKLKPEMDEKGNLTTAGFACSQCGQPLFVYKLEQVSEKGKAYTNYFGRCNVAEHEKLILLAQLKPEKDSDEAVTYSLGKFGQRALDFYSIHVTKESTHPVKPLAQIAGNRYASPVGKALSDACMGTIASFLSKYQDIIIEHQKVVKGNQKRLESLRELAGKENLEYPSVTLPPQPHTKEGVDAYNEVIARVRMWVNLNLWQKLKLSRDDAKPLLRLKGFPSFPLVERQANEVDWWDMVCNVKKLINEKKEDGKVFWQNLAGYKRQEALRPYLSSEEDRKKGKKFARYQLGDLLLHLEKKHGEDWGKVYDEAWERIDKKVEGLSKHIKLEEERRSEDAQSKAALTDWLRAKASFVIEGLKEADKDEFCRCELKLQKWYGDLRGKPFAIEAENSILDISGFSKQYNCAFIWQKDGVKKLNLYLIINYFKGGKLRFKKIKPEAFEANRFYTVINKKSGEIVPMEVNFNFDDPNLIILPLAFGKRQGREFIWNDLLSLETGSLKLANGRVIEKTLYNRRTRQDEPALFVALTFERREVLDSSNIKPMNLIGVDRGENIPAVIALTDPEGCPLSRFKDSLGNPTHILRIGESYKEKQRTIQAKKEVEQRRAGGYSRKYASKAKNLADDMVRNTARDLLYYAVTQDAMLIFENLSRGFGRQGKRTFMAERQYTRMEDWLTAKLAYEGPLPSKTYLSKTLAQYTSKTCSNCGFTITSADYDRVLEKLKKTATGWMTTINGKELKVEGQITYYNRYKRQNVVKDLSVELDRLSEESVNNDISSWTKGRSGEALSLLKKRFSHRPVQEKFVCLNCGFETHADEQAALNIARSWLFLRSQEYKKYQTNKTTGNTDKRAFVETWQSFYRKKLKEVWKPAV

SEQ ID NO: 33083 - protein, 979 aa, synthetic construct
  REGION 1..979: note = engineered CasX variant
QEIKRISKIRRRLVKDSNTKKAGKTGPMKTLLVRVMTPDLRERLENLRKKPENIPQPISNTSRANLNKLLTDYTEMKKAILHVYWEEFQKDPVGLMSRVAQPASKKIDQNKLKPEMDEKGNLTTAGFACSQCGQPLFVYKLEQVSEKGKAYTNYFGRCNVAEHEKLILLAQLKPEKDSDEAVTYSLGKFGQRALDFYSIHVTKESTHPVKPLAQIAGNRYASYPVGKALSDACMGTIASFLSKYQDIIIEHQKVVKGNQKRLESLRELAGKENLEYPSVTLPPQPHTKEGVDAYNEVIARVRMWVNLNLWQKLKLSRDDAKPLLRLKGFPSFPLVERQANEVDWWDMVCNVKKLINEKKEDGKVFWQNLAGYKRQEALRPYLSSEEDVRKKGKKFARYQLGDLLLHLEKKHGEDWGKVYDEAWERIDKKVEGLSKHIKLEEERRSEDAQSKAALTDWLRAKASFVIEGLKEADKDEFCRCELKLQKWYGDLRGKPFAIEAENSILDISGFSKQYNCAFIWQKDGVKKLNLYLIINYFKGGKLRFKKIKPEAFEANRFYTVINKKSGEIVPMEVNFNFDDPNLIILPLAFGKRQGREFIWNDLLSLETGSLKLANGRVIEKTLYNRRTRQDEPALFVALTFERREVLDSSNIKPMNLIGVDRGENIPAVIALTDPEGCPLSRFKDSLGNPTHILRIGESYKEKQRTIQAKKEVEQRRAGGYSRKYASKAKNLADDMVRNTARDLLYYAVTQDAMLIFENLSRGFGRQGKRTFMAERQYTRMEDWLTAKLAYEGLPSKTYLSKTLAQYTSKTCSNCGFTITSADYDRVLEKLKKTATGWMTTINGKELKVEGQITYYNRYKRQNVVKDLSVELDRLSEESVNNDISSWTKGRSGEALSLLKKRFSHRPVQEKFVCLNCGFETHADEQAALNIARSWLFLRSQEYKKYQTNKTTGNTDKRAFVETWQSFYRKKLKEVWKPAV

SEQ ID NO: 33084 - protein, 979 aa, synthetic construct
  REGION 1..979: note = engineered CasX variant
QEIKRISKIRRRLVKDSNTKKAGKTGPMKTLLVRVMTPDLRERLENLRKKPENIPQPISNTSRANLNKLLTDYTEMKKAILHVYWEEFQKDPVGLMSRVAQPASKKIDQNKLKPEMDEKGNLTTAGFACSQCGQPLFVYKLEQVSEKGKAYTNYFGRCNVAEHEKLILLAQLKPEKDSDEAVTYSLGKFGQRALDFYSIHVTKESTHPVKPLAQIAGNRYASHPVGKALSDACMGTIASFLSKYQDIIIEHQKVVKGNQKRLESLRELAGKENLEYPSVTLPPQPHTKEGVDAYNEVIARVRMWVNLNLWQKLKLSRDDAKPLLRLKGFPSFPLVERQANEVDWWDMVCNVKKLINEKKEDGKVFWQNLAGYKRQEALRPYLSSEEDVRKKGKKFARYQLGDLLLHLEKKHGEDWGKVYDEAWERIDKKVEGLSKHIKLEEERRSEDAQSKAALTDWLRAKASFVIEGLKEADKDEFCRCELKLQKWYGDLRGKPFAIEAENSILDISGFSKQYNCAFIWQKDGVKKLNLYLIINYFKGGKLRFKKIKPEAFEANRFYTVINKKSGEIVPMEVNFNFDDPNLIILPLAFGKRQGREFIWNDLLSLETGSLKLANGRVIEKTLYNRRTRQDEPALFVALTFERREVLDSSNIKPMNLIGVDRGENIPAVIALTDPEGCPLSRFKDSLGNPTHILRIGESYKEKQRTIQAKKEVEQRRAGGYSRKYASKAKNLADDMVRNTARDLLYYAVTQDAMLIFENLSRGFGRQGKRTFMAERQYTRMEDWLTAKLAYEGLPSKTYLSKTLAQYTSKTCSNCGFTITSADYDRVLEKLKKTATGWMTTINGKELKVEGQITYYNRYKRQNVVKDLSVELDRLSEESVNNDISSWTKGRSGEALSLLKKRFSHRPVQEKFVCLNCGFETHADEQAALNIARSWLFLRSQEYKKYQTNKTTGNTDKRAFVETWQSFYRKKLKEVWKPAV

SEQ ID NO: 33085 - protein, 979 aa, synthetic construct
  REGION 1..979: note = engineered CasX variant
QEIKRISKIRRRLVKDSNTKKAGKTGPMKTLLVRVMTPDLRERLENLRKKPENIPQPISNTSRANLNKLLTDYTEMKKAILHVYWEEFQKDPVGLMSRVAQPASKKIDQNKLKPEMDEKGNLTTAGFACSQCGQPLFVYKLEQVSEKGKAYTNYFGRCNVAEHEKLILLAQLKPEKDSDEAVTYSLGKFGQRALDFYSIHVTKESTHPVKPLAQIAGNRYASSPVGKALSDACMGTIASFLSKYQDIIIEHQKVVKGNQKRLESLRELAGKENLEYPSVTLPPQPHTKEGVDAYNEVIARVRMWVNLNLWQKLKLSRDDAKPLLRLKGFPSFPLVERQANEVDWWDMVCNVKKLINEKKEDGKVFWQNLAGYKRQEALRPYLSSEEDVRKKGKKFARYQLGDLLLHLEKKHGEDWGKVYDEAWERIDKKVEGLSKHIKLEEERRSEDAQSKAALTDWLRAKASFVIEGLKEADKDEFCRCELKLQKWYGDLRGKPFAIEAENSILDISGFSKQYNCAFIWQKDGVKKLNLYLIINYFKGGKLRFKKIKPEAFEANRFYTVINKKSGEIVPMEVNFNFDDPNLIILPLAFGKRQGREFIWNDLLSLETGSLKLANGRVIEKTLYNRRTRQDEPALFVALTFERREVLDSSNIKPMNLIGVDRGENIPAVIALTDPEGCPLSRFKDSLGNPTHILRIGESYKEKQRTIQAKKEVEQRRAGGYSRKYASKAKNLADDMVRNTARDLLYYAVTQDAMLIFENLSRGFGRQGKRTFMAERQYTRMEDWLTAKLAYEGLPSKTYLSKTLAQYTSKTCSNCGFTITSADYDRVLEKLKKTATGWMTTINGKELKVEGQITYYNRYKRQNVVKDLSVELDRLSEESVNNDISSWTKGRSGEALSLLKKRFSHRPVQEKFVCLNCGFETHADEQAALNIARSWLFLRSQEYKKYQTNKTTGNTDKRAFVETWQSFYRKKLKEVWKPAV

SEQ ID NO: 33086 - protein, 979 aa, synthetic construct
  REGION 1..979: note = engineered CasX variant
QEIKRISKIRRRLVKDSNTKKAGKTGPMKTLLVRVMTPDLRERLENLRKKPENIPQPISNTSRANLNKLLTDYTEMKKAILHVYWEEFQKDPVGLMSRVAQPASKKIDQNKLKPEMDEKGNLTTAGFACSQCGQPLFVYKLEQVSEKGKAYTNYFGRCNVAEHEKLILLAQLKPEKDSDEAVTYSLGKFGQRALDFYSIHVTKESTHPVKPLAQIAGNRYASTPVGKALSDACMGTIASFLSKYQDIIIEHQKVVKGNQKRLESLRELAGKENLEYPSVTLPPQPHTKEGVDAYNEVIARVRMWVNLNLWQKLKLSRDDAKPLLRLKGFPSFPLVERQANEVDWWDMVCNVKKLINEKKEDGKVFWQNLAGYKRQEALRPYLSSEEDVRKKGKKFARYQLGDLLLHLEKKHGEDWGKVYDEAWERIDKKVEGLSKHIKLEEERRSEDAQSKAALTDWLRAKASFVIEGLKEADKDEFCRCELKLQKWYGDLRGKPFAIEAENSILDISGFSKQYNCAFIWQKDGVKKLNLYLIINYFKGGKLRFKKIKPEAFEANRFYTVINKKSGEIVPMEVNFNFDDPNLIILPLAFGKRQGREFIWNDLLSLETGSLKLANGRVIEKTLYNRRTRQDEPALFVALTFERREVLDSSNIKPMNLIGVDRGENIPAVIALTDPEGCPLSRFKDSLGNPTHILRIGESYKEKQRTIQAKKEVEQRRAGGYSRKYASKAKNLADDMVRNTARDLLYYAVTQDAMLIFENLSRGFGRQGKRTFMAERQYTRMEDWLTAKLAYEGLPSKTYLSKTLAQYTSKTCSNCGFTITSADYDRVLEKLKKTATGWMTTINGKELKVEGQITYYNRYKRQNVVKDLSVELDRLSEESVNNDISSWTKGRSGEALSLLKKRFSHRPVQEKFVCLNCGFETHADEQAALNIARSWLFLRSQEYKKYQTNKTTGNTDKRAFVETWQSFYRKKLKEVWKPAV

SEQ ID NO: 33087 - protein, 979 aa, synthetic construct
  REGION 1..979: note = engineered CasX variant
QEIKRISKIRRRLVKDSNTKKAGKTGPMKTLLVRVMTPDLRERLENLRKKPENIPQPISNTSRANLNKLLTDYTEMKKAILHVYWEEFQKDPVGLMSRVAQPASKKIDQNKLKPEMDEKGNLTTAGFACSQCGQPLFVYKLEQVSEKGKAYTNYFGRCNVAEHEKLILLAQLKPEKDSDEAVTYSLGKFGQRALDFYSIHVTKESTHPVKPLAQIAGNRYASAPVGKALSDACMGTIASFLSKYQDIIIEHQKVVKGNQKRLESLRELAGKENLEYPSVTLPPQPHTKEGVDAYNEVIARVRMWVNLNLWQKLKLSRDDAKPLLRLKGFPSFPLVERQANEVDWWDMVCNVKKLINEKKEDGKVFWQNLAGYKRQEALRPYLSSEEDVRKKGKKFARYQLGDLLLHLEKKHGEDWGKVYDEAWERIDKKVEGLSKHIKLEEERRSEDAQSKAALTDWLRAKASFVIEGLKEADKDEFCRCELKLQKWYGDLRGKPFAIEAENSILDISGFSKQYNCAFIWQKDGVKKLNLYLIINYFKGGKLRFKKIKPEAFEANRFYTVINKKSGEIVPMEVNFNFDDPNLIILPLAFGKRQGREFIWNDLLSLETGSLKLANGRVIEKTLYNRRTRQDEPALFVALTFERREVLDSSNIKPMNLIGVDRGENIPAVIALTDPEGCPLSRFKDSLGNPTHILRIGESYKEKQRTIQAKKEVEQRRAGGYSRKYASKAKNLADDMVRNTARDLLYYAVTQDAMLIFENLSRGFGRQGKRTFMAERQYTRMEDWLTAKLAYEGLPSKTYLSKTLAQYTSKTCSNCGFTITSADYDRVLEKLKKTATGWMTTINGKELKVEGQITYYNRYKRQNVVKDLSVELDRLSEESVNNDISSWTKGRSGEALSLLKKRFSHRPVQEKFVCLNCGFETHADEQAALNIARSWLFLRSQEYKKYQTNKTTGNTDKRAFVETWQSFYRKKLKEVWKPAV

SEQ ID NO: 33088 - protein, 979 aa, synthetic construct
  REGION 1..979: note = engineered CasX variant
QEIKRISKIRRRLVKDSNTKKAGKTGPMKTLLVRVMTPDLRERLENLRKKPENIPQPISNTSRANLNKLLTDYTEMKKAILHVYWEEFQKDPVGLMSRVAQPASKKIDQNKLKPEMDEKGNLTTAGFACSQCGQPLFVYKLEQVSEKGKAYTNYFGRCNVAEHEKLILLAQLKPEKDSDEAVTYSLGKFGQRALDFYSIHVTKESTHPVKPLAQIAGNRYASVPVGKALSDACMGTIASFLSKYQDIIIEHQKVVKGNQKRLESLRELAGKENLEYPSVTLPPQPHTKEGVDAYNEVIARVRMWVNLNLWQKLKLSRDDAKPLLRLKGFPSFPLVERQANEVDWWDMVCNVKKLINEKKEDGKVFWQNLAGYKRQEALRPYLSSEEDVRKKGKKFARYQLGDLLLHLEKKHGEDWGKVYDEAWERIDKKVEGLSKHIKLEEERRSEDAQSKAALTDWLRAKASFVIEGLKEADKDEFCRCELKLQKWYGDLRGKPFAIEAENSILDISGFSKQYNCAFIWQKDGVKKLNLYLIINYFKGGKLRFKKIKPEAFEANRFYTVINKKSGEIVPMEVNFNFDDPNLIILPLAFGKRQGREFIWNDLLSLETGSLKLANGRVIEKTLYNRRTRQDEPALFVALTFERREVLDSSNIKPMNLIGVDRGENIPAVIALTDPEGCPLSRFKDSLGNPTHILRIGESYKEKQRTIQAKKEVEQRRAGGYSRKYASKAKNLADDMVRNTARDLLYYAVTQDAMLIFENLSRGFGRQGKRTFMAERQYTRMEDWLTAKLAYEGLPSKTYLSKTLAQYTSKTCSNCGFTITSADYDRVLEKLKKTATGWMTTINGKELKVEGQITYYNRYKRQNVVKDLSVELDRLSEESVNNDISSWTKGRSGEALSLLKKRFSHRPVQEKFVCLNCGFETHADEQAALNIARSWLFLRSQEYKKYQTNKTTGNTDKRAFVETWQSFYRKKLKEVWKPAV

SEQ ID NO: 33089 - protein, 979 aa, synthetic construct
  REGION 1..979: note = engineered CasX variant
QEIKRISKIRRRLVKDSNTKKAGKTGPMKTLLVRVMTPDLRERLENLRKKPENIPQPISNTSRANLNKLLTDYTEMKKAILHVYWEEFQKDPVGLMSRVAQPASKKIDQNKLKPEMDEKGNLTTAGFACSQCGQPLFVYKLEQVSEKGKAYTNYFGRCNVAEHEKLIKLAQLKPEKDSDEAVTYSLGKFGQRALDFYSIHVTKESTHPVKPLAQIAGNRYASGPVGKALSDACMGTIASFLSKYQDIIIEHQKVVKGNQKRLESLRELAGKENLEYPSVTLPPQPHTKEGVDAYNEVIARVRMWVNLNLWQKLKLSRDDAKPLLRLKGFPSFPLVERQANEVDWWDMVCNVKKLINEKKEDGKVFWQNLAGYKRQEALRPYLSSEEDVRKKGKKFARYQLGDLLLHLEKKHGEDWGKVYDEAWERIDKKVEGLSKHIKLEEERRSEDAQSKAALTDWLRAKASFVIEGLKEADKDEFCRCELKLQKWYGDLRGKPFAIEAENSILDISGFSKQYNCAFIWQKDGVKKLNLYLIINYFKGGKLRFKKIKPEAFEANRFYTVINKKSGEIVPMEVNFNFDDPNLIILPLAFGKRQGREFIWNDLLSLETGSLKLANGRVIEKTLYNRRTRQDEPALFVALTFERREVLDSSNIKPMNLIGVDRGENIPAVIALTDPEGCPLSRFKDSLGNPTHILRIGESYKEKQRTIQAKKEVEQRRAGGYSRKYASKAKNLADDMVRNTARDLLYYAVTQDAMLIFENLSRGFGRQGKRTFMAERQYTRMEDWLTAKLAYEGLPSKTYLSKTLAQYTSKTCSNCGFTITSADYDRVLEKLKKTATGWMTTINGKELKVEGQITYYNRYKRQNVVKDLSVELDRLSEESVNNDISSWTKGRSGEALSLLKKRFSHRPVQEKFVCLNCGFETHADEQAALNIARSWLFLRSQEYKKYQTNKTTGNTDKRAFVETWQSFYRKKLKEVWKPAV

SEQ ID NO: 33090 - protein, 978 aa, synthetic construct
  REGION 1..978: note = engineered CasX variant
QEIKRISKIRRRLVKDSNTKKAGKTGPMKTLLVRVMTPDLRERLENLRKKPENIPQPISNTSRANLNKLLTDYTEMKKAILHVYWEEFQKDPVGLMSRVAQPASKKIDQNKLKPEMDEKGNLTTAGFACSQCGQPLFVYKLEQVSEKGKAYTNYFGRCNVAEHEKLILLAQLKPEKDSDEAVTYSLGKFGQRALDFYSIHVTKESTHPVKPLAQIAGNRYASPVGKALSDACMGTIASFLSKYQDIIIEHQKVVKGNQKRLESLRELAGKENLEYPSVTLPPQPHTKEGVDAYNEVIARVRMWVNLNLWQKLKLSRDDAKPLLRLKGFPSFPLVERQANEVDWWDMVCNVKKLINEKKEDGKVFWQNLAGYKRQEALRPYLSSEEDVRKKGKKFARYQLGDLLLHLEKKHGEDWGKVYDEAWERIDKKVEGLSKHIKLEEERRSEDAQSKAALTDWLRAKASFVIEGLKEADKDEFCRCELKLQKWYGDLRGKPFAIEAENSILDISGFSKQYNCAFIWQKDGVKKLNLYLIINYFKGGKLRFKKIKPEAFEANRFYTVINKKSGEIVPMEVNFNFDDPNLIILPLAFGKRQGREFIWNDLLSLETGSLKLANGRVIEKTLYNRRTRQDEPALFVALTFERREVLDSSNIKPMNLIGVDRGENIPAVIALTDPEGCPLSRFKDSLGNPTHILRIGESYKEKQRTIQAKKEVEQRRAGGYSRKYASKAKNLADDMVRNTARDLLYYAVTQDAMLIFENLSRGFGRQGKRTFMAERQYTRMEDWLTAKLAYEGLPSKTYLSKTLAQYTSKTCSNCGFTITSADYDRVLEKLKKTATGWMTTINGKELKVEGQITYYNRYKRQNVVKDLSVELDRLSEESVNNDISSWTKGRSGEALSLLKKRFSHRPVQEKFVCLNCGFETHADEQAALNIARSWLFLRSQEYKKYQTNKTTGNTDKRAFVETWQSFYRKKLKEVWKPAV

SEQ ID NO: 33091 - protein, 978 aa, synthetic construct
  REGION 1..978: note = engineered CasX variant
QEIKRISKIRRRLVKDSNTKKAGKTGPMKTLLVRVMTPDLRERLENLRKKPENIPQPISNTSRANLNKLLTDYTEMKKAILHVYWEEFQKDPVGLMSRVAQPASKKIDQNKLKPEMDEKGNLTTAGFACSQCGQPLFVYKLEQVSEKGKAYTNYFGRCNVAEHEKLILLAQLKPEKDSDEAVTYSLGKFGQRALDFYSIHVTKESTHPVKPLAQIAGNRYASYPVGKALSDACMGTIASFLSKYQDIIIEHQKVVKGNQKRLESLRELAGKENLEYPSVTLPPQPHTKEGVDAYNEVIARVRMWVNLNLWQKLKLSRDDAKPLLRLKGFPSFPLVERQANEVDWWDMVCNVKKLINEKKEDGKVFWQNLAGYKRQEALRPYLSSEEDRKKGKKFARYQLGDLLLHLEKKHGEDWGKVYDEAWERIDKKVEGLSKHIKLEEERRSEDAQSKAALTDWLRAKASFVIEGLKEADKDEFCRCELKLQKWYGDLRGKPFAIEAENSILDISGFSKQYNCAFIWQKDGVKKLNLYLIINYFKGGKLRFKKIKPEAFEANRFYTVINKKSGEIVPMEVNFNFDDPNLIILPLAFGKRQGREFIWNDLLSLETGSLKLANGRVIEKTLYNRRTRQDEPALFVALTFERREVLDSSNIKPMNLIGVDRGENIPAVIALTDPEGCPLSRFKDSLGNPTHILRIGESYKEKQRTIQAKKEVEQRRAGGYSRKYASKAKNLADDMVRNTARDLLYYAVTQDAMLIFENLSRGFGRQGKRTFMAERQYTRMEDWLTAKLAYEGLPSKTYLSKTLAQYTSKTCSNCGFTITSADYDRMLEKLKKTATGWMTTINGKELKVEGQITYYNRYKRQNVVKDLSVELDRLSEESVNNDISSWTKGRSGEALSLLKKRFSHRPVQEKFVCLNCGFETHADEQAALNIARSWLFLRSQEYKKYQTNKTTGNTDKRAFVETWQSFYRKKLKEVWKPAV

SEQ ID NO: 33092 - protein, 978 aa, synthetic construct
  REGION 1..978: note = engineered CasX variant
QEIKRISKIRRRLVKDSNTKKAGKTGPMKTLLVRVMTPDLRERLENLRKKPENIPQPISNTSRANLNKLLTDYTEMKKAILHVYWEEFQKDPVGLMSRVAQPASKKIDQNKLKPEMDEKGNLTTAGFACSQCGQPLFVYKLEQVSEKGKAYTNYFGRCNVAEHEKLILLAQLKPEKDSDEAVTYSLGKFGQRALDFYSIHVTKESTHPVKPLAQIAGNRYASHPVGKALSDACMGTIASFLSKYQDIIIEHQKVVKGNQKRLESLRELAGKENLEYPSVTLPPQPHTKEGVDAYNEVIARVRMWVNLNLWQKLKLSRDDAKPLLRLKGFPSFPLVERQANEVDWWDMVCNVKKLINEKKEDGKVFWQNLAGYKRQEALRPYLSSEEDRKKGKKFARYQLGDLLLHLEKKHGEDWGKVYDEAWERIDKKVEGLSKHIKLEEERRSEDAQSKAALTDWLRAKASFVIEGLKEADKDEFCRCELKLQKWYGDLRGKPFAIEAENSILDISGFSKQYNCAFIWQKDGVKKLNLYLIINYFKGGKLRFKKIKPEAFEANRFYTVINKKSGEIVPMEVNFNFDDPNLIILPLAFGKRQGREFIWNDLLSLETGSLKLANGRVIEKTLYNRRTRQDEPALFVALTFERREVLDSSNIKPMNLIGVDRGENIPAVIALTDPEGCPLSRFKDSLGNPTHILRIGESYKEKQRTIQAKKEVEQRRAGGYSRKYASKAKNLADDMVRNTARDLLYYAVTQDAMLIFENLSRGFGRQGKRTFMAERQYTRMEDWLTAKLAYEGLPSKTYLSKTLAQYTSKTCSNCGFTITSADYDRMLEKLKKTATGWMTTINGKELKVEGQITYYNRYKRQNVVKDLSVELDRLSEESVNNDISSWTKGRSGEALSLLKKRFSHRPVQEKFVCLNCGFETHADEQAALNIARSWLFLRSQEYKKYQTNKTTGNTDKRAFVETWQSFYRKKLKEVWKPAV

SEQ ID NO: 33093 - protein, 978 aa, synthetic construct
  REGION 1..978: note = engineered CasX variant
QEIKRISKIRRRLVKDSNTKKAGKTGPMKTLLVRVMTPDLRERLENLRKKPENIPQPISNTSRANLNKLLTDYTEMKKAILHVYWEEFQKDPVGLMSRVAQPASKKIDQNKLKPEMDEKGNLTTAGFACSQCGQPLFVYKLEQVSEKGKAYTNYFGRCNVAEHEKLILLAQLKPEKDSDEAVTYSLGKFGQRALDFYSIHVTKESTHPVKPLAQIAGNRYASSPVGKALSDACMGTIASFLSKYQDIIIEHQKVVKGNQKRLESLRELAGKENLEYPSVTLPPQPHTKEGVDAYNEVIARVRMWVNLNLWQKLKLSRDDAKPLLRLKGFPSFPLVERQANEVDWWDMVCNVKKLINEKKEDGKVFWQNLAGYKRQEALRPYLSSEEDRKKGKKFARYQLGDLLLHLEKKHGEDWGKVYDEAWERIDKKVEGLSKHIKLEEERRSEDAQSKAALTDWLRAKASFVIEGLKEADKDEFCRCELKLQKWYGDLRGKPFAIEAENSILDISGFSKQYNCAFIWQKDGVKKLNLYLIINYFKGGKLRFKKIKPEAFEANRFYTVINKKSGEIVPMEVNFNFDDPNLIILPLAFGKRQGREFIWNDLLSLETGSLKLANGRVIEKTLYNRRTRQDEPALFVALTFERREVLDSSNIKPMNLIGVDRGENIPAVIALTDPEGCPLSRFKDSLGNPTHILRIGESYKEKQRTIQAKKEVEQRRAGGYSRKYASKAKNLADDMVRNTARDLLYYAVTQDAMLIFENLSRGFGRQGKRTFMAERQYTRMEDWLTAKLAYEGLPSKTYLSKTLAQYTSKTCSNCGFTITSADYDRMLEKLKKTATGWMTTINGKELKVEGQITYYNRYKRQNVVKDLSVELDRLSEESVNNDISSWTKGRSGEALSLLKKRFSHRPVQEKFVCLNCGFETHADEQAALNIARSWLFLRSQEYKKYQTNKTTGNTDKRAFVETWQSFYRKKLKEVWKPAV

SEQ ID NO: 33094 - protein, 978 aa, synthetic construct
  REGION 1..978: note = engineered CasX variant
QEIKRISKIRRRLVKDSNTKKAGKTGPMKTLLVRVMTPDLRERLENLRKKPENIPQPISNTSRANLNKLLTDYTEMKKAILHVYWEEFQKDPVGLMSRVAQPASKKIDQNKLKPEMDEKGNLTTAGFACSQCGQPLFVYKLEQVSEKGKAYTNYFGRCNVAEHEKLILLAQLKPEKDSDEAVTYSLGKFGQRALDFYSIHVTKESTHPVKPLAQIAGNRYASTPVGKALSDACMGTIASFLSKYQDIIIEHQKVVKGNQKRLESLRELAGKENLEYPSVTLPPQPHTKEGVDAYNEVIARVRMWVNLNLWQKLKLSRDDAKPLLRLKGFPSFPLVERQANEVDWWDMVCNVKKLINEKKEDGKVFWQNLAGYKRQEALRPYLSSEEDRKKGKKFARYQLGDLLLHLEKKHGEDWGKVYDEAWERIDKKVEGLSKHIKLEEERRSEDAQSKAALTDWLRAKASFVIEGLKEADKDEFCRCELKLQKWYGDLRGKPFAIEAENSILDISGFSKQYNCAFIWQKDGVKKLNLYLIINYFKGGKLRFKKIKPEAFEANRFYTVINKKSGEIVPMEVNFNFDDPNLIILPLAFGKRQGREFIWNDLLSLETGSLKLANGRVIEKTLYNRRTRQDEPALFVALTFERREVLDSSNIKPMNLIGVDRGENIPAVIALTDPEGCPLSRFKDSLGNPTHILRIGESYKEKQRTIQAKKEVEQRRAGGYSRKYASKAKNLADDMVRNTARDLLYYAVTQDAMLIFENLSRGFGRQGKRTFMAERQYTRMEDWLTAKLAYEGLPSKTYLSKTLAQYTSKTCSNCGFTITSADYDRMLEKLKKTATGWMTTINGKELKVEGQITYYNRYKRQNVVKDLSVELDRLSEESVNNDISSWTKGRSGEALSLLKKRFSHRPVQEKFVCLNCGFETHADEQAALNIARSWLFLRSQEYKKYQTNKTTGNTDKRAFVETWQSFYRKKLKEVWKPAV

SEQ ID NO: 33095 - protein, 978 aa, synthetic construct
  REGION 1..978: note = engineered CasX variant
QEIKRISKIRRRLVKDSNTKKAGKTGPMKTLLVRVMTPDLRERLENLRKKPENIPQPISNTSRANLNKLLTDYTEMKKAILHVYWEEFQKDPVGLMSRVAQPASKKIDQNKLKPEMDEKGNLTTAGFACSQCGQPLFVYKLEQVSEKGKAYTNYFGRCNVAEHEKLILLAQLKPEKDSDEAVTYSLGKFGQRALDFYSIHVTKESTHPVKPLAQIAGNRYASAPVGKALSDACMGTIASFLSKYQDIIIEHQKVVKGNQKRLESLRELAGKENLEYPSVTLPPQPHTKEGVDAYNEVIARVRMWVNLNLWQKLKLSRDDAKPLLRLKGFPSFPLVERQANEVDWWDMVCNVKKLINEKKEDGKVFWQNLAGYKRQEALRPYLSSEEDRKKGKKFARYQLGDLLLHLEKKHGEDWGKVYDEAWERIDKKVEGLSKHIKLEEERRSEDAQSKAALTDWLRAKASFVIEGLKEADKDEFCRCELKLQKWYGDLRGKPFAIEAENSILDISGFSKQYNCAFIWQKDGVKKLNLYLIINYFKGGKLRFKKIKPEAFEANRFYTVINKKSGEIVPMEVNFNFDDPNLIILPLAFGKRQGREFIWNDLLSLETGSLKLANGRVIEKTLYNRRTRQDEPALFVALTFERREVLDSSNIKPMNLIGVDRGENIPAVIALTDPEGCPLSRFKDSLGNPTHILRIGESYKEKQRTIQAKKEVEQRRAGGYSRKYASKAKNLADDMVRNTARDLLYYAVTQDAMLIFENLSRGFGRQGKRTFMAERQYTRMEDWLTAKLAYEGLPSKTYLSKTLAQYTSKTCSNCGFTITSADYDRMLEKLKKTATGWMTTINGKELKVEGQITYYNRYKRQNVVKDLSVELDRLSEESVNNDISSWTKGRSGEALSLLKKRFSHRPVQEKFVCLNCGFETHADEQAALNIARSWLFLRSQEYKKYQTNKTTGNTDKRAFVETWQSFYRKKLKEVWKPAV

SEQ ID NO: 33096 - protein, 978 aa, synthetic construct
  REGION 1..978: note = engineered CasX variant
QEIKRISKIRRRLVKDSNTKKAGKTGPMKTLLVRVMTPDLRERLENLRKKPENIPQPISNTSRANLNKLLTDYTEMKKAILHVYWEEFQKDPVGLMSRVAQPASKKIDQNKLKPEMDEKGNLTTAGFACSQCGQPLFVYKLEQVSEKGKAYTNYFGRCNVAEHEKLILLAQLKPEKDSDEAVTYSLGKFGQRALDFYSIHVTKESTHPVKPLAQIAGNRYASVPVGKALSDACMGTIASFLSKYQDIIIEHQKVVKGNQKRLESLRELAGKENLEYPSVTLPPQPHTKEGVDAYNEVIARVRMWVNLNLWQKLKLSRDDAKPLLRLKGFPSFPLVERQANEVDWWDMVCNVKKLINEKKEDGKVFWQNLAGYKRQEALRPYLSSEEDRKKGKKFARYQLGDLLLHLEKKHGEDWGKVYDEAWERIDKKVEGLSKHIKLEEERRSEDAQSKAALTDWLRAKASFVIEGLKEADKDEFCRCELKLQKWYGDLRGKPFAIEAENSILDISGFSKQYNCAFIWQKDGVKKLNLYLIINYFKGGKLRFKKIKPEAFEANRFYTVINKKSGEIVPMEVNFNFDDPNLIILPLAFGKRQGREFIWNDLLSLETGSLKLANGRVIEKTLYNRRTRQDEPALFVALTFERREVLDSSNIKPMNLIGVDRGENIPAVIALTDPEGCPLSRFKDSLGNPTHILRIGESYKEKQRTIQAKKEVEQRRAGGYSRKYASKAKNLADDMVRNTARDLLYYAVTQDAMLIFENLSRGFGRQGKRTFMAERQYTRMEDWLTAKLAYEGLPSKTYLSKTLAQYTSKTCSNCGFTITSADYDRMLEKLKKTATGWMTTINGKELKVEGQITYYNRYKRQNVVKDLSVELDRLSEESVNNDISSWTKGRSGEALSLLKKRFSHRPVQEKFVCLNCGFETHADEQAALNIARSWLFLRSQEYKKYQTNKTTGNTDKRAFVETWQSFYRKKLKEVWKPAV

SEQ ID NO: 33097 - protein, 978 aa, synthetic construct
  REGION 1..978: note = engineered CasX variant
QEIKRISKIRRRLVKDSNTKKAGKTGPMKTLLVRVMTPDLRERLENLRKKPENIPQPISNTSRANLNKLLTDYTEMKKAILHVYWEEFQKDPVGLMSRVAQPASKKIDQNKLKPEMDEKGNLTTAGFACSQCGQPLFVYKLEQVSEKGKAYTNYFGRCNVAEHEKLIKLAQLKPEKDSDEAVTYSLGKFGQRALDFYSIHVTKESTHPVKPLAQIAGNRYASGPVGKALSDACMGTIASFLSKYQDIIIEHQKVVKGNQKRLESLRELAGKENLEYPSVTLPPQPHTKEGVDAYNEVIARVRMWVNLNLWQKLKLSRDDAKPLLRLKGFPSFPLVERQANEVDWWDMVCNVKKLINEKKEDGKVFWQNLAGYKRQEALRPYLSSEEDRKKGKKFARYQLGDLLLHLEKKHGEDWGKVYDEAWERIDKKVEGLSKHIKLEEERRSEDAQSKAALTDWLRAKASFVIEGLKEADKDEFCRCELKLQKWYGDLRGKPFAIEAENSILDISGFSKQYNCAFIWQKDGVKKLNLYLIINYFKGGKLRFKKIKPEAFEANRFYTVINKKSGEIVPMEVNFNFDDPNLIILPLAFGKRQGREFIWNDLLSLETGSLKLANGRVIEKTLYNRRTRQDEPALFVALTFERREVLDSSNIKPMNLIGVDRGENIPAVIALTDPEGCPLSRFKDSLGNPTHILRIGESYKEKQRTIQAKKEVEQRRAGGYSRKYASKAKNLADDMVRNTARDLLYYAVTQDAMLIFENLSRGFGRQGKRTFMAERQYTRMEDWLTAKLAYEGLPSKTYLSKTLAQYTSKTCSNCGFTITSADYDRMLEKLKKTATGWMTTINGKELKVEGQITYYNRYKRQNVVKDLSVELDRLSEESVNNDISSWTKGRSGEALSLLKKRFSHRPVQEKFVCLNCGFETHADEQAALNIARSWLFLRSQEYKKYQTNKTTGNTDKRAFVETWQSFYRKKLKEVWKPAV

SEQ ID NO: 33098 - protein, 977 aa, synthetic construct
  REGION 1..977: note = engineered CasX variant
QEIKRISKIRRRLVKDSNTKKAGKTGPMKTLLVRVMTPDLRERLENLRKKPENIPQPISNTSRANLNKLLTDYTEMKKAILHVYWEEFQKDPVGLMSRVAQPASKKIDQNKLKPEMDEKGNLTTAGFACSQCGQPLFVYKLEQVSEKGKAYTNYFGRCNVAEHEKLILLAQLKPEKDSDEAVTYSLGKFGQRALDFYSIHVTKESTHPVKPLAQIAGNRYASPVGKALSDACMGTIASFLSKYQDIIIEHQKVVKGNQKRLESLRELAGKENLEYPSVTLPPQPHTKEGVDAYNEVIARVRMWVNLNLWQKLKLSRDDAKPLLRLKGFPSFPLVERQANEVDWWDMVCNVKKLINEKKEDGKVFWQNLAGYKRQEALRPYLSSEEDRKKGKKFARYQLGDLLLHLEKKHGEDWGKVYDEAWERIDKKVEGLSKHIKLEEERRSEDAQSKAALTDWLRAKASFVIEGLKEADKDEFCRCELKLQKWYGDLRGKPFAIEAENSILDISGFSKQYNCAFIWQKDGVKKLNLYLIINYFKGGKLRFKKIKPEAFEANRFYTVINKKSGEIVPMEVNFNFDDPNLIILPLAFGKRQGREFIWNDLLSLETGSLKLANGRVIEKTLYNRRTRQDEPALFVALTFERREVLDSSNIKPMNLIGVDRGENIPAVIALTDPEGCPLSRFKDSLGNPTHILRIGESYKEKQRTIQAKKEVEQRRAGGYSRKYASKAKNLADDMVRNTARDLLYYAVTQDAMLIFENLSRGFGRQGKRTFMAERQYTRMEDWLTAKLAYEGLPSKTYLSKTLAQYTSKTCSNCGFTITSADYDRMLEKLKKTATGWMTTINGKELKVEGQITYYNRYKRQNVVKDLSVELDRLSEESVNNDISSWTKGRSGEALSLLKKRFSHRPVQEKFVCLNCGFETHADEQAALNIARSWLFLRSQEYKKYQTNKTTGNTDKRAFVETWQSFYRKKLKEVWKPAV

SEQ ID NO: 33099 - protein, 978 aa, synthetic construct
  REGION 1..978: note = engineered CasX variant
QEIKRISKIRRRLVKDSNTKKAGKTGPMKTLLVRVMTPDLRERLENLRKKPENIPQPISNTSRANLNKLLTDYTEMKKAILHVYWEEFQKDPVGLMSRVAQPASKKIDQNKLKPEMDEKGNLTTAGFACSQCGQPLFVYKLEQVSEKGKAYTNYFGRCNVAEHEKLILLAQLKPEKDSDEAVTYSLGKFGQRALDFYSIHVTKESTHPVKPLAQIAGNRYASYPVGKALSDACMGTIASFLSKYQDIIIEHQKVVKGNQKRLESLRELAGKENLEYPSVTLPPQPHTKEGVDAYNEVIARVRMWVNLNLWQKLKLSRDDAKPLLRLKGFPSFPLVERQANEVDWWDMVCNVKKLINEKKEDGKVFWQNLAGYKRQEALRPYLSSEEDRKKGKKFARYQLGDLLLHLEKKHGEDWGKVYDEAWERIDKKVEGLSKHIKLEEERRSEDAQSKAALTDWLRAKASFVIEGLKEADKDEFCRCELKLQKWYGDLRGKPFAIEAENSILDISGFSKQYNCAFIWQKDGVKKLNLYLIINYFKGGKLRFKKIKPEAFEANRFYTVINKKSGEIVPMEVNFNFDDPNLIILPLAFGKRQGREFIWNDLLSLETGSLKLANGRVIEKTLYNRRTRQDEPALFVALTFERREVLDSSNIKPMNLIGVDRGENIPAVIALTDPEGCPLSRFKDSLGNPTHILRIGESYKEKQRTIQAKKEVEQRRAGGYSRKYASKAKNLADDMVRNTARDLLYYAVTQDAMLIFENLSRGFGRQGKRTFMAERQYTRMEDWLTAKLAYEGLPSKTYLSKTLAQYTSKTCSNCGFTITSADYDRVLEKLKKTATGWMTTINGKELKVEGQITYYNRYKRQNVVKDLSVELDRLSEESVNNDISSWTKGRQGEALSLLKKRFSHRPVQEKFVCLNCGFETHADEQAALNIARSWLFLRSQEYKKYQTNKTTGNTDKRAFVETWQSFYRKKLKEVWKPAV

SEQ ID NO: 33100 - protein, 978 aa, synthetic construct
  REGION 1..978: note = engineered CasX variant
QEIKRISKIRRRLVKDSNTKKAGKTGPMKTLLVRVMTPDLRERLENLRKKPENIPQPISNTSRANLNKLLTDYTEMKKAILHVYWEEFQKDPVGLMSRVAQPASKKIDQNKLKPEMDEKGNLTTAGFACSQCGQPLFVYKLEQVSEKGKAYTNYFGRCNVAEHEKLILLAQLKPEKDSDEAVTYSLGKFGQRALDFYSIHVTKESTHPVKPLAQIAGNRYASHPVGKALSDACMGTIASFLSKYQDIIIEHQKVVKGNQKRLESLRELAGKENLEYPSVTLPPQPHTKEGVDAYNEVIARVRMWVNLNLWQKLKLSRDDAKPLLRLKGFPSFPLVERQANEVDWWDMVCNVKKLINEKKEDGKVFWQNLAGYKRQEALRPYLSSEEDRKKGKKFARYQLGDLLLHLEKKHGEDWGKVYDEAWERIDKKVEGLSKHIKLEEERRSEDAQSKAALTDWLRAKASFVIEGLKEADKDEFCRCELKLQKWYGDLRGKPFAIEAENSILDISGFSKQYNCAFIWQKDGVKKLNLYLIINYFKGGKLRFKKIKPEAFEANRFYTVINKKSGEIVPMEVNFNFDDPNLIILPLAFGKRQGREFIWNDLLSLETGSLKLANGRVIEKTLYNRRTRQDEPALFVALTFERREVLDSSNIKPMNLIGVDRGENIPAVIALTDPEGCPLSRFKDSLGNPTHILRIGESYKEKQRTIQAKKEVEQRRAGGYSRKYASKAKNLADDMVRNTARDLLYYAVTQDAMLIFENLSRGFGRQGKRTFMAERQYTRMEDWLTAKLAYEGLPSKTYLSKTLAQYTSKTCSNCGFTITSADYDRVLEKLKKTATGWMTTINGKELKVEGQITYYNRYKRQNVVKDLSVELDRLSEESVNNDISSWTKGRQGEALSLLKKRFSHRPVQEKFVCLNCGFETHADEQAALNIARSWLFLRSQEYKKYQTNKTTGNTDKRAFVETWQSFYRKKLKEVWKPAV

SEQ ID NO: 33101 - protein, 978 aa, synthetic construct
  REGION 1..978: note = engineered CasX variant
QEIKRISKIRRRLVKDSNTKKAGKTGPMKTLLVRVMTPDLRERLENLRKKPENIPQPISNTSRANLNKLLTDYTEMKKAILHVYWEEFQKDPVGLMSRVAQPASKKIDQNKLKPEMDEKGNLTTAGFACSQCGQPLFVYKLEQVSEKGKAYTNYFGRCNVAEHEKLILLAQLKPEKDSDEAVTYSLGKFGQRALDFYSIHVTKESTHPVKPLAQIAGNRYASSPVGKALSDACMGTIASFLSKYQDIIIEHQKVVKGNQKRLESLRELAGKENLEYPSVTLPPQPHTKEGVDAYNEVIARVRMWVNLNLWQKLKLSRDDAKPLLRLKGFPSFPLVERQANEVDWWDMVCNVKKLINEKKEDGKVFWQNLAGYKRQEALRPYLSSEEDRKKGKKFARYQLGDLLLHLEKKHGEDWGKVYDEAWERIDKKVEGLSKHIKLEEERRSEDAQSKAALTDWLRAKASFVIEGLKEADKDEFCRCELKLQKWYGDLRGKPFAIEAENSILDISGFSKQYNCAFIWQKDGVKKLNLYLIINYFKGGKLRFKKIKPEAFEANRFYTVINKKSGEIVPMEVNFNFDDPNLIILPLAFGKRQGREFIWNDLLSLETGSLKLANGRVIEKTLYNRRTRQDEPALFVALTFERREVLDSSNIKPMNLIGVDRGENIPAVIALTDPEGCPLSRFKDSLGNPTHILRIGESYKEKQRTIQAKKEVEQRRAGGYSRKYASKAKNLADDMVRNTARDLLYYAVTQDAMLIFENLSRGFGRQGKRTFMAERQYTRMEDWLTAKLAYEGLPSKTYLSKTLAQYTSKTCSNCGFTITSADYDRVLEKLKKTATGWMTTINGKELKVEGQITYYNRYKRQNVVKDLSVELDRLSEESVNNDISSWTKGRQGEALSLLKKRFSHRPVQEKFVCLNCGFETHADEQAALNIARSWLFLRSQEYKKYQTNKTTGNTDKRAFVETWQSFYRKKLKEVWKPAV

SEQ ID NO: 33102 - protein, 978 aa, synthetic construct
  REGION 1..978: note = engineered CasX variant
QEIKRISKIRRRLVKDSNTKKAGKTGPMKTLLVRVMTPDLRERLENLRKKPENIPQPISNTSRANLNKLLTDYTEMKKAILHVYWEEFQKDPVGLMSRVAQPASKKIDQNKLKPEMDEKGNLTTAGFACSQCGQPLFVYKLEQVSEKGKAYTNYFGRCNVAEHEKLILLAQLKPEKDSDEAVTYSLGKFGQRALDFYSIHVTKESTHPVKPLAQIAGNRYASTPVGKALSDACMGTIASFLSKYQDIIIEHQKVVKGNQKRLESLRELAGKENLEYPSVTLPPQPHTKEGVDAYNEVIARVRMWVNLNLWQKLKLSRDDAKPLLRLKGFPSFPLVERQANEVDWWDMVCNVKKLINEKKEDGKVFWQNLAGYKRQEALRPYLSSEEDRKKGKKFARYQLGDLLLHLEKKHGEDWGKVYDEAWERIDKKVEGLSKHIKLEEERRSEDAQSKAALTDWLRAKASFVIEGLKEADKDEFCRCELKLQKWYGDLRGKPFAIEAENSILDISGFSKQYNCAFIWQKDGVKKLNLYLIINYFKGGKLRFKKIKPEAFEANRFYTVINKKSGEIVPMEVNFNFDDPNLIILPLAFGKRQGREFIWNDLLSLETGSLKLANGRVIEKTLYNRRTRQDEPALFVALTFERREVLDSSNIKPMNLIGVDRGENIPAVIALTDPEGCPLSRFKDSLGNPTHILRIGESYKEKQRTIQAKKEVEQRRAGGYSRKYASKAKNLADDMVRNTARDLLYYAVTQDAMLIFENLSRGFGRQGKRTFMAERQYTRMEDWLTAKLAYEGLPSKTYLSKTLAQYTSKTCSNCGFTITSADYDRVLEKLKKTATGWMTTINGKELKVEGQITYYNRYKRQNVVKDLSVELDRLSEESVNNDISSWTKGRQGEALSLLKKRFSHRPVQEKFVCLNCGFETHADEQAALNIARSWLFLRSQEYKKYQTNKTTGNTDKRAFVETWQSFYRKKLKEVWKPAV

SEQ ID NO: 33103 - protein, 978 aa, synthetic construct
  REGION 1..978: note = engineered CasX variant
QEIKRISKIRRRLVKDSNTKKAGKTGPMKTLLVRVMTPDLRERLENLRKKPENIPQPISNTSRANLNKLLTDYTEMKKAILHVYWEEFQKDPVGLMSRVAQPASKKIDQNKLKPEMDEKGNLTTAGFACSQCGQPLFVYKLEQVSEKGKAYTNYFGRCNVAEHEKLILLAQLKPEKDSDEAVTYSLGKFGQRALDFYSIHVTKESTHPVKPLAQIAGNRYASAPVGKALSDACMGTIASFLSKYQDIIIEHQKVVKGNQKRLESLRELAGKENLEYPSVTLPPQPHTKEGVDAYNEVIARVRMWVNLNLWQKLKLSRDDAKPLLRLKGFPSFPLVERQANEVDWWDMVCNVKKLINEKKEDGKVFWQNLAGYKRQEALRPYLSSEEDRKKGKKFARYQLGDLLLHLEKKHGEDWGKVYDEAWERIDKKVEGLSKHIKLEEERRSEDAQSKAALTDWLRAKASFVIEGLKEADKDEFCRCELKLQKWYGDLRGKPFAIEAENSILDISGFSKQYNCAFIWQKDGVKKLNLYLIINYFKGGKLRFKKIKPEAFEANRFYTVINKKSGEIVPMEVNFNFDDPNLIILPLAFGKRQGREFIWNDLLSLETGSLKLANGRVIEKTLYNRRTRQDEPALFVALTFERREVLDSSNIKPMNLIGVDRGENIPAVIALTDPEGCPLSRFKDSLGNPTHILRIGESYKEKQRTIQAKKEVEQRRAGGYSRKYASKAKNLADDMVRNTARDLLYYAVTQDAMLIFENLSRGFGRQGKRTFMAERQYTRMEDWLTAKLAYEGLPSKTYLSKTLAQYTSKTCSNCGFTITSADYDRVLEKLKKTATGWMTTINGKELKVEGQITYYNRYKRQNVVKDLSVELDRLSEESVNNDISSWTKGRQGEALSLLKKRFSHRPVQEKFVCLNCGFETHADEQAALNIARSWLFLRSQEYKKYQTNKTTGNTDKRAFVETWQSFYRKKLKEVWKPAV

SEQ ID NO: 33104 - protein, 978 aa, synthetic construct
  REGION 1..978: note = engineered CasX variant
QEIKRISKIRRRLVKDSNTKKAGKTGPMKTLLVRVMTPDLRERLENLRKKPENIPQPISNTSRANLNKLLTDYTEMKKAILHVYWEEFQKDPVGLMSRVAQPASKKIDQNKLKPEMDEKGNLTTAGFACSQCGQPLFVYKLEQVSEKGKAYTNYFGRCNVAEHEKLILLAQLKPEKDSDEAVTYSLGKFGQRALDFYSIHVTKESTHPVKPLAQIAGNRYASVPVGKALSDACMGTIASFLSKYQDIIIEHQKVVKGNQKRLESLRELAGKENLEYPSVTLPPQPHTKEGVDAYNEVIARVRMWVNLNLWQKLKLSRDDAKPLLRLKGFPSFPLVERQANEVDWWDMVCNVKKLINEKKEDGKVFWQNLAGYKRQEALRPYLSSEEDRKKGKKFARYQLGDLLLHLEKKHGEDWGKVYDEAWERIDKKVEGLSKHIKLEEERRSEDAQSKAALTDWLRAKASFVIEGLKEADKDEFCRCELKLQKWYGDLRGKPFAIEAENSILDISGFSKQYNCAFIWQKDGVKKLNLYLIINYFKGGKLRFKKIKPEAFEANRFYTVINKKSGEIVPMEVNFNFDDPNLIILPLAFGKRQGREFIWNDLLSLETGSLKLANGRVIEKTLYNRRTRQDEPALFVALTFERREVLDSSNIKPMNLIGVDRGENIPAVIALTDPEGCPLSRFKDSLGNPTHILRIGESYKEKQRTIQAKKEVEQRRAGGYSRKYASKAKNLADDMVRNTARDLLYYAVTQDAMLIFENLSRGFGRQGKRTFMAERQYTRMEDWLTAKLAYEGLPSKTYLSKTLAQYTSKTCSNCGFTITSADYDRVLEKLKKTATGWMTTINGKELKVEGQITYYNRYKRQNVVKDLSVELDRLSEESVNNDISSWTKGRQGEALSLLKKRFSHRPVQEKFVCLNCGFETHADEQAALNIARSWLFLRSQEYKKYQTNKTTGNTDKRAFVETWQSFYRKKLKEVWKPAV

SEQ ID NO: 33105 - protein, 978 aa, synthetic construct
  REGION 1..978: note = engineered CasX variant
QEIKRISKIRRRLVKDSNTKKAGKTGPMKTLLVRVMTPDLRERLENLRKKPENIPQPISNTSRANLNKLLTDYTEMKKAILHVYWEEFQKDPVGLMSRVAQPASKKIDQNKLKPEMDEKGNLTTAGFACSQCGQPLFVYKLEQVSEKGKAYTNYFGRCNVAEHEKLIKLAQLKPEKDSDEAVTYSLGKFGQRALDFYSIHVTKESTHPVKPLAQIAGNRYASGPVGKALSDACMGTIASFLSKYQDIIIEHQKVVKGNQKRLESLRELAGKENLEYPSVTLPPQPHTKEGVDAYNEVIARVRMWVNLNLWQKLKLSRDDAKPLLRLKGFPSFPLVERQANEVDWWDMVCNVKKLINEKKEDGKVFWQNLAGYKRQEALRPYLSSEEDRKKGKKFARYQLGDLLLHLEKKHGEDWGKVYDEAWERIDKKVEGLSKHIKLEEERRSEDAQSKAALTDWLRAKASFVIEGLKEADKDEFCRCELKLQKWYGDLRGKPFAIEAENSILDISGFSKQYNCAFIWQKDGVKKLNLYLIINYFKGGKLRFKKIKPEAFEANRFYTVINKKSGEIVPMEVNFNFDDPNLIILPLAFGKRQGREFIWNDLLSLETGSLKLANGRVIEKTLYNRRTRQDEPALFVALTFERREVLDSSNIKPMNLIGVDRGENIPAVIALTDPEGCPLSRFKDSLGNPTHILRIGESYKEKQRTIQAKKEVEQRRAGGYSRKYASKAKNLADDMVRNTARDLLYYAVTQDAMLIFENLSRGFGRQGKRTFMAERQYTRMEDWLTAKLAYEGLPSKTYLSKTLAQYTSKTCSNCGFTITSADYDRVLEKLKKTATGWMTTINGKELKVEGQITYYNRYKRQNVVKDLSVELDRLSEESVNNDISSWTKGRQGEALSLLKKRFSHRPVQEKFVCLNCGFETHADEQAALNIARSWLFLRSQEYKKYQTNKTTGNTDKRAFVETWQSFYRKKLKEVWKPAV

SEQ ID NO: 33106 - protein, 977 aa, synthetic construct
  REGION 1..977: note = engineered CasX variant
QEIKRISKIRRRLVKDSNTKKAGKTGPMKTLLVRVMTPDLRERLENLRKKPENIPQPISNTSRANLNKLLTDYTEMKKAILHVYWEEFQKDPVGLMSRVAQPASKKIDQNKLKPEMDEKGNLTTAGFACSQCGQPLFVYKLEQVSEKGKAYTNYFGRCNVAEHEKLILLAQLKPEKDSDEAVTYSLGKFGQRALDFYSIHVTKESTHPVKPLAQIAGNRYASPVGKALSDACMGTIASFLSKYQDIIIEHQKVVKGNQKRLESLRELAGKENLEYPSVTLPPQPHTKEGVDAYNEVIARVRMWVNLNLWQKLKLSRDDAKPLLRLKGFPSFPLVERQANEVDWWDMVCNVKKLINEKKEDGKVFWQNLAGYKRQEALRPYLSSEEDRKKGKKFARYQLGDLLLHLEKKHGEDWGKVYDEAWERIDKKVEGLSKHIKLEEERRSEDAQSKAALTDWLRAKASFVIEGLKEADKDEFCRCELKLQKWYGDLRGKPFAIEAENSILDISGFSKQYNCAFIWQKDGVKKLNLYLIINYFKGGKLRFKKIKPEAFEANRFYTVINKKSGEIVPMEVNFNFDDPNLIILPLAFGKRQGREFIWNDLLSLETGSLKLANGRVIEKTLYNRRTRQDEPALFVALTFERREVLDSSNIKPMNLIGVDRGENIPAVIALTDPEGCPLSRFKDSLGNPTHILRIGESYKEKQRTIQAKKEVEQRRAGGYSRKYASKAKNLADDMVRNTARDLLYYAVTQDAMLIFENLSRGFGRQGKRTFMAERQYTRMEDWLTAKLAYEGLPSKTYLSKTLAQYTSKTCSNCGFTITSADYDRVLEKLKKTATGWMTTINGKELKVEGQITYYNRYKRQNVVKDLSVELDRLSEESVNNDISSWTKGRQGEALSLLKKRFSHRPVQEKFVCLNCGFETHADEQAALNIARSWLFLRSQEYKKYQTNKTTGNTDKRAFVETWQSFYRKKLKEVWKPAV

SEQ ID NO: 33107 - protein, 978 aa, synthetic construct
  REGION 1..978: note = engineered CasX variant
QEIKRISKIRRRLVKDSNTKKAGKTGPMKTLLVRVMTPDLRERLENLRKKPENIPQPISNTSRANLNKLLTDYTEMKKAILHVYWEEFQKDPVGLMSRVAQPASKKIDQNKLKPEMDEKGNLTTAGFACSQCGQPLFVYKLEQVSEKGKAYTNYFGRCNVAEHEKLILLAQLKPEKDSDEAVTYSLGKFGQRALDFYSIHVTKESTHPVKPLAQIAGNRYASYPVGKALSDACMGTIASFLSKYQDIIIEHQKVVKGNQKRLESLRELAGKENLEYPSVTLPPQPHTKEGVDAYNEVIARVRMWVNLNLWQKLKLSRDDAKPLLRLKGFPSFPLVERQANEVDWWDMVCNVKKLINEKKEDGKVFWQNLAGYKRQEALRPYLSSEEDRKKGKKFARYQLGDLLLHLEKKHGEDWGKVYDEAWERIDKKVEGLSKHIKLEEERRSEDAQSKAALTDWLRAKASFVIEGLKEADKDEFCRCELKLQKWYGDLRGKPFAIEAENSILDISGFSKQYNCAFIWQKDGVKKLNLYLIINYFKGGKLRFKKIKPEAFEANRFYTVINKKSGEIVPMEVNFNFDDPNLIILPLAFGKRQGREFIWNDLLSLETGSLKLANGRVIEKTLYNRRTRQDEPALFVALTFERREVLDSSNIKPMNLIGVDRGENIPAVIALTDPEGCPLSRFKDSLGNPTHILRIGESYKEKQRTIQAKKEVEQRRAGGYSRKYASKAKNLADDMVRNTARDLLYYAVTQDAMLIFENLSRGFGRQGKRTFMAERQYTRMEDWLTAKLAYEGLPSKTYLSKTLAQYTSKTCSNCGFTITSADYDRVLEKLKKTATGWMTTINGKELKVEGQITYYNRYKRQNVVKDLSVELDRLSEESVNNDISSWTKGRSGEALSLLKKRFSHRPVQEKFVCLNCEFETHADEQAALNIARSWLFLRSQEYKKYQTNKTTGNTDKRAFVETWQSFYRKKLKEVWKPAV

SEQ ID NO: 33108 - protein, 978 aa, synthetic construct
  REGION 1..978: note = engineered CasX variant
QEIKRISKIRRRLVKDSNTKKAGKTGPMKTLLVRVMTPDLRERLENLRKKPENIPQPISNTSRANLNKLLTDYTEMKKAILHVYWEEFQKDPVGLMSRVAQPASKKIDQNKLKPEMDEKGNLTTAGFACSQCGQPLFVYKLEQVSEKGKAYTNYFGRCNVAEHEKLILLAQLKPEKDSDEAVTYSLGKFGQRALDFYSIHVTKESTHPVKPLAQIAGNRYASHPVGKALSDACMGTIASFLSKYQDIIIEHQKVVKGNQKRLESLRELAGKENLEYPSVTLPPQPHTKEGVDAYNEVIARVRMWVNLNLWQKLKLSRDDAKPLLRLKGFPSFPLVERQANEVDWWDMVCNVKKLINEKKEDGKVFWQNLAGYKRQEALRPYLSSEEDRKKGKKFARYQLGDLLLHLEKKHGEDWGKVYDEAWERIDKKVEGLSKHIKLEEERRSEDAQSKAALTDWLRAKASFVIEGLKEADKDEFCRCELKLQKWYGDLRGKPFAIEAENSILDISGFSKQYNCAFIWQKDGVKKLNLYLIINYFKGGKLRFKKIKPEAFEANRFYTVINKKSGEIVPMEVNFNFDDPNLIILPLAFGKRQGREFIWNDLLSLETGSLKLANGRVIEKTLYNRRTRQDEPALFVALTFERREVLDSSNIKPMNLIGVDRGENIPAVIALTDPEGCPLSRFKDSLGNPTHILRIGESYKEKQRTIQAKKEVEQRRAGGYSRKYASKAKNLADDMVRNTARDLLYYAVTQDAMLIFENLSRGFGRQGKRTFMAERQYTRMEDWLTAKLAYEGLPSKTYLSKTLAQYTSKTCSNCGFTITSADYDRVLEKLKKTATGWMTTINGKELKVEGQITYYNRYKRQNVVKDLSVELDRLSEESVNNDISSWTKGRSGEALSLLKKRFSHRPVQEKFVCLNCEFETHADEQAALNIARSWLFLRSQEYKKYQTNKTTGNTDKRAFVETWQSFYRKKLKEVWKPAV

SEQ ID NO: 33109 - protein, 978 aa, synthetic construct
  REGION 1..978: note = engineered CasX variant
QEIKRISKIRRRLVKDSNTKKAGKTGPMKTLLVRVMTPDLRERLENLRKKPENIPQPISNTSRANLNKLLTDYTEMKKAILHVYWEEFQKDPVGLMSRVAQPASKKIDQNKLKPEMDEKGNLTTAGFACSQCGQPLFVYKLEQVSEKGKAYTNYFGRCNVAEHEKLILLAQLKPEKDSDEAVTYSLGKFGQRALDFYSIHVTKESTHPVKPLAQIAGNRYASSPVGKALSDACMGTIASFLSKYQDIIIEHQKVVKGNQKRLESLRELAGKENLEYPSVTLPPQPHTKEGVDAYNEVIARVRMWVNLNLWQKLKLSRDDAKPLLRLKGFPSFPLVERQANEVDWWDMVCNVKKLINEKKEDGKVFWQNLAGYKRQEALRPYLSSEEDRKKGKKFARYQLGDLLLHLEKKHGEDWGKVYDEAWERIDKKVEGLSKHIKLEEERRSEDAQSKAALTDWLRAKASFVIEGLKEADKDEFCRCELKLQKWYGDLRGKPFAIEAENSILDISGFSKQYNCAFIWQKDGVKKLNLYLIINYFKGGKLRFKKIKPEAFEANRFYTVINKKSGEIVPMEVNFNFDDPNLIILPLAFGKRQGREFIWNDLLSLETGSLKLANGRVIEKTLYNRRTRQDEPALFVALTFERREVLDSSNIKPMNLIGVDRGENIPAVIALTDPEGCPLSRFKDSLGNPTHILRIGESYKEKQRTIQAKKEVEQRRAGGYSRKYASKAKNLADDMVRNTARDLLYYAVTQDAMLIFENLSRGFGRQGKRTFMAERQYTRMEDWLTAKLAYEGLPSKTYLSKTLAQYTSKTCSNCGFTITSADYDRVLEKLKKTATGWMTTINGKELKVEGQITYYNRYKRQNVVKDLSVELDRLSEESVNNDISSWTKGRSGEALSLLKKRFSHRPVQEKFVCLNCEFETHADEQAALNIARSWLFLRSQEYKKYQTNKTTGNTDKRAFVETWQSFYRKKLKEVWKPAV

SEQ ID NO: 33110 - protein, 978 aa, synthetic construct
  REGION 1..978: note = engineered CasX variant
QEIKRISKIRRRLVKDSNTKKAGKTGPMKTLLVRVMTPDLRERLENLRKKPENIPQPISNTSRANLNKLLTDYTEMKKAILHVYWEEFQKDPVGLMSRVAQPASKKIDQNKLKPEMDEKGNLTTAGFACSQCGQPLFVYKLEQVSEKGKAYTNYFGRCNVAEHEKLILLAQLKPEKDSDEAVTYSLGKFGQRALDFYSIHVTKESTHPVKPLAQIAGNRYASTPVGKALSDACMGTIASFLSKYQDIIIEHQKVVKGNQKRLESLRELAGKENLEYPSVTLPPQPHTKEGVDAYNEVIARVRMWVNLNLWQKLKLSRDDAKPLLRLKGFPSFPLVERQANEVDWWDMVCNVKKLINEKKEDGKVFWQNLAGYKRQEALRPYLSSEEDRKKGKKFARYQLGDLLLHLEKKHGEDWGKVYDEAWERIDKKVEGLSKHIKLEEERRSEDAQSKAALTDWLRAKASFVIEGLKEADKDEFCRCELKLQKWYGDLRGKPFAIEAENSILDISGFSKQYNCAFIWQKDGVKKLNLYLIINYFKGGKLRFKKIKPEAFEANRFYTVINKKSGEIVPMEVNFNFDDPNLIILPLAFGKRQGREFIWNDLLSLETGSLKLANGRVIEKTLYNRRTRQDEPALFVALTFERREVLDSSNIKPMNLIGVDRGENIPAVIALTDPEGCPLSRFKDSLGNPTHILRIGESYKEKQRTIQAKKEVEQRRAGGYSRKYASKAKNLADDMVRNTARDLLYYAVTQDAMLIFENLSRGFGRQGKRTFMAERQYTRMEDWLTAKLAYEGLPSKTYLSKTLAQYTSKTCSNCGFTITSADYDRVLEKLKKTATGWMTTINGKELKVEGQITYYNRYKRQNVVKDLSVELDRLSEESVNNDISSWTKGRSGEALSLLKKRFSHRPVQEKFVCLNCEFETHADEQAALNIARSWLFLRSQEYKKYQTNKTTGNTDKRAFVETWQSFYRKKLKEVWKPAV

SEQ ID NO: 33111 - protein, 978 aa, synthetic construct
  REGION 1..978: note = engineered CasX variant
QEIKRISKIRRRLVKDSNTKKAGKTGPMKTLLVRVMTPDLRERLENLRKKPENIPQPISNTSRANLNKLLTDYTEMKKAILHVYWEEFQKDPVGLMSRVAQPASKKIDQNKLKPEMDEKGNLTTAGFACSQCGQPLFVYKLEQVSEKGKAYTNYFGRCNVAEHEKLILLAQLKPEKDSDEAVTYSLGKFGQRALDFYSIHVTKESTHPVKPLAQIAGNRYASAPVGKALSDACMGTIASFLSKYQDIIIEHQKVVKGNQKRLESLRELAGKENLEYPSVTLPPQPHTKEGVDAYNEVIARVRMWVNLNLWQKLKLSRDDAKPLLRLKGFPSFPLVERQANEVDWWDMVCNVKKLINEKKEDGKVFWQNLAGYKRQEALRPYLSSEEDRKKGKKFARYQLGDLLLHLEKKHGEDWGKVYDEAWERIDKKVEGLSKHIKLEEERRSEDAQSKAALTDWLRAKASFVIEGLKEADKDEFCRCELKLQKWYGDLRGKPFAIEAENSILDISGFSKQYNCAFIWQKDGVKKLNLYLIINYFKGGKLRFKKIKPEAFEANRFYTVINKKSGEIVPMEVNFNFDDPNLIILPLAFGKRQGREFIWNDLLSLETGSLKLANGRVIEKTLYNRRTRQDEPALFVALTFERREVLDSSNIKPMNLIGVDRGENIPAVIALTDPEGCPLSRFKDSLGNPTHILRIGESYKEKQRTIQAKKEVEQRRAGGYSRKYASKAKNLADDMVRNTARDLLYYAVTQDAMLIFENLSRGFGRQGKRTFMAERQYTRMEDWLTAKLAYEGLPSKTYLSKTLAQYTSKTCSNCGFTITSADYDRVLEKLKKTATGWMTTINGKELKVEGQITYYNRYKRQNVVKDLSVELDRLSEESVNNDISSWTKGRSGEALSLLKKRFSHRPVQEKFVCLNCEFETHADEQAALNIARSWLFLRSQEYKKYQTNKTTGNTDKRAFVETWQSFYRKKLKEVWKPAV

SEQ ID NO: 33112 - protein, 978 aa, synthetic construct
  REGION 1..978: note = engineered CasX variant
QEIKRISKIRRRLVKDSNTKKAGKTGPMKTLLVRVMTPDLRERLENLRKKPENIPQPISNTSRANLNKLLTDYTEMKKAILHVYWEEFQKDPVGLMSRVAQPASKKIDQNKLKPEMDEKGNLTTAGFACSQCGQPLFVYKLEQVSEKGKAYTNYFGRCNVAEHEKLILLAQLKPEKDSDEAVTYSLGKFGQRALDFYSIHVTKESTHPVKPLAQIAGNRYASVPVGKALSDACMGTIASFLSKYQDIIIEHQKVVKGNQKRLESLRELAGKENLEYPSVTLPPQPHTKEGVDAYNEVIARVRMWVNLNLWQKLKLSRDDAKPLLRLKGFPSFPLVERQANEVDWWDMVCNVKKLINEKKEDGKVFWQNLAGYKRQEALRPYLSSEEDRKKGKKFARYQLGDLLLHLEKKHGEDWGKVYDEAWERIDKKVEGLSKHIKLEEERRSEDAQSKAALTDWLRAKASFVIEGLKEADKDEFCRCELKLQKWYGDLRGKPFAIEAENSILDISGFSKQYNCAFIWQKDGVKKLNLYLIINYFKGGKLRFKKIKPEAFEANRFYTVINKKSGEIVPMEVNFNFDDPNLIILPLAFGKRQGREFIWNDLLSLETGSLKLANGRVIEKTLYNRRTRQDEPALFVALTFERREVLDSSNIKPMNLIGVDRGENIPAVIALTDPEGCPLSRFKDSLGNPTHILRIGESYKEKQRTIQAKKEVEQRRAGGYSRKYASKAKNLADDMVRNTARDLLYYAVTQDAMLIFENLSRGFGRQGKRTFMAERQYTRMEDWLTAKLAYEGLPSKTYLSKTLAQYTSKTCSNCGFTITSADYDRVLEKLKKTATGWMTTINGKELKVEGQITYYNRYKRQNVVKDLSVELDRLSEESVNNDISSWTKGRSGEALSLLKKRFSHRPVQEKFVCLNCEFETHADEQAALNIARSWLFLRSQEYKKYQTNKTTGNTDKRAFVETWQSFYRKKLKEVWKPAV

SEQ ID NO: 33113 - protein, 978 aa, synthetic construct
  REGION 1..978: note = engineered CasX variant
QEIKRISKIRRRLVKDSNTKKAGKTGPMKTLLVRVMTPDLRERLENLRKKPENIPQPISNTSRANLNKLLTDYTEMKKAILHVYWEEFQKDPVGLMSRVAQPASKKIDQNKLKPEMDEKGNLTTAGFACSQCGQPLFVYKLEQVSEKGKAYTNYFGRCNVAEHEKLIKLAQLKPEKDSDEAVTYSLGKFGQRALDFYSIHVTKESTHPVKPLAQIAGNRYASGPVGKALSDACMGTIASFLSKYQDIIIEHQKVVKGNQKRLESLRELAGKENLEYPSVTLPPQPHTKEGVDAYNEVIARVRMWVNLNLWQKLKLSRDDAKPLLRLKGFPSFPLVERQANEVDWWDMVCNVKKLINEKKEDGKVFWQNLAGYKRQEALRPYLSSEEDRKKGKKFARYQLGDLLLHLEKKHGEDWGKVYDEAWERIDKKVEGLSKHIKLEEERRSEDAQSKAALTDWLRAKASFVIEGLKEADKDEFCRCELKLQKWYGDLRGKPFAIEAENSILDISGFSKQYNCAFIWQKDGVKKLNLYLIINYFKGGKLRFKKIKPEAFEANRFYTVINKKSGEIVPMEVNFNFDDPNLIILPLAFGKRQGREFIWNDLLSLETGSLKLANGRVIEKTLYNRRTRQDEPALFVALTFERREVLDSSNIKPMNLIGVDRGENIPAVIALTDPEGCPLSRFKDSLGNPTHILRIGESYKEKQRTIQAKKEVEQRRAGGYSRKYASKAKNLADDMVRNTARDLLYYAVTQDAMLIFENLSRGFGRQGKRTFMAERQYTRMEDWLTAKLAYEGLPSKTYLSKTLAQYTSKTCSNCGFTITSADYDRVLEKLKKTATGWMTTINGKELKVEGQITYYNRYKRQNVVKDLSVELDRLSEESVNNDISSWTKGRSGEALSLLKKRFSHRPVQEKFVCLNCEFETHADEQAALNIARSWLFLRSQEYKKYQTNKTTGNTDKRAFVETWQSFYRKKLKEVWKPAV

SEQ ID NO: 33114 - protein, 977 aa, synthetic construct
  REGION 1..977: note = engineered CasX variant
QEIKRISKIRRRLVKDSNTKKAGKTGPMKTLLVRVMTPDLRERLENLRKKPENIPQPISNTSRANLNKLLTDYTEMKKAILHVYWEEFQKDPVGLMSRVAQPASKKIDQNKLKPEMDEKGNLTTAGFACSQCGQPLFVYKLEQVSEKGKAYTNYFGRCNVAEHEKLILLAQLKPEKDSDEAVTYSLGKFGQRALDFYSIHVTKESTHPVKPLAQIAGNRYASPVGKALSDACMGTIASFLSKYQDIIIEHQKVVKGNQKRLESLRELAGKENLEYPSVTLPPQPHTKEGVDAYNEVIARVRMWVNLNLWQKLKLSRDDAKPLLRLKGFPSFPLVERQANEVDWWDMVCNVKKLINEKKEDGKVFWQNLAGYKRQEALRPYLSSEEDRKKGKKFARYQLGDLLLHLEKKHGEDWGKVYDEAWERIDKKVEGLSKHIKLEEERRSEDAQSKAALTDWLRAKASFVIEGLKEADKDEFCRCELKLQKWYGDLRGKPFAIEAENSILDISGFSKQYNCAFIWQKDGVKKLNLYLIINYFKGGKLRFKKIKPEAFEANRFYTVINKKSGEIVPMEVNFNFDDPNLIILPLAFGKRQGREFIWNDLLSLETGSLKLANGRVIEKTLYNRRTRQDEPALFVALTFERREVLDSSNIKPMNLIGVDRGENIPAVIALTDPEGCPLSRFKDSLGNPTHILRIGESYKEKQRTIQAKKEVEQRRAGGYSRKYASKAKNLADDMVRNTARDLLYYAVTQDAMLIFENLSRGFGRQGKRTFMAERQYTRMEDWLTAKLAYEGLPSKTYLSKTLAQYTSKTCSNCGFTITSADYDRVLEKLKKTATGWMTTINGKELKVEGQITYYNRYKRQNVVKDLSVELDRLSEESVNNDISSWTKGRSGEALSLLKKRFSHRPVQEKFVCLNCEFETHADEQAALNIARSWLFLRSQEYKKYQTNKTTGNTDKRAFVETWQSFYRKKLKEVWKPAV

SEQ ID NO: 33115 - protein, 979 aa, synthetic construct
  REGION 1..979: note = engineered CasX variant
QEIKRISKIRRRLVKDSNTKKAGKTGPMKTLLVRVMTPDLRERLENLRKKPENIPQPISNTSRANLNKLLTDYTEMKKAILHVYWEEFQKDPVGLMSRVAQPASKKIDQNKLKPEMDEKGNLTTAGFACSQCGQPLFVYKLEQVSEKGKAYTNYFGRCNVAEHEKLILLAQLKPEKDSDEAVTYSLGKFGQRALDFYSIHVTKESTHPVKPLAQIAGNRYASYPVGKALSDACMGTIASFLSKYQDIIIEHQKVVKGNQKRLESLRELAGKENLEYPSVTLPPQPHTKEGVDAYNEVIARVRMWVNLNLWQKLKLSRDDAKPLLRLKGFPSFPLVERQANEVDWWDMVCNVKKLINEKKEDGKVFWQNLAGYKRQEALRPYLSSEEDRKKGKKFARYQLGDLLLHLEKKHGEDWGKVYDEAWERIDKKVEGLSKHIKLEEERRSEDAQSKAALTDWLRAKASFVIEGLKEADKDEFCRCELKLQKWYGDLRGKPFAIEAENSILDISGFSKQYNCAFIWQKDGVKKLNLYLIINYFKGGKLRFKKIKPEAFEANRFYTVINKKSGEIVPMEVNFNFDDPNLIILPLAFGKRQGREFIWNDLLSLETGSLKLANGRVIEKTLYNRRTRQDEPALFVALTFERREVLDSSNIKPMNLIGVDRGENIPAVIALTDPEGCPLSRFKDSLGNPTHILRIGESYKEKQRTIQAKKEVEQRRAGGYSRKYASKAKNLADDMVRNTARDLLYYAVTQDAMLIFENLSRGFGRQGKRTFMAERQYTRMEDWLTAKLAYEGLPSKTYLSKTLAQYTSKTCSNCGFTITSADYDRVLEKLKKTATGWMTTINGKELKVEGQITYYNRYKRQNVVKDLSVELDRLSEESVNNDISSWTKGRSGEALSLLKKRFSHRPVQEKFVCLNCGFETHADEQAALNIARSWLFLRSQEYKKYQTNKTSTGNTDKRAFVETWQSFYRKKLKEVWKPAV

SEQ ID NO: 33116 - protein, 979 aa, synthetic construct
  REGION 1..979: note = engineered CasX variant
QEIKRISKIRRRLVKDSNTKKAGKTGPMKTLLVRVMTPDLRERLENLRKKPENIPQPISNTSRANLNKLLTDYTEMKKAILHVYWEEFQKDPVGLMSRVAQPASKKIDQNKLKPEMDEKGNLTTAGFACSQCGQPLFVYKLEQVSEKGKAYTNYFGRCNVAEHEKLILLAQLKPEKDSDEAVTYSLGKFGQRALDFYSIHVTKESTHPVKPLAQIAGNRYASHPVGKALSDACMGTIASFLSKYQDIIIEHQKVVKGNQKRLESLRELAGKENLEYPSVTLPPQPHTKEGVDAYNEVIARVRMWVNLNLWQKLKLSRDDAKPLLRLKGFPSFPLVERQANEVDWWDMVCNVKKLINEKKEDGKVFWQNLAGYKRQEALRPYLSSEEDRKKGKKFARYQLGDLLLHLEKKHGEDWGKVYDEAWERIDKKVEGLSKHIKLEEERRSEDAQSKAALTDWLRAKASFVIEGLKEADKDEFCRCELKLQKWYGDLRGKPFAIEAENSILDISGFSKQYNCAFIWQKDGVKKLNLYLIINYFKGGKLRFKKIKPEAFEANRFYTVINKKSGEIVPMEVNFNFDDPNLIILPLAFGKRQGREFIWNDLLSLETGSLKLANGRVIEKTLYNRRTRQDEPALFVALTFERREVLDSSNIKPMNLIGVDRGENIPAVIALTDPEGCPLSRFKDSLGNPTHILRIGESYKEKQRTIQAKKEVEQRRAGGYSRKYASKAKNLADDMVRNTARDLLYYAVTQDAMLIFENLSRGFGRQGKRTFMAERQYTRMEDWLTAKLAYEGLPSKTYLSKTLAQYTSKTCSNCGFTITSADYDRVLEKLKKTATGWMTTINGKELKVEGQITYYNRYKRQNVVKDLSVELDRLSEESVNNDISSWTKGRSGEALSLLKKRFSHRPVQEKFVCLNCGFETHADEQAALNIARSWLFLRSQEYKKYQTNKTSTGNTDKRAFVETWQSFYRKKLKEVWKPAV

SEQ ID NO: 33117 - protein, 979 aa, synthetic construct
  REGION 1..979: note = engineered CasX variant
QEIKRISKIRRRLVKDSNTKKAGKTGPMKTLLVRVMTPDLRERLENLRKKPENIPQPISNTSRANLNKLLTDYTEMKKAILHVYWEEFQKDPVGLMSRVAQPASKKIDQNKLKPEMDEKGNLTTAGFACSQCGQPLFVYKLEQVSEKGKAYTNYFGRCNVAEHEKLILLAQLKPEKDSDEAVTYSLGKFGQRALDFYSIHVTKESTHPVKPLAQIAGNRYASSPVGKALSDACMGTIASFLSKYQDIIIEHQKVVKGNQKRLESLRELAGKENLEYPSVTLPPQPHTKEGVDAYNEVIARVRMWVNLNLWQKLKLSRDDAKPLLRLKGFPSFPLVERQANEVDWWDMVCNVKKLINEKKEDGKVFWQNLAGYKRQEALRPYLSSEEDRKKGKKFARYQLGDLLLHLEKKHGEDWGKVYDEAWERIDKKVEGLSKHIKLEEERRSEDAQSKAALTDWLRAKASFVIEGLKEADKDEFCRCELKLQKWYGDLRGKPFAIEAENSILDISGFSKQYNCAFIWQKDGVKKLNLYLIINYFKGGKLRFKKIKPEAFEANRFYTVINKKSGEIVPMEVNFNFDDPNLIILPLAFGKRQGREFIWNDLLSLETGSLKLANGRVIEKTLYNRRTRQDEPALFVALTFERREVLDSSNIKPMNLIGVDRGENIPAVIALTDPEGCPLSRFKDSLGNPTHILRIGESYKEKQRTIQAKKEVEQRRAGGYSRKYASKAKNLADDMVRNTARDLLYYAVTQDAMLIFENLSRGFGRQGKRTFMAERQYTRMEDWLTAKLAYEGLPSKTYLSKTLAQYTSKTCSNCGFTITSADYDRVLEKLKKTATGWMTTINGKELKVEGQITYYNRYKRQNVVKDLSVELDRLSEESVNNDISSWTKGRSGEALSLLKKRFSHRPVQEKFVCLNCGFETHADEQAALNIARSWLFLRSQEYKKYQTNKTSTGNTDKRAFVETWQSFYRKKLKEVWKPAV

SEQ ID NO: 33118 - protein, 979 aa, synthetic construct
  REGION 1..979: note = engineered CasX variant
QEIKRISKIRRRLVKDSNTKKAGKTGPMKTLLVRVMTPDLRERLENLRKKPENIPQPISNTSRANLNKLLTDYTEMKKAILHVYWEEFQKDPVGLMSRVAQPASKKIDQNKLKPEMDEKGNLTTAGFACSQCGQPLFVYKLEQVSEKGKAYTNYFGRCNVAEHEKLILLAQLKPEKDSDEAVTYSLGKFGQRALDFYSIHVTKESTHPVKPLAQIAGNRYASTPVGKALSDACMGTIASFLSKYQDIIIEHQKVVKGNQKRLESLRELAGKENLEYPSVTLPPQPHTKEGVDAYNEVIARVRMWVNLNLWQKLKLSRDDAKPLLRLKGFPSFPLVERQANEVDWWDMVCNVKKLINEKKEDGKVFWQNLAGYKRQEALRPYLSSEEDRKKGKKFARYQLGDLLLHLEKKHGEDWGKVYDEAWERIDKKVEGLSKHIKLEEERRSEDAQSKAALTDWLRAKASFVIEGLKEADKDEFCRCELKLQKWYGDLRGKPFAIEAENSILDISGFSKQYNCAFIWQKDGVKKLNLYLIINYFKGGKLRFKKIKPEAFEANRFYTVINKKSGEIVPMEVNFNFDDPNLIILPLAFGKRQGREFIWNDLLSLETGSLKLANGRVIEKTLYNRRTRQDEPALFVALTFERREVLDSSNIKPMNLIGVDRGENIPAVIALTDPEGCPLSRFKDSLGNPTHILRIGESYKEKQRTIQAKKEVEQRRAGGYSRKYASKAKNLADDMVRNTARDLLYYAVTQDAMLIFENLSRGFGRQGKRTFMAERQYTRMEDWLTAKLAYEGLPSKTYLSKTLAQYTSKTCSNCGFTITSADYDRVLEKLKKTATGWMTTINGKELKVEGQITYYNRYKRQNVVKDLSVELDRLSEESVNNDISSWTKGRSGEALSLLKKRFSHRPVQEKFVCLNCGFETHADEQAALNIARSWLFLRSQEYKKYQTNKTSTGNTDKRAFVETWQSFYRKKLKEVWKPAV

SEQ ID NO: 33119 - protein, 979 aa, synthetic construct
  REGION 1..979: note = engineered CasX variant
QEIKRISKIRRRLVKDSNTKKAGKTGPMKTLLVRVMTPDLRERLENLRKKPENIPQPISNTSRANLNKLLTDYTEMKKAILHVYWEEFQKDPVGLMSRVAQPASKKIDQNKLKPEMDEKGNLTTAGFACSQCGQPLFVYKLEQVSEKGKAYTNYFGRCNVAEHEKLILLAQLKPEKDSDEAVTYSLGKFGQRALDFYSIHVTKESTHPVKPLAQIAGNRYASAPVGKALSDACMGTIASFLSKYQDIIIEHQKVVKGNQKRLESLRELAGKENLEYPSVTLPPQPHTKEGVDAYNEVIARVRMWVNLNLWQKLKLSRDDAKPLLRLKGFPSFPLVERQANEVDWWDMVCNVKKLINEKKEDGKVFWQNLAGYKRQEALRPYLSSEEDRKKGKKFARYQLGDLLLHLEKKHGEDWGKVYDEAWERIDKKVEGLSKHIKLEEERRSEDAQSKAALTDWLRAKASFVIEGLKEADKDEFCRCELKLQKWYGDLRGKPFAIEAENSILDISGFSKQYNCAFIWQKDGVKKLNLYLIINYFKGGKLRFKKIKPEAFEANRFYTVINKKSGEIVPMEVNFNFDDPNLIILPLAFGKRQGREFIWNDLLSLETGSLKLANGRVIEKTLYNRRTRQDEPALFVALTFERREVLDSSNIKPMNLIGVDRGENIPAVIALTDPEGCPLSRFKDSLGNPTHILRIGESYKEKQRTIQAKKEVEQRRAGGYSRKYASKAKNLADDMVRNTARDLLYYAVTQDAMLIFENLSRGFGRQGKRTFMAERQYTRMEDWLTAKLAYEGLPSKTYLSKTLAQYTSKTCSNCGFTITSADYDRVLEKLKKTATGWMTTINGKELKVEGQITYYNRYKRQNVVKDLSVELDRLSEESVNNDISSWTKGRSGEALSLLKKRFSHRPVQEKFVCLNCGFETHADEQAALNIARSWLFLRSQEYKKYQTNKTSTGNTDKRAFVETWQSFYRKKLKEVWKPAV

SEQ ID NO: 33120 - protein, 979 aa, synthetic construct
  REGION 1..979: note = engineered CasX variant
QEIKRISKIRRRLVKDSNTKKAGKTGPMKTLLVRVMTPDLRERLENLRKKPENIPQPISNTSRANLNKLLTDYTEMKKAILHVYWEEFQKDPVGLMSRVAQPASKKIDQNKLKPEMDEKGNLTTAGFACSQCGQPLFVYKLEQVSEKGKAYTNYFGRCNVAEHEKLILLAQLKPEKDSDEAVTYSLGKFGQRALDFYSIHVTKESTHPVKPLAQIAGNRYASVPVGKALSDACMGTIASFLSKYQDIIIEHQKVVKGNQKRLESLRELAGKENLEYPSVTLPPQPHTKEGVDAYNEVIARVRMWVNLNLWQKLKLSRDDAKPLLRLKGFPSFPLVERQANEVDWWDMVCNVKKLINEKKEDGKVFWQNLAGYKRQEALRPYLSSEEDRKKGKKFARYQLGDLLLHLEKKHGEDWGKVYDEAWERIDKKVEGLSKHIKLEEERRSEDAQSKAALTDWLRAKASFVIEGLKEADKDEFCRCELKLQKWYGDLRGKPFAIEAENSILDISGFSKQYNCAFIWQKDGVKKLNLYLIINYFKGGKLRFKKIKPEAFEANRFYTVINKKSGEIVPMEVNFNFDDPNLIILPLAFGKRQGREFIWNDLLSLETGSLKLANGRVIEKTLYNRRTRQDEPALFVALTFERREVLDSSNIKPMNLIGVDRGENIPAVIALTDPEGCPLSRFKDSLGNPTHILRIGESYKEKQRTIQAKKEVEQRRAGGYSRKYASKAKNLADDMVRNTARDLLYYAVTQDAMLIFENLSRGFGRQGKRTFMAERQYTRMEDWLTAKLAYEGLPSKTYLSKTLAQYTSKTCSNCGFTITSADYDRVLEKLKKTATGWMTTINGKELKVEGQITYYNRYKRQNVVKDLSVELDRLSEESVNNDISSWTKGRSGEALSLLKKRFSHRPVQEKFVCLNCGFETHADEQAALNIARSWLFLRSQEYKKYQTNKTSTGNTDKRAFVETWQSFYRKKLKEVWKPAV

SEQ ID NO: 33121 - protein, 979 aa, synthetic construct
  REGION 1..979: note = engineered CasX variant
QEIKRISKIRRRLVKDSNTKKAGKTGPMKTLLVRVMTPDLRERLENLRKKPENIPQPISNTSRANLNKLLTDYTEMKKAILHVYWEEFQKDPVGLMSRVAQPASKKIDQNKLKPEMDEKGNLTTAGFACSQCGQPLFVYKLEQVSEKGKAYTNYFGRCNVAEHEKLIKLAQLKPEKDSDEAVTYSLGKFGQRALDFYSIHVTKESTHPVKPLAQIAGNRYASGPVGKALSDACMGTIASFLSKYQDIIIEHQKVVKGNQKRLESLRELAGKENLEYPSVTLPPQPHTKEGVDAYNEVIARVRMWVNLNLWQKLKLSRDDAKPLLRLKGFPSFPLVERQANEVDWWDMVCNVKKLINEKKEDGKVFWQNLAGYKRQEALRPYLSSEEDRKKGKKFARYQLGDLLLHLEKKHGEDWGKVYDEAWERIDKKVEGLSKHIKLEEERRSEDAQSKAALTDWLRAKASFVIEGLKEADKDEFCRCELKLQKWYGDLRGKPFAIEAENSILDISGFSKQYNCAFIWQKDGVKKLNLYLIINYFKGGKLRFKKIKPEAFEANRFYTVINKKSGEIVPMEVNFNFDDPNLIILPLAFGKRQGREFIWNDLLSLETGSLKLANGRVIEKTLYNRRTRQDEPALFVALTFERREVLDSSNIKPMNLIGVDRGENIPAVIALTDPEGCPLSRFKDSLGNPTHILRIGESYKEKQRTIQAKKEVEQRRAGGYSRKYASKAKNLADDMVRNTARDLLYYAVTQDAMLIFENLSRGFGRQGKRTFMAERQYTRMEDWLTAKLAYEGLPSKTYLSKTLAQYTSKTCSNCGFTITSADYDRVLEKLKKTATGWMTTINGKELKVEGQITYYNRYKRQNVVKDLSVELDRLSEESVNNDISSWTKGRSGEALSLLKKRFSHRPVQEKFVCLNCGFETHADEQAALNIARSWLFLRSQEYKKYQTNKTSTGNTDKRAFVETWQSFYRKKLKEVWKPAV

SEQ ID NO: 33122 - protein, 978 aa, synthetic construct
  REGION 1..978: note = engineered CasX variant
QEIKRISKIRRRLVKDSNTKKAGKTGPMKTLLVRVMTPDLRERLENLRKKPENIPQPISNTSRANLNKLLTDYTEMKKAILHVYWEEFQKDPVGLMSRVAQPASKKIDQNKLKPEMDEKGNLTTAGFACSQCGQPLFVYKLEQVSEKGKAYTNYFGRCNVAEHEKLILLAQLKPEKDSDEAVTYSLGKFGQRALDFYSIHVTKESTHPVKPLAQIAGNRYASPVGKALSDACMGTIASFLSKYQDIIIEHQKVVKGNQKRLESLRELAGKENLEYPSVTLPPQPHTKEGVDAYNEVIARVRMWVNLNLWQKLKLSRDDAKPLLRLKGFPSFPLVERQANEVDWWDMVCNVKKLINEKKEDGKVFWQNLAGYKRQEALRPYLSSEEDRKKGKKFARYQLGDLLLHLEKKHGEDWGKVYDEAWERIDKKVEGLSKHIKLEEERRSEDAQSKAALTDWLRAKASFVIEGLKEADKDEFCRCELKLQKWYGDLRGKPFAIEAENSILDISGFSKQYNCAFIWQKDGVKKLNLYLIINYFKGGKLRFKKIKPEAFEANRFYTVINKKSGEIVPMEVNFNFDDPNLIILPLAFGKRQGREFIWNDLLSLETGSLKLANGRVIEKTLYNRRTRQDEPALFVALTFERREVLDSSNIKPMNLIGVDRGENIPAVIALTDPEGCPLSRFKDSLGNPTHILRIGESYKEKQRTIQAKKEVEQRRAGGYSRKYASKAKNLADDMVRNTARDLLYYAVTQDAMLIFENLSRGFGRQGKRTFMAERQYTRMEDWLTAKLAYEGLPSKTYLSKTLAQYTSKTCSNCGFTITSADYDRVLEKLKKTATGWMTTINGKELKVEGQITYYNRYKRQNVVKDLSVELDRLSEESVNNDISSWTKGRSGEALSLLKKRFSHRPVQEKFVCLNCGFETHADEQAALNIARSWLFLRSQEYKKYQTNKTSTGNTDKRAFVETWQSFYRKKLKEVWKPAV

SEQ ID NO: 33123 - protein, 979 aa, synthetic construct
  REGION 1..979: note = engineered CasX variant
QEIKRISKIRRRLVKDSNTKKAGKTGPMKTLLVRVMTPDLRERLENLRKKPENIPQPISNTSRANLNKLLTDYTEMKKAILHVYWEEFQKDPVGLMSRVAQPASKKIDQNKLKPEMDEKGNLTTAGFACSQCGQPLFVYKLEQVSEKGKAYTNYFGRCNVAEHEKLILLAQLKPEKDSDEAVTYSLGKFGQRALDFYSIHVTKESTHPVKPLAQIAGNRYASYPVGKALSDACMGTIASFLSKYQDIIIEHQKVVKGNQKRLESLRELAGKENLEYPSVTLPPQPHTKEGVDAYNEVIARVRMWVNLNLWQKLKLSRDDAKPLLRLKGFPSFPLVERQANEVDWWDMVCNVKKLINEKKEDGKVFWQNLAGYKRQEALRPYLSSEEDRKKGKKFARYQLGDLLLHLEKKHGEDWGKVYDEAWERIDKKVEGLSKHIKLEEERRSEDAQSKAALTDWLRAKASFVIEGLKEADKDEFCRCELKLQKWYGDLRGKPFAIEAENSILDISGFSKQYNCAFIWQKDGVKKLNLYLIINYFKGGKLRFKKIKPEAFEANRFYTVINKKSGEIVPMEVNFNFDDPNLIILPLAFGKRQGREFIWNDLLSLETGSLKLANGRVIEKTLYNRRTRQDEPALFVALTFERREVLDSSNIKPMNLIGVDRGENIPAVIALTDPEGCPLSRFKDSLGNPTHILRIGESYKEKQRTIQAKKEVEQRRAGGYSRKYASKAKNLADDMVRNTARDLLYYAVTQDAMLIFENLSRGFGRQGKRTFMAERQYTRMEDWLTAKLAYEGLPSKTYLSKTLAQYTSKTCSNCGFTITSADYDRVLEKLKKTATGWMTTINGKELKVEGQITYYNRYKRQNVVKDLSVELDRLSEESVNNDISSWTKGRSGEALSLLKKRFSHRPVQEKFVCLNCGFETHADEQAALNIARSWLFLRSQEYKKYQTNKTTGKNTDKRAFVETWQSFYRKKLKEVWKPAV

SEQ ID NO: 33124 - protein, 979 aa, synthetic construct
  REGION 1..979: note = engineered CasX variant
QEIKRISKIRRRLVKDSNTKKAGKTGPMKTLLVRVMTPDLRERLENLRKKPENIPQPISNTSRANLNKLLTDYTEMKKAILHVYWEEFQKDPVGLMSRVAQPASKKIDQNKLKPEMDEKGNLTTAGFACSQCGQPLFVYKLEQVSEKGKAYTNYFGRCNVAEHEKLILLAQLKPEKDSDEAVTYSLGKFGQRALDFYSIHVTKESTHPVKPLAQIAGNRYASHPVGKALSDACMGTIASFLSKYQDIIIEHQKVVKGNQKRLESLRELAGKENLEYPSVTLPPQPHTKEGVDAYNEVIARVRMWVNLNLWQKLKLSRDDAKPLLRLKGFPSFPLVERQANEVDWWDMVCNVKKLINEKKEDGKVFWQNLAGYKRQEALRPYLSSEEDRKKGKKFARYQLGDLLLHLEKKHGEDWGKVYDEAWERIDKKVEGLSKHIKLEEERRSEDAQSKAALTDWLRAKASFVIEGLKEADKDEFCRCELKLQKWYGDLRGKPFAIEAENSILDISGFSKQYNCAFIWQKDGVKKLNLYLIINYFKGGKLRFKKIKPEAFEANRFYTVINKKSGEIVPMEVNFNFDDPNLIILPLAFGKRQGREFIWNDLLSLETGSLKLANGRVIEKTLYNRRTRQDEPALFVALTFERREVLDSSNIKPMNLIGVDRGENIPAVIALTDPEGCPLSRFKDSLGNPTHILRIGESYKEKQRTIQAKKEVEQRRAGGYSRKYASKAKNLADDMVRNTARDLLYYAVTQDAMLIFENLSRGFGRQGKRTFMAERQYTRMEDWLTAKLAYEGLPSKTYLSKTLAQYTSKTCSNCGFTITSADYDRVLEKLKKTATGWMTTINGKELKVEGQITYYNRYKRQNVVKDLSVELDRLSEESVNNDISSWTKGRSGEALSLLKKRFSHRPVQEKFVCLNCGFETHADEQAALNIARSWLFLRSQEYKKYQTNKTTGKNTDKRAFVETWQSFYRKKLKEVWKPAV

SEQ ID NO: 33125 - protein, 979 aa, synthetic construct
  REGION 1..979: note = engineered CasX variant
QEIKRISKIRRRLVKDSNTKKAGKTGPMKTLLVRVMTPDLRERLENLRKKPENIPQPISNTSRANLNKLLTDYTEMKKAILHVYWEEFQKDPVGLMSRVAQPASKKIDQNKLKPEMDEKGNLTTAGFACSQCGQPLFVYKLEQVSEKGKAYTNYFGRCNVAEHEKLILLAQLKPEKDSDEAVTYSLGKFGQRALDFYSIHVTKESTHPVKPLAQIAGNRYASSPVGKALSDACMGTIASFLSKYQDIIIEHQKVVKGNQKRLESLRELAGKENLEYPSVTLPPQPHTKEGVDAYNEVIARVRMWVNLNLWQKLKLSRDDAKPLLRLKGFPSFPLVERQANEVDWWDMVCNVKKLINEKKEDGKVFWQNLAGYKRQEALRPYLSSEEDRKKGKKFARYQLGDLLLHLEKKHGEDWGKVYDEAWERIDKKVEGLSKHIKLEEERRSEDAQSKAALTDWLRAKASFVIEGLKEADKDEFCRCELKLQKWYGDLRGKPFAIEAENSILDISGFSKQYNCAFIWQKDGVKKLNLYLIINYFKGGKLRFKKIKPEAFEANRFYTVINKKSGEIVPMEVNFNFDDPNLIILPLAFGKRQGREFIWNDLLSLETGSLKLANGRVIEKTLYNRRTRQDEPALFVALTFERREVLDSSNIKPMNLIGVDRGENIPAVIALTDPEGCPLSRFKDSLGNPTHILRIGESYKEKQRTIQAKKEVEQRRAGGYSRKYASKAKNLADDMVRNTARDLLYYAVTQDAMLIFENLSRGFGRQGKRTFMAERQYTRMEDWLTAKLAYEGLPSKTYLSKTLAQYTSKTCSNCGFTITSADYDRVLEKLKKTATGWMTTINGKELKVEGQITYYNRYKRQNVVKDLSVELDRLSEESVNNDISSWTKGRSGEALSLLKKRFSHRPVQEKFVCLNCGFETHADEQAALNIARSWLFLRSQEYKKYQTNKTTGKNTDKRAFVETWQSFYRKKLKEVWKPAV

SEQ ID NO: 33126 - protein, 979 aa, synthetic construct
  REGION 1..979: note = engineered CasX variant
QEIKRISKIRRRLVKDSNTKKAGKTGPMKTLLVRVMTPDLRERLENLRKKPENIPQPISNTSRANLNKLLTDYTEMKKAILHVYWEEFQKDPVGLMSRVAQPASKKIDQNKLKPEMDEKGNLTTAGFACSQCGQPLFVYKLEQVSEKGKAYTNYFGRCNVAEHEKLILLAQLKPEKDSDEAVTYSLGKFGQRALDFYSIHVTKESTHPVKPLAQIAGNRYASTPVGKALSDACMGTIASFLSKYQDIIIEHQKVVKGNQKRLESLRELAGKENLEYPSVTLPPQPHTKEGVDAYNEVIARVRMWVNLNLWQKLKLSRDDAKPLLRLKGFPSFPLVERQANEVDWWDMVCNVKKLINEKKEDGKVFWQNLAGYKRQEALRPYLSSEEDRKKGKKFARYQLGDLLLHLEKKHGEDWGKVYDEAWERIDKKVEGLSKHIKLEEERRSEDAQSKAALTDWLRAKASFVIEGLKEADKDEFCRCELKLQKWYGDLRGKPFAIEAENSILDISGFSKQYNCAFIWQKDGVKKLNLYLIINYFKGGKLRFKKIKPEAFEANRFYTVINKKSGEIVPMEVNFNFDDPNLIILPLAFGKRQGREFIWNDLLSLETGSLKLANGRVIEKTLYNRRTRQDEPALFVALTFERREVLDSSNIKPMNLIGVDRGENIPAVIALTDPEGCPLSRFKDSLGNPTHILRIGESYKEKQRTIQAKKEVEQRRAGGYSRKYASKAKNLADDMVRNTARDLLYYAVTQDAMLIFENLSRGFGRQGKRTFMAERQYTRMEDWLTAKLAYEGLPSKTYLSKTLAQYTSKTCSNCGFTITSADYDRVLEKLKKTATGWMTTINGKELKVEGQITYYNRYKRQNVVKDLSVELDRLSEESVNNDISSWTKGRSGEALSLLKKRFSHRPVQEKFVCLNCGFETHADEQAALNIARSWLFLRSQEYKKYQTNKTTGKNTDKRAFVETWQSFYRKKLKEVWKPAV

SEQ ID NO: 33127 - protein, 979 aa, synthetic construct
  REGION 1..979: note = engineered CasX variant
QEIKRISKIRRRLVKDSNTKKAGKTGPMKTLLVRVMTPDLRERLENLRKKPENIPQPISNTSRANLNKLLTDYTEMKKAILHVYWEEFQKDPVGLMSRVAQPASKKIDQNKLKPEMDEKGNLTTAGFACSQCGQPLFVYKLEQVSEKGKAYTNYFGRCNVAEHEKLILLAQLKPEKDSDEAVTYSLGKFGQRALDFYSIHVTKESTHPVKPLAQIAGNRYASAPVGKALSDACMGTIASFLSKYQDIIIEHQKVVKGNQKRLESLRELAGKENLEYPSVTLPPQPHTKEGVDAYNEVIARVRMWVNLNLWQKLKLSRDDAKPLLRLKGFPSFPLVERQANEVDWWDMVCNVKKLINEKKEDGKVFWQNLAGYKRQEALRPYLSSEEDRKKGKKFARYQLGDLLLHLEKKHGEDWGKVYDEAWERIDKKVEGLSKHIKLEEERRSEDAQSKAALTDWLRAKASFVIEGLKEADKDEFCRCELKLQKWYGDLRGKPFAIEAENSILDISGFSKQYNCAFIWQKDGVKKLNLYLIINYFKGGKLRFKKIKPEAFEANRFYTVINKKSGEIVPMEVNFNFDDPNLIILPLAFGKRQGREFIWNDLLSLETGSLKLANGRVIEKTLYNRRTRQDEPALFVALTFERREVLDSSNIKPMNLIGVDRGENIPAVIALTDPEGCPLSRFKDSLGNPTHILRIGESYKEKQRTIQAKKEVEQRRAGGYSRKYASKAKNLADDMVRNTARDLLYYAVTQDAMLIFENLSRGFGRQGKRTFMAERQYTRMEDWLTAKLAYEGLPSKTYLSKTLAQYTSKTCSNCGFTITSADYDRVLEKLKKTATGWMTTINGKELKVEGQITYYNRYKRQNVVKDLSVELDRLSEESVNNDISSWTKGRSGEALSLLKKRFSHRPVQEKFVCLNCGFETHADEQAALNIARSWLFLRSQEYKKYQTNKTTGKNTDKRAFVETWQSFYRKKLKEVWKPAV

SEQ ID NO: 33128 - protein, 979 aa, synthetic construct
  REGION 1..979: note = engineered CasX variant
QEIKRISKIRRRLVKDSNTKKAGKTGPMKTLLVRVMTPDLRERLENLRKKPENIPQPISNTSRANLNKLLTDYTEMKKAILHVYWEEFQKDPVGLMSRVAQPASKKIDQNKLKPEMDEKGNLTTAGFACSQCGQPLFVYKLEQVSEKGKAYTNYFGRCNVAEHEKLILLAQLKPEKDSDEAVTYSLGKFGQRALDFYSIHVTKESTHPVKPLAQIAGNRYASVPVGKALSDACMGTIASFLSKYQDIIIEHQKVVKGNQKRLESLRELAGKENLEYPSVTLPPQPHTKEGVDAYNEVIARVRMWVNLNLWQKLKLSRDDAKPLLRLKGFPSFPLVERQANEVDWWDMVCNVKKLINEKKEDGKVFWQNLAGYKRQEALRPYLSSEEDRKKGKKFARYQLGDLLLHLEKKHGEDWGKVYDEAWERIDKKVEGLSKHIKLEEERRSEDAQSKAALTDWLRAKASFVIEGLKEADKDEFCRCELKLQKWYGDLRGKPFAIEAENSILDISGFSKQYNCAFIWQKDGVKKLNLYLIINYFKGGKLRFKKIKPEAFEANRFYTVINKKSGEIVPMEVNFNFDDPNLIILPLAFGKRQGREFIWNDLLSLETGSLKLANGRVIEKTLYNRRTRQDEPALFVALTFERREVLDSSNIKPMNLIGVDRGENIPAVIALTDPEGCPLSRFKDSLGNPTHILRIGESYKEKQRTIQAKKEVEQRRAGGYSRKYASKAKNLADDMVRNTARDLLYYAVTQDAMLIFENLSRGFGRQGKRTFMAERQYTRMEDWLTAKLAYEGLPSKTYLSKTLAQYTSKTCSNCGFTITSADYDRVLEKLKKTATGWMTTINGKELKVEGQITYYNRYKRQNVVKDLSVELDRLSEESVNNDISSWTKGRSGEALSLLKKRFSHRPVQEKFVCLNCGFETHADEQAALNIARSWLFLRSQEYKKYQTNKTTGKNTDKRAFVETWQSFYRKKLKEVWKPAV

SEQ ID NO: 33129 - protein, 979 aa, synthetic construct
  REGION 1..979: note = engineered CasX variant
QEIKRISKIRRRLVKDSNTKKAGKTGPMKTLLVRVMTPDLRERLENLRKKPENIPQPISNTSRANLNKLLTDYTEMKKAILHVYWEEFQKDPVGLMSRVAQPASKKIDQNKLKPEMDEKGNLTTAGFACSQCGQPLFVYKLEQVSEKGKAYTNYFGRCNVAEHEKLIKLAQLKPEKDSDEAVTYSLGKFGQRALDFYSIHVTKESTHPVKPLAQIAGNRYASGPVGKALSDACMGTIASFLSKYQDIIIEHQKVVKGNQKRLESLRELAGKENLEYPSVTLPPQPHTKEGVDAYNEVIARVRMWVNLNLWQKLKLSRDDAKPLLRLKGFPSFPLVERQANEVDWWDMVCNVKKLINEKKEDGKVFWQNLAGYKRQEALRPYLSSEEDRKKGKKFARYQLGDLLLHLEKKHGEDWGKVYDEAWERIDKKVEGLSKHIKLEEERRSEDAQSKAALTDWLRAKASFVIEGLKEADKDEFCRCELKLQKWYGDLRGKPFAIEAENSILDISGFSKQYNCAFIWQKDGVKKLNLYLIINYFKGGKLRFKKIKPEAFEANRFYTVINKKSGEIVPMEVNFNFDDPNLIILPLAFGKRQGREFIWNDLLSLETGSLKLANGRVIEKTLYNRRTRQDEPALFVALTFERREVLDSSNIKPMNLIGVDRGENIPAVIALTDPEGCPLSRFKDSLGNPTHILRIGESYKEKQRTIQAKKEVEQRRAGGYSRKYASKAKNLADDMVRNTARDLLYYAVTQDAMLIFENLSRGFGRQGKRTFMAERQYTRMEDWLTAKLAYEGLPSKTYLSKTLAQYTSKTCSNCGFTITSADYDRVLEKLKKTATGWMTTINGKELKVEGQITYYNRYKRQNVVKDLSVELDRLSEESVNNDISSWTKGRSGEALSLLKKRFSHRPVQEKFVCLNCGFETHADEQAALNIARSWLFLRSQEYKKYQTNKTTGKNTDKRAFVETWQSFYRKKLKEVWKPAV

SEQ ID NO: 33130 - protein, 978 aa, synthetic construct
  REGION 1..978: note = engineered CasX variant
QEIKRISKIRRRLVKDSNTKKAGKTGPMKTLLVRVMTPDLRERLENLRKKPENIPQPISNTSRANLNKLLTDYTEMKKAILHVYWEEFQKDPVGLMSRVAQPASKKIDQNKLKPEMDEKGNLTTAGFACSQCGQPLFVYKLEQVSEKGKAYTNYFGRCNVAEHEKLILLAQLKPEKDSDEAVTYSLGKFGQRALDFYSIHVTKESTHPVKPLAQIAGNRYASPVGKALSDACMGTIASFLSKYQDIIIEHQKVVKGNQKRLESLRELAGKENLEYPSVTLPPQPHTKEGVDAYNEVIARVRMWVNLNLWQKLKLSRDDAKPLLRLKGFPSFPLVERQANEVDWWDMVCNVKKLINEKKEDGKVFWQNLAGYKRQEALRPYLSSEEDRKKGKKFARYQLGDLLLHLEKKHGEDWGKVYDEAWERIDKKVEGLSKHIKLEEERRSEDAQSKAALTDWLRAKASFVIEGLKEADKDEFCRCELKLQKWYGDLRGKPFAIEAENSILDISGFSKQYNCAFIWQKDGVKKLNLYLIINYFKGGKLRFKKIKPEAFEANRFYTVINKKSGEIVPMEVNFNFDDPNLIILPLAFGKRQGREFIWNDLLSLETGSLKLANGRVIEKTLYNRRTRQDEPALFVALTFERREVLDSSNIKPMNLIGVDRGENIPAVIALTDPEGCPLSRFKDSLGNPTHILRIGESYKEKQRTIQAKKEVEQRRAGGYSRKYASKAKNLADDMVRNTARDLLYYAVTQDAMLIFENLSRGFGRQGKRTFMAERQYTRMEDWLTAKLAYEGLPSKTYLSKTLAQYTSKTCSNCGFTITSADYDRVLEKLKKTATGWMTTINGKELKVEGQITYYNRYKRQNVVKDLSVELDRLSEESVNNDISSWTKGRSGEALSLLKKRFSHRPVQEKFVCLNCGFETHADEQAALNIARSWLFLRSQEYKKYQTNKTTGKNTDKRAFVETWQSFYRKKLKEVWKPAV

SEQ ID NO: 33131 - protein, 978 aa, synthetic construct
  REGION 1..978: note = engineered CasX variant
QEIKRISKIRRRLVKDSNTKKAGKTGPMKTLLVRVMTPDLRERLENLRKKPENIPQPISNTSRANLNKLLTDYTEMKKAILHVYWEEFQKDPVGLMSRVAQPASKKIDQNKLKPEMDEKGNLTTAGFACSQCGQPLFVYKLEQVSEKGKAYTNYFGRCNVAEHEKLILLAQLKPEKDSDEAVTYSLGKFGQRALDFYSIHVTKESTHPVKPLAQIAGNRYASYPVGKALSDACMGTIASFLSKYQDIIIEHQKVVKGNQKRLESLRELAGKENLEYPSVTLPPQPHTKEGVDAYNEVIARVRMWVNLNLWQKLKLSRDDAKPLLRLKKFPSFPLVERQANEVDWWDMVCNVKKLINEKKEDGKVFWQNLAGYKRQEALRPYLSSEEDRKKGKKFARYQLGDLLLHLEKKHGEDWGKVYDEAWERIDKKVEGLSKHIKLEEERRSEDAQSKAALTDWLRAKASFVIEGLKEADKDEFCRCELKLQKWYGDLRGKPFAIEAENSILDISGFSKQYNCAFIWQKDGVKKLNLYLIINYFKGGKLRFKKIKPEAFEANRFYTVINKKSGEIVPMEVNFNFDDPNLIILPLAFGKRQGREFIWNDLLSLETGSLKLANGRVIEKTLYNRRTRQDEPALFVALTFERREVLDSSNIKPMNLIGVDRGENIPAVIALTDPEGCPLSRFKDSLGNPTHILRIGESYKEKQRTIQAKKEVEQRRAGGYSRKYASKAKNLADDMVRNTARDLLYYAVTQDAMLIFENLSRGFGRQGKRTFMAERQYTRMEDWLTAKLAYEGLPSKTYLSKTLAQYTSKTCSNCGFTITSADYDRVLEKLKKTATGWMTTINGKELKVEGQITYYNRYKRQNVVKDLSVELDRLSEESVNNDISSWTKGRSGEALSLLKKRFSHRPVQEKFVCLNCGFETHADEQAALNIARSWLFLRSQEYKKYQTNKTTGNTDKRAFVETWQSFYRKKLKEVWKPAV

SEQ ID NO: 33132 - protein, 978 aa, synthetic construct
  REGION 1..978: note = engineered CasX variant
QEIKRISKIRRRLVKDSNTKKAGKTGPMKTLLVRVMTPDLRERLENLRKKPENIPQPISNTSRANLNKLLTDYTEMKKAILHVYWEEFQKDPVGLMSRVAQPASKKIDQNKLKPEMDEKGNLTTAGFACSQCGQPLFVYKLEQVSEKGKAYTNYFGRCNVAEHEKLILLAQLKPEKDSDEAVTYSLGKFGQRALDFYSIHVTKESTHPVKPLAQIAGNRYASHPVGKALSDACMGTIASFLSKYQDIIIEHQKVVKGNQKRLESLRELAGKENLEYPSVTLPPQPHTKEGVDAYNEVIARVRMWVNLNLWQKLKLSRDDAKPLLRLKKFPSFPLVERQANEVDWWDMVCNVKKLINEKKEDGKVFWQNLAGYKRQEALRPYLSSEEDRKKGKKFARYQLGDLLLHLEKKHGEDWGKVYDEAWERIDKKVEGLSKHIKLEEERRSEDAQSKAALTDWLRAKASFVIEGLKEADKDEFCRCELKLQKWYGDLRGKPFAIEAENSILDISGFSKQYNCAFIWQKDGVKKLNLYLIINYFKGGKLRFKKIKPEAFEANRFYTVINKKSGEIVPMEVNFNFDDPNLIILPLAFGKRQGREFIWNDLLSLETGSLKLANGRVIEKTLYNRRTRQDEPALFVALTFERREVLDSSNIKPMNLIGVDRGENIPAVIALTDPEGCPLSRFKDSLGNPTHILRIGESYKEKQRTIQAKKEVEQRRAGGYSRKYASKAKNLADDMVRNTARDLLYYAVTQDAMLIFENLSRGFGRQGKRTFMAERQYTRMEDWLTAKLAYEGLPSKTYLSKTLAQYTSKTCSNCGFTITSADYDRVLEKLKKTATGWMTTINGKELKVEGQITYYNRYKRQNVVKDLSVELDRLSEESVNNDISSWTKGRSGEALSLLKKRFSHRPVQEKFVCLNCGFETHADEQAALNIARSWLFLRSQEYKKYQTNKTTGNTDKRAFVETWQSFYRKKLKEVWKPAV

SEQ ID NO: 33133 - protein, 978 aa, synthetic construct
  REGION 1..978: note = engineered CasX variant
QEIKRISKIRRRLVKDSNTKKAGKTGPMKTLLVRVMTPDLRERLENLRKKPENIPQPISNTSRANLNKLLTDYTEMKKAILHVYWEEFQKDPVGLMSRVAQPASKKIDQNKLKPEMDEKGNLTTAGFACSQCGQPLFVYKLEQVSEKGKAYTNYFGRCNVAEHEKLILLAQLKPEKDSDEAVTYSLGKFGQRALDFYSIHVTKESTHPVKPLAQIAGNRYASSPVGKALSDACMGTIASFLSKYQDIIIEHQKVVKGNQKRLESLRELAGKENLEYPSVTLPPQPHTKEGVDAYNEVIARVRMWVNLNLWQKLKLSRDDAKPLLRLKKFPSFPLVERQANEVDWWDMVCNVKKLINEKKEDGKVFWQNLAGYKRQEALRPYLSSEEDRKKGKKFARYQLGDLLLHLEKKHGEDWGKVYDEAWERIDKKVEGLSKHIKLEEERRSEDAQSKAALTDWLRAKASFVIEGLKEADKDEFCRCELKLQKWYGDLRGKPFAIEAENSILDISGFSKQYNCAFIWQKDGVKKLNLYLIINYFKGGKLRFKKIKPEAFEANRFYTVINKKSGEIVPMEVNFNFDDPNLIILPLAFGKRQGREFIWNDLLSLETGSLKLANGRVIEKTLYNRRTRQDEPALFVALTFERREVLDSSNIKPMNLIGVDRGENIPAVIALTDPEGCPLSRFKDSLGNPTHILRIGESYKEKQRTIQAKKEVEQRRAGGYSRKYASKAKNLADDMVRNTARDLLYYAVTQDAMLIFENLSRGFGRQGKRTFMAERQYTRMEDWLTAKLAYEGLPSKTYLSKTLAQYTSKTCSNCGFTITSADYDRVLEKLKKTATGWMTTINGKELKVEGQITYYNRYKRQNVVKDLSVELDRLSEESVNNDISSWTKGRSGEALSLLKKRFSHRPVQEKFVCLNCGFETHADEQAALNIARSWLFLRSQEYKKYQTNKTTGNTDKRAFVETWQSFYRKKLKEVWKPAV

SEQ ID NO: 33134 - protein, 978 aa, synthetic construct
  REGION 1..978: note = engineered CasX variant
QEIKRISKIRRRLVKDSNTKKAGKTGPMKTLLVRVMTPDLRERLENLRKKPENIPQPISNTSRANLNKLLTDYTEMKKAILHVYWEEFQKDPVGLMSRVAQPASKKIDQNKLKPEMDEKGNLTTAGFACSQCGQPLFVYKLEQVSEKGKAYTNYFGRCNVAEHEKLILLAQLKPEKDSDEAVTYSLGKFGQRALDFYSIHVTKESTHPVKPLAQIAGNRYASTPVGKALSDACMGTIASFLSKYQDIIIEHQKVVKGNQKRLESLRELAGKENLEYPSVTLPPQPHTKEGVDAYNEVIARVRMWVNLNLWQKLKLSRDDAKPLLRLKKFPSFPLVERQANEVDWWDMVCNVKKLINEKKEDGKVFWQNLAGYKRQEALRPYLSSEEDRKKGKKFARYQLGDLLLHLEKKHGEDWGKVYDEAWERIDKKVEGLSKHIKLEEERRSEDAQSKAALTDWLRAKASFVIEGLKEADKDEFCRCELKLQKWYGDLRGKPFAIEAENSILDISGFSKQYNCAFIWQKDGVKKLNLYLIINYFKGGKLRFKKIKPEAFEANRFYTVINKKSGEIVPMEVNFNFDDPNLIILPLAFGKRQGREFIWNDLLSLETGSLKLANGRVIEKTLYNRRTRQDEPALFVALTFERREVLDSSNIKPMNLIGVDRGENIPAVIALTDPEGCPLSRFKDSLGNPTHILRIGESYKEKQRTIQAKKEVEQRRAGGYSRKYASKAKNLADDMVRNTARDLLYYAVTQDAMLIFENLSRGFGRQGKRTFMAERQYTRMEDWLTAKLAYEGLPSKTYLSKTLAQYTSKTCSNCGFTITSADYDRVLEKLKKTATGWMTTINGKELKVEGQITYYNRYKRQNVVKDLSVELDRLSEESVNNDISSWTKGRSGEALSLLKKRFSHRPVQEKFVCLNCGFETHADEQAALNIARSWLFLRSQEYKKYQTNKTTGNTDKRAFVETWQSFYRKKLKEVWKPAV

SEQ ID NO: 33135 - protein, 978 aa, synthetic construct
  REGION 1..978: note = engineered CasX variant
QEIKRISKIRRRLVKDSNTKKAGKTGPMKTLLVRVMTPDLRERLENLRKKPENIPQPISNTSRANLNKLLTDYTEMKKAILHVYWEEFQKDPVGLMSRVAQPASKKIDQNKLKPEMDEKGNLTTAGFACSQCGQPLFVYKLEQVSEKGKAYTNYFGRCNVAEHEKLILLAQLKPEKDSDEAVTYSLGKFGQRALDFYSIHVTKESTHPVKPLAQIAGNRYASAPVGKALSDACMGTIASFLSKYQDIIIEHQKVVKGNQKRLESLRELAGKENLEYPSVTLPPQPHTKEGVDAYNEVIARVRMWVNLNLWQKLKLSRDDAKPLLRLKKFPSFPLVERQANEVDWWDMVCNVKKLINEKKEDGKVFWQNLAGYKRQEALRPYLSSEEDRKKGKKFARYQLGDLLLHLEKKHGEDWGKVYDEAWERIDKKVEGLSKHIKLEEERRSEDAQSKAALTDWLRAKASFVIEGLKEADKDEFCRCELKLQKWYGDLRGKPFAIEAENSILDISGFSKQYNCAFIWQKDGVKKLNLYLIINYFKGGKLRFKKIKPEAFEANRFYTVINKKSGEIVPMEVNFNFDDPNLIILPLAFGKRQGREFIWNDLLSLETGSLKLANGRVIEKTLYNRRTRQDEPALFVALTFERREVLDSSNIKPMNLIGVDRGENIPAVIALTDPEGCPLSRFKDSLGNPTHILRIGESYKEKQRTIQAKKEVEQRRAGGYSRKYASKAKNLADDMVRNTARDLLYYAVTQDAMLIFENLSRGFGRQGKRTFMAERQYTRMEDWLTAKLAYEGLPSKTYLSKTLAQYTSKTCSNCGFTITSADYDRVLEKLKKTATGWMTTINGKELKVEGQITYYNRYKRQNVVKDLSVELDRLSEESVNNDISSWTKGRSGEALSLLKKRFSHRPVQEKFVCLNCGFETHADEQAALNIARSWLFLRSQEYKKYQTNKTTGNTDKRAFVETWQSFYRKKLKEVWKPAV

SEQ ID NO: 33136 - protein, 978 aa, synthetic construct
  REGION 1..978: note = engineered CasX variant
QEIKRISKIRRRLVKDSNTKKAGKTGPMKTLLVRVMTPDLRERLENLRKKPENIPQPISNTSRANLNKLLTDYTEMKKAILHVYWEEFQKDPVGLMSRVAQPASKKIDQNKLKPEMDEKGNLTTAGFACSQCGQPLFVYKLEQVSEKGKAYTNYFGRCNVAEHEKLILLAQLKPEKDSDEAVTYSLGKFGQRALDFYSIHVTKESTHPVKPLAQIAGNRYASVPVGKALSDACMGTIASFLSKYQDIIIEHQKVVKGNQKRLESLRELAGKENLEYPSVTLPPQPHTKEGVDAYNEVIARVRMWVNLNLWQKLKLSRDDAKPLLRLKKFPSFPLVERQANEVDWWDMVCNVKKLINEKKEDGKVFWQNLAGYKRQEALRPYLSSEEDRKKGKKFARYQLGDLLLHLEKKHGEDWGKVYDEAWERIDKKVEGLSKHIKLEEERRSEDAQSKAALTDWLRAKASFVIEGLKEADKDEFCRCELKLQKWYGDLRGKPFAIEAENSILDISGFSKQYNCAFIWQKDGVKKLNLYLIINYFKGGKLRFKKIKPEAFEANRFYTVINKKSGEIVPMEVNFNFDDPNLIILPLAFGKRQGREFIWNDLLSLETGSLKLANGRVIEKTLYNRRTRQDEPALFVALTFERREVLDSSNIKPMNLIGVDRGENIPAVIALTDPEGCPLSRFKDSLGNPTHILRIGESYKEKQRTIQAKKEVEQRRAGGYSRKYASKAKNLADDMVRNTARDLLYYAVTQDAMLIFENLSRGFGRQGKRTFMAERQYTRMEDWLTAKLAYEGLPSKTYLSKTLAQYTSKTCSNCGFTITSADYDRVLEKLKKTATGWMTTINGKELKVEGQITYYNRYKRQNVVKDLSVELDRLSEESVNNDISSWTKGRSGEALSLLKKRFSHRPVQEKFVCLNCGFETHADEQAALNIARSWLFLRSQEYKKYQTNKTTGNTDKRAFVETWQSFYRKKLKEVWKPAV

SEQ ID NO: 33137 - protein, 978 aa, synthetic construct
  REGION 1..978: note = engineered CasX variant
QEIKRISKIRRRLVKDSNTKKAGKTGPMKTLLVRVMTPDLRERLENLRKKPENIPQPISNTSRANLNKLLTDYTEMKKAILHVYWEEFQKDPVGLMSRVAQPASKKIDQNKLKPEMDEKGNLTTAGFACSQCGQPLFVYKLEQVSEKGKAYTNYFGRCNVAEHEKLIKLAQLKPEKDSDEAVTYSLGKFGQRALDFYSIHVTKESTHPVKPLAQIAGNRYASGPVGKALSDACMGTIASFLSKYQDIIIEHQKVVKGNQKRLESLRELAGKENLEYPSVTLPPQPHTKEGVDAYNEVIARVRMWVNLNLWQKLKLSRDDAKPLLRLKKFPSFPLVERQANEVDWWDMVCNVKKLINEKKEDGKVFWQNLAGYKRQEALRPYLSSEEDRKKGKKFARYQLGDLLLHLEKKHGEDWGKVYDEAWERIDKKVEGLSKHIKLEEERRSEDAQSKAALTDWLRAKASFVIEGLKEADKDEFCRCELKLQKWYGDLRGKPFAIEAENSILDISGFSKQYNCAFIWQKDGVKKLNLYLIINYFKGGKLRFKKIKPEAFEANRFYTVINKKSGEIVPMEVNFNFDDPNLIILPLAFGKRQGREFIWNDLLSLETGSLKLANGRVIEKTLYNRRTRQDEPALFVALTFERREVLDSSNIKPMNLIGVDRGENIPAVIALTDPEGCPLSRFKDSLGNPTHILRIGESYKEKQRTIQAKKEVEQRRAGGYSRKYASKAKNLADDMVRNTARDLLYYAVTQDAMLIFENLSRGFGRQGKRTFMAERQYTRMEDWLTAKLAYEGLPSKTYLSKTLAQYTSKTCSNCGFTITSADYDRVLEKLKKTATGWMTTINGKELKVEGQITYYNRYKRQNVVKDLSVELDRLSEESVNNDISSWTKGRSGEALSLLKKRFSHRPVQEKFVCLNCGFETHADEQAALNIARSWLFLRSQEYKKYQTNKTTGNTDKRAFVETWQSFYRKKLKEVWKPAV

SEQ ID NO: 33138 - protein, 977 aa, synthetic construct
  REGION 1..977: note = engineered CasX variant
QEIKRISKIRRRLVKDSNTKKAGKTGPMKTLLVRVMTPDLRERLENLRKKPENIPQPISNTSRANLNKLLTDYTEMKKAILHVYWEEFQKDPVGLMSRVAQPASKKIDQNKLKPEMDEKGNLTTAGFACSQCGQPLFVYKLEQVSEKGKAYTNYFGRCNVAEHEKLILLAQLKPEKDSDEAVTYSLGKFGQRALDFYSIHVTKESTHPVKPLAQIAGNRYASPVGKALSDACMGTIASFLSKYQDIIIEHQKVVKGNQKRLESLRELAGKENLEYPSVTLPPQPHTKEGVDAYNEVIARVRMWVNLNLWQKLKLSRDDAKPLLRLKKFPSFPLVERQANEVDWWDMVCNVKKLINEKKEDGKVFWQNLAGYKRQEALRPYLSSEEDRKKGKKFARYQLGDLLLHLEKKHGEDWGKVYDEAWERIDKKVEGLSKHIKLEEERRSEDAQSKAALTDWLRAKASFVIEGLKEADKDEFCRCELKLQKWYGDLRGKPFAIEAENSILDISGFSKQYNCAFIWQKDGVKKLNLYLIINYFKGGKLRFKKIKPEAFEANRFYTVINKKSGEIVPMEVNFNFDDPNLIILPLAFGKRQGREFIWNDLLSLETGSLKLANGRVIEKTLYNRRTRQDEPALFVALTFERREVLDSSNIKPMNLIGVDRGENIPAVIALTDPEGCPLSRFKDSLGNPTHILRIGESYKEKQRTIQAKKEVEQRRAGGYSRKYASKAKNLADDMVRNTARDLLYYAVTQDAMLIFENLSRGFGRQGKRTFMAERQYTRMEDWLTAKLAYEGLPSKTYLSKTLAQYTSKTCSNCGFTITSADYDRVLEKLKKTATGWMTTINGKELKVEGQITYYNRYKRQNVVKDLSVELDRLSEESVNNDISSWTKGRSGEALSLLKKRFSHRPVQEKFVCLNCGFETHADEQAALNIARSWLFLRSQEYKKYQTNKTTGNTDKRAFVETWQSFYRKKLKEVWKPAV

SEQ ID NO: 33139 - protein, 978 aa, synthetic construct
  REGION 1..978: note = engineered CasX variant
QEIKRISKIRRRLVKDSNTKKAGKTGPMKTLLVRVMTPDLRERLENLRKKPENIPQPISNTSRANLNKLLTDYTEMKKAILHVYWEEFQKDPVGLMSRVAQPASKKIDQNKLKPEMDEKGNLTTAGFACSQCGQPLFVYKLEQVSEKGKAYTNYFGRCNVAEHEKLILLAQLKPEKDSDEAVTYSLGKFGQRALDFYSIHVTKESTHPVKPLAQIAGNRYASYPVGKALSDACMGTIASFLSKYQDIIIEHQKVVKGNQKRLESLRELAGKENLEYPSVTLPPQPHTKEGVDAYNEVIARVRMWVNLNLWQKLKLSRDDAKPLLRLKGFPSFPLVERQANEVDWWDMVCNVKKLINEKKEDGKVFWQNLAGYKRQEALRPYLSSEEDRKKGKKFARYQLGDLLLHLEKKHGEDWGKVYDEAWERIDKKVEGLSKHIKLEEERRSEDAQSKAALTDWLRAKASFVIEGLKEADKDEFCRCELKLQKWYGDLRGKPFAIEAENSILDISGFSKQYNCAFIWQKDGVKKLNLYLIINYFKGGKLRFKKIKPEAFEANRFYTVINKKSGEIVPMEVNFNFDDPNLIILPLAFGKRQGREFIWNDLLSLETGSLKLANGRVIEKTLYNRRTRQDEPALFVALTFERREVLDSSNIKPMNLIGVDRGENIPAVIALTDPEGCPLSRFKDSLGNPTHILRIGERYKEKQRTIQAKKEVEQRRAGGYSRKYASKAKNLADDMVRNTARDLLYYAVTQDAMLIFENLSRGFGRQGKRTFMAERQYTRMEDWLTAKLAYEGLPSKTYLSKTLAQYTSKTCSNCGFTITSADYDRVLEKLKKTATGWMTTINGKELKVEGQITYYNRYKRQNVVKDLSVELDRLSEESVNNDISSWTKGRSGEALSLLKKRFSHRPVQEKFVCLNCGFETHADEQAALNIARSWLFLRSQEYKKYQTNKTTGNTDKRAFVETWQSFYRKKLKEVWKPAV

SEQ ID NO: 33140 - protein, 978 aa, synthetic construct
  REGION 1..978: note = engineered CasX variant
QEIKRISKIRRRLVKDSNTKKAGKTGPMKTLLVRVMTPDLRERLENLRKKPENIPQPISNTSRANLNKLLTDYTEMKKAILHVYWEEFQKDPVGLMSRVAQPASKKIDQNKLKPEMDEKGNLTTAGFACSQCGQPLFVYKLEQVSEKGKAYTNYFGRCNVAEHEKLILLAQLKPEKDSDEAVTYSLGKFGQRALDFYSIHVTKESTHPVKPLAQIAGNRYASHPVGKALSDACMGTIASFLSKYQDIIIEHQKVVKGNQKRLESLRELAGKENLEYPSVTLPPQPHTKEGVDAYNEVIARVRMWVNLNLWQKLKLSRDDAKPLLRLKGFPSFPLVERQANEVDWWDMVCNVKKLINEKKEDGKVFWQNLAGYKRQEALRPYLSSEEDRKKGKKFARYQLGDLLLHLEKKHGEDWGKVYDEAWERIDKKVEGLSKHIKLEEERRSEDAQSKAALTDWLRAKASFVIEGLKEADKDEFCRCELKLQKWYGDLRGKPFAIEAENSILDISGFSKQYNCAFIWQKDGVKKLNLYLIINYFKGGKLRFKKIKPEAFEANRFYTVINKKSGEIVPMEVNFNFDDPNLIILPLAFGKRQGREFIWNDLLSLETGSLKLANGRVIEKTLYNRRTRQDEPALFVALTFERREVLDSSNIKPMNLIGVDRGENIPAVIALTDPEGCPLSRFKDSLGNPTHILRIGERYKEKQRTIQAKKEVEQRRAGGYSRKYASKAKNLADDMVRNTARDLLYYAVTQDAMLIFENLSRGFGRQGKRTFMAERQYTRMEDWLTAKLAYEGLPSKTYLSKTLAQYTSKTCSNCGFTITSADYDRVLEKLKKTATGWMTTINGKELKVEGQITYYNRYKRQNVVKDLSVELDRLSEESVNNDISSWTKGRSGEALSLLKKRFSHRPVQEKFVCLNCGFETHADEQAALNIARSWLFLRSQEYKKYQTNKTTGNTDKRAFVETWQSFYRKKLKEVWKPAV

SEQ ID NO: 33141 - protein, 978 aa, synthetic construct
  REGION 1..978: note = engineered CasX variant
QEIKRISKIRRRLVKDSNTKKAGKTGPMKTLLVRVMTPDLRERLENLRKKPENIPQPISNTSRANLNKLLTDYTEMKKAILHVYWEEFQKDPVGLMSRVAQPASKKIDQNKLKPEMDEKGNLTTAGFACSQCGQPLFVYKLEQVSEKGKAYTNYFGRCNVAEHEKLILLAQLKPEKDSDEAVTYSLGKFGQRALDFYSIHVTKESTHPVKPLAQIAGNRYASSPVGKALSDACMGTIASFLSKYQDIIIEHQKVVKGNQKRLESLRELAGKENLEYPSVTLPPQPHTKEGVDAYNEVIARVRMWVNLNLWQKLKLSRDDAKPLLRLKGFPSFPLVERQANEVDWWDMVCNVKKLINEKKEDGKVFWQNLAGYKRQEALRPYLSSEEDRKKGKKFARYQLGDLLLHLEKKHGEDWGKVYDEAWERIDKKVEGLSKHIKLEEERRSEDAQSKAALTDWLRAKASFVIEGLKEADKDEFCRCELKLQKWYGDLRGKPFAIEAENSILDISGFSKQYNCAFIWQKDGVKKLNLYLIINYFKGGKLRFKKIKPEAFEANRFYTVINKKSGEIVPMEVNFNFDDPNLIILPLAFGKRQGREFIWNDLLSLETGSLKLANGRVIEKTLYNRRTRQDEPALFVALTFERREVLDSSNIKPMNLIGVDRGENIPAVIALTDPEGCPLSRFKDSLGNPTHILRIGERYKEKQRTIQAKKEVEQRRAGGYSRKYASKAKNLADDMVRNTARDLLYYAVTQDAMLIFENLSRGFGRQGKRTFMAERQYTRMEDWLTAKLAYEGLPSKTYLSKTLAQYTSKTCSNCGFTITSADYDRVLEKLKKTATGWMTTINGKELKVEGQITYYNRYKRQNVVKDLSVELDRLSEESVNNDISSWTKGRSGEALSLLKKRFSHRPVQEKFVCLNCGFETHADEQAALNIARSWLFLRSQEYKKYQTNKTTGNTDKRAFVETWQSFYRKKLKEVWKPAV

SEQ ID NO: 33142 - protein, 978 aa, synthetic construct
  REGION 1..978: note = engineered CasX variant
QEIKRISKIRRRLVKDSNTKKAGKTGPMKTLLVRVMTPDLRERLENLRKKPENIPQPISNTSRANLNKLLTDYTEMKKAILHVYWEEFQKDPVGLMSRVAQPASKKIDQNKLKPEMDEKGNLTTAGFACSQCGQPLFVYKLEQVSEKGKAYTNYFGRCNVAEHEKLILLAQLKPEKDSDEAVTYSLGKFGQRALDFYSIHVTKESTHPVKPLAQIAGNRYASTPVGKALSDACMGTIASFLSKYQDIIIEHQKVVKGNQKRLESLRELAGKENLEYPSVTLPPQPHTKEGVDAYNEVIARVRMWVNLNLWQKLKLSRDDAKPLLRLKGFPSFPLVERQANEVDWWDMVCNVKKLINEKKEDGKVFWQNLAGYKRQEALRPYLSSEEDRKKGKKFARYQLGDLLLHLEKKHGEDWGKVYDEAWERIDKKVEGLSKHIKLEEERRSEDAQSKAALTDWLRAKASFVIEGLKEADKDEFCRCELKLQKWYGDLRGKPFAIEAENSILDISGFSKQYNCAFIWQKDGVKKLNLYLIINYFKGGKLRFKKIKPEAFEANRFYTVINKKSGEIVPMEVNFNFDDPNLIILPLAFGKRQGREFIWNDLLSLETGSLKLANGRVIEKTLYNRRTRQDEPALFVALTFERREVLDSSNIKPMNLIGVDRGENIPAVIALTDPEGCPLSRFKDSLGNPTHILRIGERYKEKQRTIQAKKEVEQRRAGGYSRKYASKAKNLADDMVRNTARDLLYYAVTQDAMLIFENLSRGFGRQGKRTFMAERQYTRMEDWLTAKLAYEGLPSKTYLSKTLAQYTSKTCSNCGFTITSADYDRVLEKLKKTATGWMTTINGKELKVEGQITYYNRYKRQNVVKDLSVELDRLSEESVNNDISSWTKGRSGEALSLLKKRFSHRPVQEKFVCLNCGFETHADEQAALNIARSWLFLRSQEYKKYQTNKTTGNTDKRAFVETWQSFYRKKLKEVWKPAV

SEQ ID NO: 33143 - protein, 978 aa, synthetic construct
  REGION 1..978: note = engineered CasX variant
QEIKRISKIRRRLVKDSNTKKAGKTGPMKTLLVRVMTPDLRERLENLRKKPENIPQPISNTSRANLNKLLTDYTEMKKAILHVYWEEFQKDPVGLMSRVAQPASKKIDQNKLKPEMDEKGNLTTAGFACSQCGQPLFVYKLEQVSEKGKAYTNYFGRCNVAEHEKLILLAQLKPEKDSDEAVTYSLGKFGQRALDFYSIHVTKESTHPVKPLAQIAGNRYASAPVGKALSDACMGTIASFLSKYQDIIIEHQKVVKGNQKRLESLRELAGKENLEYPSVTLPPQPHTKEGVDAYNEVIARVRMWVNLNLWQKLKLSRDDAKPLLRLKGFPSFPLVERQANEVDWWDMVCNVKKLINEKKEDGKVFWQNLAGYKRQEALRPYLSSEEDRKKGKKFARYQLGDLLLHLEKKHGEDWGKVYDEAWERIDKKVEGLSKHIKLEEERRSEDAQSKAALTDWLRAKASFVIEGLKEADKDEFCRCELKLQKWYGDLRGKPFAIEAENSILDISGFSKQYNCAFIWQKDGVKKLNLYLIINYFKGGKLRFKKIKPEAFEANRFYTVINKKSGEIVPMEVNFNFDDPNLIILPLAFGKRQGREFIWNDLLSLETGSLKLANGRVIEKTLYNRRTRQDEPALFVALTFERREVLDSSNIKPMNLIGVDRGENIPAVIALTDPEGCPLSRFKDSLGNPTHILRIGERYKEKQRTIQAKKEVEQRRAGGYSRKYASKAKNLADDMVRNTARDLLYYAVTQDAMLIFENLSRGFGRQGKRTFMAERQYTRMEDWLTAKLAYEGLPSKTYLSKTLAQYTSKTCSNCGFTITSADYDRVLEKLKKTATGWMTTINGKELKVEGQITYYNRYKRQNVVKDLSVELDRLSEESVNNDISSWTKGRSGEALSLLKKRFSHRPVQEKFVCLNCGFETHADEQAALNIARSWLFLRSQEYKKYQTNKTTGNTDKRAFVETWQSFYRKKLKEVWKPAV

SEQ ID NO: 33144 - protein, 978 aa, synthetic construct
  REGION 1..978: note = engineered CasX variant
QEIKRISKIRRRLVKDSNTKKAGKTGPMKTLLVRVMTPDLRERLENLRKKPENIPQPISNTSRANLNKLLTDYTEMKKAILHVYWEEFQKDPVGLMSRVAQPASKKIDQNKLKPEMDEKGNLTTAGFACSQCGQPLFVYKLEQVSEKGKAYTNYFGRCNVAEHEKLILLAQLKPEKDSDEAVTYSLGKFGQRALDFYSIHVTKESTHPVKPLAQIAGNRYASVPVGKALSDACMGTIASFLSKYQDIIIEHQKVVKGNQKRLESLRELAGKENLEYPSVTLPPQPHTKEGVDAYNEVIARVRMWVNLNLWQKLKLSRDDAKPLLRLKGFPSFPLVERQANEVDWWDMVCNVKKLINEKKEDGKVFWQNLAGYKRQEALRPYLSSEEDRKKGKKFARYQLGDLLLHLEKKHGEDWGKVYDEAWERIDKKVEGLSKHIKLEEERRSEDAQSKAALTDWLRAKASFVIEGLKEADKDEFCRCELKLQKWYGDLRGKPFAIEAENSILDISGFSKQYNCAFIWQKDGVKKLNLYLIINYFKGGKLRFKKIKPEAFEANRFYTVINKKSGEIVPMEVNFNFDDPNLIILPLAFGKRQGREFIWNDLLSLETGSLKLANGRVIEKTLYNRRTRQDEPALFVALTFERREVLDSSNIKPMNLIGVDRGENIPAVIALTDPEGCPLSRFKDSLGNPTHILRIGERYKEKQRTIQAKKEVEQRRAGGYSRKYASKAKNLADDMVRNTARDLLYYAVTQDAMLIFENLSRGFGRQGKRTFMAERQYTRMEDWLTAKLAYEGLPSKTYLSKTLAQYTSKTCSNCGFTITSADYDRVLEKLKKTATGWMTTINGKELKVEGQITYYNRYKRQNVVKDLSVELDRLSEESVNNDISSWTKGRSGEALSLLKKRFSHRPVQEKFVCLNCGFETHADEQAALNIARSWLFLRSQEYKKYQTNKTTGNTDKRAFVETWQSFYRKKLKEVWKPAV

SEQ ID NO: 33145 - protein, 978 aa, synthetic construct
  REGION 1..978: note = engineered CasX variant
QEIKRISKIRRRLVKDSNTKKAGKTGPMKTLLVRVMTPDLRERLENLRKKPENIPQPISNTSRANLNKLLTDYTEMKKAILHVYWEEFQKDPVGLMSRVAQPASKKIDQNKLKPEMDEKGNLTTAGFACSQCGQPLFVYKLEQVSEKGKAYTNYFGRCNVAEHEKLIKLAQLKPEKDSDEAVTYSLGKFGQRALDFYSIHVTKESTHPVKPLAQIAGNRYASGPVGKALSDACMGTIASFLSKYQDIIIEHQKVVKGNQKRLESLRELAGKENLEYPSVTLPPQPHTKEGVDAYNEVIARVRMWVNLNLWQKLKLSRDDAKPLLRLKGFPSFPLVERQANEVDWWDMVCNVKKLINEKKEDGKVFWQNLAGYKRQEALRPYLSSEEDRKKGKKFARYQLGDLLLHLEKKHGEDWGKVYDEAWERIDKKVEGLSKHIKLEEERRSEDAQSKAALTDWLRAKASFVIEGLKEADKDEFCRCELKLQKWYGDLRGKPFAIEAENSILDISGFSKQYNCAFIWQKDGVKKLNLYLIINYFKGGKLRFKKIKPEAFEANRFYTVINKKSGEIVPMEVNFNFDDPNLIILPLAFGKRQGREFIWNDLLSLETGSLKLANGRVIEKTLYNRRTRQDEPALFVALTFERREVLDSSNIKPMNLIGVDRGENIPAVIALTDPEGCPLSRFKDSLGNPTHILRIGERYKEKQRTIQAKKEVEQRRAGGYSRKYASKAKNLADDMVRNTARDLLYYAVTQDAMLIFENLSRGFGRQGKRTFMAERQYTRMEDWLTAKLAYEGLPSKTYLSKTLAQYTSKTCSNCGFTITSADYDRVLEKLKKTATGWMTTINGKELKVEGQITYYNRYKRQNVVKDLSVELDRLSEESVNNDISSWTKGRSGEALSLLKKRFSHRPVQEKFVCLNCGFETHADEQAALNIARSWLFLRSQEYKKYQTNKTTGNTDKRAFVETWQSFYRKKLKEVWKPAV

SEQ ID NO: 33146 - protein, 977 aa, synthetic construct
  REGION 1..977: note = engineered CasX variant
QEIKRISKIRRRLVKDSNTKKAGKTGPMKTLLVRVMTPDLRERLENLRKKPENIPQPISNTSRANLNKLLTDYTEMKKAILHVYWEEFQKDPVGLMSRVAQPASKKIDQNKLKPEMDEKGNLTTAGFACSQCGQPLFVYKLEQVSEKGKAYTNYFGRCNVAEHEKLILLAQLKPEKDSDEAVTYSLGKFGQRALDFYSIHVTKESTHPVKPLAQIAGNRYASPVGKALSDACMGTIASFLSKYQDIIIEHQKVVKGNQKRLESLRELAGKENLEYPSVTLPPQPHTKEGVDAYNEVIARVRMWVNLNLWQKLKLSRDDAKPLLRLKGFPSFPLVERQANEVDWWDMVCNVKKLINEKKEDGKVFWQNLAGYKRQEALRPYLSSEEDRKKGKKFARYQLGDLLLHLEKKHGEDWGKVYDEAWERIDKKVEGLSKHIKLEEERRSEDAQSKAALTDWLRAKASFVIEGLKEADKDEFCRCELKLQKWYGDLRGKPFAIEAENSILDISGFSKQYNCAFIWQKDGVKKLNLYLIINYFKGGKLRFKKIKPEAFEANRFYTVINKKSGEIVPMEVNFNFDDPNLIILPLAFGKRQGREFIWNDLLSLETGSLKLANGRVIEKTLYNRRTRQDEPALFVALTFERREVLDSSNIKPMNLIGVDRGENIPAVIALTDPEGCPLSRFKDSLGNPTHILRIGERYKEKQRTIQAKKEVEQRRAGGYSRKYASKAKNLADDMVRNTARDLLYYAVTQDAMLIFENLSRGFGRQGKRTFMAERQYTRMEDWLTAKLAYEGLPSKTYLSKTLAQYTSKTCSNCGFTITSADYDRVLEKLKKTATGWMTTINGKELKVEGQITYYNRYKRQNVVKDLSVELDRLSEESVNNDISSWTKGRSGEALSLLKKRFSHRPVQEKFVCLNCGFETHADEQAALNIARSWLFLRSQEYKKYQTNKTTGNTDKRAFVETWQSFYRKKLKEVWKPAV

SEQ ID NO: 33147 - protein, 978 aa, synthetic construct
  REGION 1..978: note = engineered CasX variant
QEIKRISKIRRRLVKDSNTKKAGKTGPMKTLLVRVMTPDLRERLENLRKKPENIPQPISNTSRANLNKLLTDYTEMKKAILHVYWEEFQKDPVGLMSRVAQPASKKIDQNKLKPEMDEKGNLTTAGFACSQCGQPLFVYKLEQVSEKGKAYTNYFGRCNVAEHEKLILLAQLKPEKDSDEAVTYSLGKFGQRALDFYSIHVTKESTHPVKPLAQIAGNRYASYPVGKALSDACMGTIASFLSKYQDIIIEHQKVVKGNQKRLESLRELAGKENLEYPSVTLPPQPHTKEGVDAYNEVIARVRMWVNLNLWQKLKLSRDDAKPLLRLKGFPSFPLVERQANEVDWWDMVCNVKKLINEKKEDGKVFWQNLAGYKRQEALRPYLSSEEDRKKGKKFARYQLGDLLLHLEKKHGEDWGKVYDEAWERIDKKVEGLSKHIKLEEERRSEDAQSKAALTDWLRAKASFVIEGLKEADKDEFCRCELKLQKWYGDLRGKPFAIEAENSILDISGFSKQYNCAFIWQKDGVKKLNLYLIINYFKGGKLRFKKIKPEAFEANRFYTVINKKSGEIVPMEVNFNFDDPNLIILPLAFGKRQGREFIWNDLLSLETGSLQLANGRVIEKTLYNRRTRQDEPALFVALTFERREVLDSSNIKPMNLIGVDRGENIPAVIALTDPEGCPLSRFKDSLGNPTHILRIGESYKEKQRTIQAKKEVEQRRAGGYSRKYASKAKNLADDMVRNTARDLLYYAVTQDAMLIFENLSRGFGRQGKRTFMAERQYTRMEDWLTAKLAYEGLPSKTYLSKTLAQYTSKTCSNCGFTITSADYDRVLEKLKKTATGWMTTINGKELKVEGQITYYNRYKRQNVVKDLSVELDRLSEESVNNDISSWTKGRSGEALSLLKKRFSHRPVQEKFVCLNCGFETHADEQAALNIARSWLFLRSQEYKKYQTNKTTGNTDKRAFVETWQSFYRKKLKEVWKPAV

SEQ ID NO: 33148 - protein, 978 aa, synthetic construct
  REGION 1..978: note = engineered CasX variant
QEIKRISKIRRRLVKDSNTKKAGKTGPMKTLLVRVMTPDLRERLENLRKKPENIPQPISNTSRANLNKLLTDYTEMKKAILHVYWEEFQKDPVGLMSRVAQPASKKIDQNKLKPEMDEKGNLTTAGFACSQCGQPLFVYKLEQVSEKGKAYTNYFGRCNVAEHEKLILLAQLKPEKDSDEAVTYSLGKFGQRALDFYSIHVTKESTHPVKPLAQIAGNRYASHPVGKALSDACMGTIASFLSKYQDIIIEHQKVVKGNQKRLESLRELAGKENLEYPSVTLPPQPHTKEGVDAYNEVIARVRMWVNLNLWQKLKLSRDDAKPLLRLKGFPSFPLVERQANEVDWWDMVCNVKKLINEKKEDGKVFWQNLAGYKRQEALRPYLSSEEDRKKGKKFARYQLGDLLLHLEKKHGEDWGKVYDEAWERIDKKVEGLSKHIKLEEERRSEDAQSKAALTDWLRAKASFVIEGLKEADKDEFCRCELKLQKWYGDLRGKPFAIEAENSILDISGFSKQYNCAFIWQKDGVKKLNLYLIINYFKGGKLRFKKIKPEAFEANRFYTVINKKSGEIVPMEVNFNFDDPNLIILPLAFGKRQGREFIWNDLLSLETGSLQLANGRVIEKTLYNRRTRQDEPALFVALTFERREVLDSSNIKPMNLIGVDRGENIPAVIALTDPEGCPLSRFKDSLGNPTHILRIGESYKEKQRTIQAKKEVEQRRAGGYSRKYASKAKNLADDMVRNTARDLLYYAVTQDAMLIFENLSRGFGRQGKRTFMAERQYTRMEDWLTAKLAYEGLPSKTYLSKTLAQYTSKTCSNCGFTITSADYDRVLEKLKKTATGWMTTINGKELKVEGQITYYNRYKRQNVVKDLSVELDRLSEESVNNDISSWTKGRSGEALSLLKKRFSHRPVQEKFVCLNCGFETHADEQAALNIARSWLFLRSQEYKKYQTNKTTGNTDKRAFVETWQSFYRKKLKEVWKPAV

SEQ ID NO: 33149 - protein, 978 aa, synthetic construct
  REGION 1..978: note = engineered CasX variant
QEIKRISKIRRRLVKDSNTKKAGKTGPMKTLLVRVMTPDLRERLENLRKKPENIPQPISNTSRANLNKLLTDYTEMKKAILHVYWEEFQKDPVGLMSRVAQPASKKIDQNKLKPEMDEKGNLTTAGFACSQCGQPLFVYKLEQVSEKGKAYTNYFGRCNVAEHEKLILLAQLKPEKDSDEAVTYSLGKFGQRALDFYSIHVTKESTHPVKPLAQIAGNRYASSPVGKALSDACMGTIASFLSKYQDIIIEHQKVVKGNQKRLESLRELAGKENLEYPSVTLPPQPHTKEGVDAYNEVIARVRMWVNLNLWQKLKLSRDDAKPLLRLKGFPSFPLVERQANEVDWWDMVCNVKKLINEKKEDGKVFWQNLAGYKRQEALRPYLSSEEDRKKGKKFARYQLGDLLLHLEKKHGEDWGKVYDEAWERIDKKVEGLSKHIKLEEERRSEDAQSKAALTDWLRAKASFVIEGLKEADKDEFCRCELKLQKWYGDLRGKPFAIEAENSILDISGFSKQYNCAFIWQKDGVKKLNLYLIINYFKGGKLRFKKIKPEAFEANRFYTVINKKSGEIVPMEVNFNFDDPNLIILPLAFGKRQGREFIWNDLLSLETGSLQLANGRVIEKTLYNRRTRQDEPALFVALTFERREVLDSSNIKPMNLIGVDRGENIPAVIALTDPEGCPLSRFKDSLGNPTHILRIGESYKEKQRTIQAKKEVEQRRAGGYSRKYASKAKNLADDMVRNTARDLLYYAVTQDAMLIFENLSRGFGRQGKRTFMAERQYTRMEDWLTAKLAYEGLPSKTYLSKTLAQYTSKTCSNCGFTITSADYDRVLEKLKKTATGWMTTINGKELKVEGQITYYNRYKRQNVVKDLSVELDRLSEESVNNDISSWTKGRSGEALSLLKKRFSHRPVQEKFVCLNCGFETHADEQAALNIARSWLFLRSQEYKKYQTNKTTGNTDKRAFVETWQSFYRKKLKEVWKPAV

SEQ ID NO: 33150 - protein, 978 aa, synthetic construct
  REGION 1..978: note = engineered CasX variant
QEIKRISKIRRRLVKDSNTKKAGKTGPMKTLLVRVMTPDLRERLENLRKKPENIPQPISNTSRANLNKLLTDYTEMKKAILHVYWEEFQKDPVGLMSRVAQPASKKIDQNKLKPEMDEKGNLTTAGFACSQCGQPLFVYKLEQVSEKGKAYTNYFGRCNVAEHEKLILLAQLKPEKDSDEAVTYSLGKFGQRALDFYSIHVTKESTHPVKPLAQIAGNRYASTPVGKALSDACMGTIASFLSKYQDIIIEHQKVVKGNQKRLESLRELAGKENLEYPSVTLPPQPHTKEGVDAYNEVIARVRMWVNLNLWQKLKLSRDDAKPLLRLKGFPSFPLVERQANEVDWWDMVCNVKKLINEKKEDGKVFWQNLAGYKRQEALRPYLSSEEDRKKGKKFARYQLGDLLLHLEKKHGEDWGKVYDEAWERIDKKVEGLSKHIKLEEERRSEDAQSKAALTDWLRAKASFVIEGLKEADKDEFCRCELKLQKWYGDLRGKPFAIEAENSILDISGFSKQYNCAFIWQKDGVKKLNLYLIINYFKGGKLRFKKIKPEAFEANRFYTVINKKSGEIVPMEVNFNFDDPNLIILPLAFGKRQGREFIWNDLLSLETGSLQLANGRVIEKTLYNRRTRQDEPALFVALTFERREVLDSSNIKPMNLIGVDRGENIPAVIALTDPEGCPLSRFKDSLGNPTHILRIGESYKEKQRTIQAKKEVEQRRAGGYSRKYASKAKNLADDMVRNTARDLLYYAVTQDAMLIFENLSRGFGRQGKRTFMAERQYTRMEDWLTAKLAYEGLPSKTYLSKTLAQYTSKTCSNCGFTITSADYDRVLEKLKKTATGWMTTINGKELKVEGQITYYNRYKRQNVVKDLSVELDRLSEESVNNDISSWTKGRSGEALSLLKKRFSHRPVQEKFVCLNCGFETHADEQAALNIARSWLFLRSQEYKKYQTNKTTGNTDKRAFVETWQSFYRKKLKEVWKPAV

SEQ ID NO: 33151 - protein, 978 aa, synthetic construct
  REGION 1..978: note = engineered CasX variant
QEIKRISKIRRRLVKDSNTKKAGKTGPMKTLLVRVMTPDLRERLENLRKKPENIPQPISNTSRANLNKLLTDYTEMKKAILHVYWEEFQKDPVGLMSRVAQPASKKIDQNKLKPEMDEKGNLTTAGFACSQCGQPLFVYKLEQVSEKGKAYTNYFGRCNVAEHEKLILLAQLKPEKDSDEAVTYSLGKFGQRALDFYSIHVTKESTHPVKPLAQIAGNRYASAPVGKALSDACMGTIASFLSKYQDIIIEHQKVVKGNQKRLESLRELAGKENLEYPSVTLPPQPHTKEGVDAYNEVIARVRMWVNLNLWQKLKLSRDDAKPLLRLKGFPSFPLVERQANEVDWWDMVCNVKKLINEKKEDGKVFWQNLAGYKRQEALRPYLSSEEDRKKGKKFARYQLGDLLLHLEKKHGEDWGKVYDEAWERIDKKVEGLSKHIKLEEERRSEDAQSKAALTDWLRAKASFVIEGLKEADKDEFCRCELKLQKWYGDLRGKPFAIEAENSILDISGFSKQYNCAFIWQKDGVKKLNLYLIINYFKGGKLRFKKIKPEAFEANRFYTVINKKSGEIVPMEVNFNFDDPNLIILPLAFGKRQGREFIWNDLLSLETGSLQLANGRVIEKTLYNRRTRQDEPALFVALTFERREVLDSSNIKPMNLIGVDRGENIPAVIALTDPEGCPLSRFKDSLGNPTHILRIGESYKEKQRTIQAKKEVEQRRAGGYSRKYASKAKNLADDMVRNTARDLLYYAVTQDAMLIFENLSRGFGRQGKRTFMAERQYTRMEDWLTAKLAYEGLPSKTYLSKTLAQYTSKTCSNCGFTITSADYDRVLEKLKKTATGWMTTINGKELKVEGQITYYNRYKRQNVVKDLSVELDRLSEESVNNDISSWTKGRSGEALSLLKKRFSHRPVQEKFVCLNCGFETHADEQAALNIARSWLFLRSQEYKKYQTNKTTGNTDKRAFVETWQSFYRKKLKEVWKPAV

SEQ ID NO: 33152 - protein, 978 aa, synthetic construct
  REGION 1..978: note = engineered CasX variant
QEIKRISKIRRRLVKDSNTKKAGKTGPMKTLLVRVMTPDLRERLENLRKKPENIPQPISNTSRANLNKLLTDYTEMKKAILHVYWEEFQKDPVGLMSRVAQPASKKIDQNKLKPEMDEKGNLTTAGFACSQCGQPLFVYKLEQVSEKGKAYTNYFGRCNVAEHEKLILLAQLKPEKDSDEAVTYSLGKFGQRALDFYSIHVTKESTHPVKPLAQIAGNRYASVPVGKALSDACMGTIASFLSKYQDIIIEHQKVVKGNQKRLESLRELAGKENLEYPSVTLPPQPHTKEGVDAYNEVIARVRMWVNLNLWQKLKLSRDDAKPLLRLKGFPSFPLVERQANEVDWWDMVCNVKKLINEKKEDGKVFWQNLAGYKRQEALRPYLSSEEDRKKGKKFARYQLGDLLLHLEKKHGEDWGKVYDEAWERIDKKVEGLSKHIKLEEERRSEDAQSKAALTDWLRAKASFVIEGLKEADKDEFCRCELKLQKWYGDLRGKPFAIEAENSILDISGFSKQYNCAFIWQKDGVKKLNLYLIINYFKGGKLRFKKIKPEAFEANRFYTVINKKSGEIVPMEVNFNFDDPNLIILPLAFGKRQGREFIWNDLLSLETGSLQLANGRVIEKTLYNRRTRQDEPALFVALTFERREVLDSSNIKPMNLIGVDRGENIPAVIALTDPEGCPLSRFKDSLGNPTHILRIGESYKEKQRTIQAKKEVEQRRAGGYSRKYASKAKNLADDMVRNTARDLLYYAVTQDAMLIFENLSRGFGRQGKRTFMAERQYTRMEDWLTAKLAYEGLPSKTYLSKTLAQYTSKTCSNCGFTITSADYDRVLEKLKKTATGWMTTINGKELKVEGQITYYNRYKRQNVVKDLSVELDRLSEESVNNDISSWTKGRSGEALSLLKKRFSHRPVQEKFVCLNCGFETHADEQAALNIARSWLFLRSQEYKKYQTNKTTGNTDKRAFVETWQSFYRKKLKEVWKPAV

SEQ ID NO: 33153 - protein, 978 aa, synthetic construct
  REGION 1..978: note = engineered CasX variant
QEIKRISKIRRRLVKDSNTKKAGKTGPMKTLLVRVMTPDLRERLENLRKKPENIPQPISNTSRANLNKLLTDYTEMKKAILHVYWEEFQKDPVGLMSRVAQPASKKIDQNKLKPEMDEKGNLTTAGFACSQCGQPLFVYKLEQVSEKGKAYTNYFGRCNVAEHEKLIKLAQLKPEKDSDEAVTYSLGKFGQRALDFYSIHVTKESTHPVKPLAQIAGNRYASGPVGKALSDACMGTIASFLSKYQDIIIEHQKVVKGNQKRLESLRELAGKENLEYPSVTLPPQPHTKEGVDAYNEVIARVRMWVNLNLWQKLKLSRDDAKPLLRLKGFPSFPLVERQANEVDWWDMVCNVKKLINEKKEDGKVFWQNLAGYKRQEALRPYLSSEEDRKKGKKFARYQLGDLLLHLEKKHGEDWGKVYDEAWERIDKKVEGLSKHIKLEEERRSEDAQSKAALTDWLRAKASFVIEGLKEADKDEFCRCELKLQKWYGDLRGKPFAIEAENSILDISGFSKQYNCAFIWQKDGVKKLNLYLIINYFKGGKLRFKKIKPEAFEANRFYTVINKKSGEIVPMEVNFNFDDPNLIILPLAFGKRQGREFIWNDLLSLETGSLQLANGRVIEKTLYNRRTRQDEPALFVALTFERREVLDSSNIKPMNLIGVDRGENIPAVIALTDPEGCPLSRFKDSLGNPTHILRIGESYKEKQRTIQAKKEVEQRRAGGYSRKYASKAKNLADDMVRNTARDLLYYAVTQDAMLIFENLSRGFGRQGKRTFMAERQYTRMEDWLTAKLAYEGLPSKTYLSKTLAQYTSKTCSNCGFTITSADYDRVLEKLKKTATGWMTTINGKELKVEGQITYYNRYKRQNVVKDLSVELDRLSEESVNNDISSWTKGRSGEALSLLKKRFSHRPVQEKFVCLNCGFETHADEQAALNIARSWLFLRSQEYKKYQTNKTTGNTDKRAFVETWQSFYRKKLKEVWKPAV

SEQ ID NO: 33154 - protein, 977 aa, synthetic construct
  REGION 1..977: note = engineered CasX variant
QEIKRISKIRRRLVKDSNTKKAGKTGPMKTLLVRVMTPDLRERLENLRKKPENIPQPISNTSRANLNKLLTDYTEMKKAILHVYWEEFQKDPVGLMSRVAQPASKKIDQNKLKPEMDEKGNLTTAGFACSQCGQPLFVYKLEQVSEKGKAYTNYFGRCNVAEHEKLILLAQLKPEKDSDEAVTYSLGKFGQRALDFYSIHVTKESTHPVKPLAQIAGNRYASPVGKALSDACMGTIASFLSKYQDIIIEHQKVVKGNQKRLESLRELAGKENLEYPSVTLPPQPHTKEGVDAYNEVIARVRMWVNLNLWQKLKLSRDDAKPLLRLKGFPSFPLVERQANEVDWWDMVCNVKKLINEKKEDGKVFWQNLAGYKRQEALRPYLSSEEDRKKGKKFARYQLGDLLLHLEKKHGEDWGKVYDEAWERIDKKVEGLSKHIKLEEERRSEDAQSKAALTDWLRAKASFVIEGLKEADKDEFCRCELKLQKWYGDLRGKPFAIEAENSILDISGFSKQYNCAFIWQKDGVKKLNLYLIINYFKGGKLRFKKIKPEAFEANRFYTVINKKSGEIVPMEVNFNFDDPNLIILPLAFGKRQGREFIWNDLLSLETGSLQLANGRVIEKTLYNRRTRQDEPALFVALTFERREVLDSSNIKPMNLIGVDRGENIPAVIALTDPEGCPLSRFKDSLGNPTHILRIGESYKEKQRTIQAKKEVEQRRAGGYSRKYASKAKNLADDMVRNTARDLLYYAVTQDAMLIFENLSRGFGRQGKRTFMAERQYTRMEDWLTAKLAYEGLPSKTYLSKTLAQYTSKTCSNCGFTITSADYDRVLEKLKKTATGWMTTINGKELKVEGQITYYNRYKRQNVVKDLSVELDRLSEESVNNDISSWTKGRSGEALSLLKKRFSHRPVQEKFVCLNCGFETHADEQAALNIARSWLFLRSQEYKKYQTNKTTGNTDKRAFVETWQSFYRKKLKEVWKPAV

SEQ ID NO: 33155 - protein, 978 aa, synthetic construct
  REGION 1..978: note = engineered CasX variant
QEIKRINGIRRRLVKDSNTKKAGKTGPMKTLLVPVMTPDLRERLENLRKKPENIPQPISNTSRANLNKLLTDYTEMKKAILHVYWEEFQKDPVGLMSRVAQPASKKIDQNKLKPEMDEKGNLTTAGFACSQCGQPLFVYKLEQVSEKGKAYTNYFGRCNVAEHEKLILLAQLKPEKDSDEAVTYSLGKFGQRALDFYSIHVTKESTHPVKPLAQIAGNRYASYPVGKALSDACMGTIASFLSKYQDIIIEHQKVVKGNQKRLESLRELAGKENLEYPSVTLPPQPHTKEGVDAYNEVIARVRMWVNLNLWQKLKLSRDDAKPLLRLKGFPSFPLVERQANEVDWWDMVCNVKKLINEKKEDGKVFWQNLAGYKRQEALRPYLSSEEDRKKGKKFARYQLGDLLLHLEKKHGEDWGKVYDEAWERIDKKVEGLSKHIKLEEERRSEDAQSKAALTDWLRAKASFVIEGLKEADKDEFCRCELKLQKWYGDLRGKPFAIEAENSILDISGFSKQYNCAFIWQKDGVKKLNLYLIINYFKGGKLRFKKIKPEAFEANRFYTVINKKSGEIVPMEVNFNFDDPNLIILPLAFGKRQGREFIWNDLLSLETGSLKLANGRVIEKTLYNRRTRQDEPALFVALTFERREVLDSSNIKPMNLIGVDRGENIPAVIALTDPEGCPLSRFKDSLGNPTHILRIGESYKEKQRTIQAKKEVEQRRAGGYSRKYASKAKNLADDMVRNTARDLLYYAVTQDAMLIFENLSRGFGRQGKRTFMAERQYTRMEDWLTAKLAYEGLPSKTYLSKTLAQYTSKTCSNCGFTITSADYDRVLEKLKKTATGWMTTINGKELKVEGQITYYNRYKRQNVVKDLSVELDRLSEESVNNDISSWTKGRSGEALSLLKKRFSHRPVQEKFVCLNCGFETHADEQAALNIARSWLFLRSQEYKKYQTNKTTGNTDKRAFVETWQSFYRKKLKEVWKPAV

SEQ ID NO: 33156 - protein, 978 aa, synthetic construct
  REGION 1..978: note = engineered CasX variant
QEIKRINGIRRRLVKDSNTKKAGKTGPMKTLLVPVMTPDLRERLENLRKKPENIPQPISNTSRANLNKLLTDYTEMKKAILHVYWEEFQKDPVGLMSRVAQPASKKIDQNKLKPEMDEKGNLTTAGFACSQCGQPLFVYKLEQVSEKGKAYTNYFGRCNVAEHEKLILLAQLKPEKDSDEAVTYSLGKFGQRALDFYSIHVTKESTHPVKPLAQIAGNRYASHPVGKALSDACMGTIASFLSKYQDIIIEHQKVVKGNQKRLESLRELAGKENLEYPSVTLPPQPHTKEGVDAYNEVIARVRMWVNLNLWQKLKLSRDDAKPLLRLKGFPSFPLVERQANEVDWWDMVCNVKKLINEKKEDGKVFWQNLAGYKRQEALRPYLSSEEDRKKGKKFARYQLGDLLLHLEKKHGEDWGKVYDEAWERIDKKVEGLSKHIKLEEERRSEDAQSKAALTDWLRAKASFVIEGLKEADKDEFCRCELKLQKWYGDLRGKPFAIEAENSILDISGFSKQYNCAFIWQKDGVKKLNLYLIINYFKGGKLRFKKIKPEAFEANRFYTVINKKSGEIVPMEVNFNFDDPNLIILPLAFGKRQGREFIWNDLLSLETGSLKLANGRVIEKTLYNRRTRQDEPALFVALTFERREVLDSSNIKPMNLIGVDRGENIPAVIALTDPEGCPLSRFKDSLGNPTHILRIGESYKEKQRTIQAKKEVEQRRAGGYSRKYASKAKNLADDMVRNTARDLLYYAVTQDAMLIFENLSRGFGRQGKRTFMAERQYTRMEDWLTAKLAYEGLPSKTYLSKTLAQYTSKTCSNCGFTITSADYDRVLEKLKKTATGWMTTINGKELKVEGQITYYNRYKRQNVVKDLSVELDRLSEESVNNDISSWTKGRSGEALSLLKKRFSHRPVQEKFVCLNCGFETHADEQAALNIARSWLFLRSQEYKKYQTNKTTGNTDKRAFVETWQSFYRKKLKEVWKPAV

SEQ ID NO: 33157 - protein, 978 aa, synthetic construct
  REGION 1..978: note = engineered CasX variant
QEIKRINGIRRRLVKDSNTKKAGKTGPMKTLLVPVMTPDLRERLENLRKKPENIPQPISNTSRANLNKLLTDYTEMKKAILHVYWEEFQKDPVGLMSRVAQPASKKIDQNKLKPEMDEKGNLTTAGFACSQCGQPLFVYKLEQVSEKGKAYTNYFGRCNVAEHEKLILLAQLKPEKDSDEAVTYSLGKFGQRALDFYSIHVTKESTHPVKPLAQIAGNRYASSPVGKALSDACMGTIASFLSKYQDIIIEHQKVVKGNQKRLESLRELAGKENLEYPSVTLPPQPHTKEGVDAYNEVIARVRMWVNLNLWQKLKLSRDDAKPLLRLKGFPSFPLVERQANEVDWWDMVCNVKKLINEKKEDGKVFWQNLAGYKRQEALRPYLSSEEDRKKGKKFARYQLGDLLLHLEKKHGEDWGKVYDEAWERIDKKVEGLSKHIKLEEERRSEDAQSKAALTDWLRAKASFVIEGLKEADKDEFCRCELKLQKWYGDLRGKPFAIEAENSILDISGFSKQYNCAFIWQKDGVKKLNLYLIINYFKGGKLRFKKIKPEAFEANRFYTVINKKSGEIVPMEVNFNFDDPNLIILPLAFGKRQGREFIWNDLLSLETGSLKLANGRVIEKTLYNRRTRQDEPALFVALTFERREVLDSSNIKPMNLIGVDRGENIPAVIALTDPEGCPLSRFKDSLGNPTHILRIGESYKEKQRTIQAKKEVEQRRAGGYSRKYASKAKNLADDMVRNTARDLLYYAVTQDAMLIFENLSRGFGRQGKRTFMAERQYTRMEDWLTAKLAYEGLPSKTYLSKTLAQYTSKTCSNCGFTITSADYDRVLEKLKKTATGWMTTINGKELKVEGQITYYNRYKRQNVVKDLSVELDRLSEESVNNDISSWTKGRSGEALSLLKKRFSHRPVQEKFVCLNCGFETHADEQAALNIARSWLFLRSQEYKKYQTNKTTGNTDKRAFVETWQSFYRKKLKEVWKPAV

SEQ ID NO: 33158 - protein, 978 aa, synthetic construct
  REGION 1..978: note = engineered CasX variant
QEIKRINGIRRRLVKDSNTKKAGKTGPMKTLLVPVMTPDLRERLENLRKKPENIPQPISNTSRANLNKLLTDYTEMKKAILHVYWEEFQKDPVGLMSRVAQPASKKIDQNKLKPEMDEKGNLTTAGFACSQCGQPLFVYKLEQVSEKGKAYTNYFGRCNVAEHEKLILLAQLKPEKDSDEAVTYSLGKFGQRALDFYSIHVTKESTHPVKPLAQIAGNRYASTPVGKALSDACMGTIASFLSKYQDIIIEHQKVVKGNQKRLESLRELAGKENLEYPSVTLPPQPHTKEGVDAYNEVIARVRMWVNLNLWQKLKLSRDDAKPLLRLKGFPSFPLVERQANEVDWWDMVCNVKKLINEKKEDGKVFWQNLAGYKRQEALRPYLSSEEDRKKGKKFARYQLGDLLLHLEKKHGEDWGKVYDEAWERIDKKVEGLSKHIKLEEERRSEDAQSKAALTDWLRAKASFVIEGLKEADKDEFCRCELKLQKWYGDLRGKPFAIEAENSILDISGFSKQYNCAFIWQKDGVKKLNLYLIINYFKGGKLRFKKIKPEAFEANRFYTVINKKSGEIVPMEVNFNFDDPNLIILPLAFGKRQGREFIWNDLLSLETGSLKLANGRVIEKTLYNRRTRQDEPALFVALTFERREVLDSSNIKPMNLIGVDRGENIPAVIALTDPEGCPLSRFKDSLGNPTHILRIGESYKEKQRTIQAKKEVEQRRAGGYSRKYASKAKNLADDMVRNTARDLLYYAVTQDAMLIFENLSRGFGRQGKRTFMAERQYTRMEDWLTAKLAYEGLPSKTYLSKTLAQYTSKTCSNCGFTITSADYDRVLEKLKKTATGWMTTINGKELKVEGQITYYNRYKRQNVVKDLSVELDRLSEESVNNDISSWTKGRSGEALSLLKKRFSHRPVQEKFVCLNCGFETHADEQAALNIARSWLFLRSQEYKKYQTNKTTGNTDKRAFVETWQSFYRKKLKEVWKPAV

SEQ ID NO: 33159 - protein, 978 aa, synthetic construct
  REGION 1..978: note = engineered CasX variant
QEIKRINGIRRRLVKDSNTKKAGKTGPMKTLLVPVMTPDLRERLENLRKKPENIPQPISNTSRANLNKLLTDYTEMKKAILHVYWEEFQKDPVGLMSRVAQPASKKIDQNKLKPEMDEKGNLTTAGFACSQCGQPLFVYKLEQVSEKGKAYTNYFGRCNVAEHEKLILLAQLKPEKDSDEAVTYSLGKFGQRALDFYSIHVTKESTHPVKPLAQIAGNRYASAPVGKALSDACMGTIASFLSKYQDIIIEHQKVVKGNQKRLESLRELAGKENLEYPSVTLPPQPHTKEGVDAYNEVIARVRMWVNLNLWQKLKLSRDDAKPLLRLKGFPSFPLVERQANEVDWWDMVCNVKKLINEKKEDGKVFWQNLAGYKRQEALRPYLSSEEDRKKGKKFARYQLGDLLLHLEKKHGEDWGKVYDEAWERIDKKVEGLSKHIKLEEERRSEDAQSKAALTDWLRAKASFVIEGLKEADKDEFCRCELKLQKWYGDLRGKPFAIEAENSILDISGFSKQYNCAFIWQKDGVKKLNLYLIINYFKGGKLRFKKIKPEAFEANRFYTVINKKSGEIVPMEVNFNFDDPNLIILPLAFGKRQGREFIWNDLLSLETGSLKLANGRVIEKTLYNRRTRQDEPALFVALTFERREVLDSSNIKPMNLIGVDRGENIPAVIALTDPEGCPLSRFKDSLGNPTHILRIGESYKEKQRTIQAKKEVEQRRAGGYSRKYASKAKNLADDMVRNTARDLLYYAVTQDAMLIFENLSRGFGRQGKRTFMAERQYTRMEDWLTAKLAYEGLPSKTYLSKTLAQYTSKTCSNCGFTITSADYDRVLEKLKKTATGWMTTINGKELKVEGQITYYNRYKRQNVVKDLSVELDRLSEESVNNDISSWTKGRSGEALSLLKKRFSHRPVQEKFVCLNCGFETHADEQAALNIARSWLFLRSQEYKKYQTNKTTGNTDKRAFVETWQSFYRKKLKEVWKPAV

SEQ ID NO: 33160 - protein, 978 aa, synthetic construct
  REGION 1..978: note = engineered CasX variant
QEIKRINGIRRRLVKDSNTKKAGKTGPMKTLLVPVMTPDLRERLENLRKKPENIPQPISNTSRANLNKLLTDYTEMKKAILHVYWEEFQKDPVGLMSRVAQPASKKIDQNKLKPEMDEKGNLTTAGFACSQCGQPLFVYKLEQVSEKGKAYTNYFGRCNVAEHEKLILLAQLKPEKDSDEAVTYSLGKFGQRALDFYSIHVTKESTHPVKPLAQIAGNRYASVPVGKALSDACMGTIASFLSKYQDIIIEHQKVVKGNQKRLESLRELAGKENLEYPSVTLPPQPHTKEGVDAYNEVIARVRMWVNLNLWQKLKLSRDDAKPLLRLKGFPSFPLVERQANEVDWWDMVCNVKKLINEKKEDGKVFWQNLAGYKRQEALRPYLSSEEDRKKGKKFARYQLGDLLLHLEKKHGEDWGKVYDEAWERIDKKVEGLSKHIKLEEERRSEDAQSKAALTDWLRAKASFVIEGLKEADKDEFCRCELKLQKWYGDLRGKPFAIEAENSILDISGFSKQYNCAFIWQKDGVKKLNLYLIINYFKGGKLRFKKIKPEAFEANRFYTVINKKSGEIVPMEVNFNFDDPNLIILPLAFGKRQGREFIWNDLLSLETGSLKLANGRVIEKTLYNRRTRQDEPALFVALTFERREVLDSSNIKPMNLIGVDRGENIPAVIALTDPEGCPLSRFKDSLGNPTHILRIGESYKEKQRTIQAKKEVEQRRAGGYSRKYASKAKNLADDMVRNTARDLLYYAVTQDAMLIFENLSRGFGRQGKRTFMAERQYTRMEDWLTAKLAYEGLPSKTYLSKTLAQYTSKTCSNCGFTITSADYDRVLEKLKKTATGWMTTINGKELKVEGQITYYNRYKRQNVVKDLSVELDRLSEESVNNDISSWTKGRSGEALSLLKKRFSHRPVQEKFVCLNCGFETHADEQAALNIARSWLFLRSQEYKKYQTNKTTGNTDKRAFVETWQSFYRKKLKEVWKPAV

SEQ ID NO: 33161 - protein, 978 aa, synthetic construct
  REGION 1..978: note = engineered CasX variant
QEIKRINGIRRRLVKDSNTKKAGKTGPMKTLLVPVMTPDLRERLENLRKKPENIPQPISNTSRANLNKLLTDYTEMKKAILHVYWEEFQKDPVGLMSRVAQPASKKIDQNKLKPEMDEKGNLTTAGFACSQCGQPLFVYKLEQVSEKGKAYTNYFGRCNVAEHEKLIKLAQLKPEKDSDEAVTYSLGKFGQRALDFYSIHVTKESTHPVKPLAQIAGNRYASGPVGKALSDACMGTIASFLSKYQDIIIEHQKVVKGNQKRLESLRELAGKENLEYPSVTLPPQPHTKEGVDAYNEVIARVRMWVNLNLWQKLKLSRDDAKPLLRLKGFPSFPLVERQANEVDWWDMVCNVKKLINEKKEDGKVFWQNLAGYKRQEALRPYLSSEEDRKKGKKFARYQLGDLLLHLEKKHGEDWGKVYDEAWERIDKKVEGLSKHIKLEEERRSEDAQSKAALTDWLRAKASFVIEGLKEADKDEFCRCELKLQKWYGDLRGKPFAIEAENSILDISGFSKQYNCAFIWQKDGVKKLNLYLIINYFKGGKLRFKKIKPEAFEANRFYTVINKKSGEIVPMEVNFNFDDPNLIILPLAFGKRQGREFIWNDLLSLETGSLKLANGRVIEKTLYNRRTRQDEPALFVALTFERREVLDSSNIKPMNLIGVDRGENIPAVIALTDPEGCPLSRFKDSLGNPTHILRIGESYKEKQRTIQAKKEVEQRRAGGYSRKYASKAKNLADDMVRNTARDLLYYAVTQDAMLIFENLSRGFGRQGKRTFMAERQYTRMEDWLTAKLAYEGLPSKTYLSKTLAQYTSKTCSNCGFTITSADYDRVLEKLKKTATGWMTTINGKELKVEGQITYYNRYKRQNVVKDLSVELDRLSEESVNNDISSWTKGRSGEALSLLKKRFSHRPVQEKFVCLNCGFETHADEQAALNIARSWLFLRSQEYKKYQTNKTTGNTDKRAFVETWQSFYRKKLKEVWKPAV

SEQ ID NO: 33162 - protein, 977 aa, synthetic construct
  REGION 1..977: note = engineered CasX variant
QEIKRINGIRRRLVKDSNTKKAGKTGPMKTLLVPVMTPDLRERLENLRKKPENIPQPISNTSRANLNKLLTDYTEMKKAILHVYWEEFQKDPVGLMSRVAQPASKKIDQNKLKPEMDEKGNLTTAGFACSQCGQPLFVYKLEQVSEKGKAYTNYFGRCNVAEHEKLILLAQLKPEKDSDEAVTYSLGKFGQRALDFYSIHVTKESTHPVKPLAQIAGNRYASPVGKALSDACMGTIASFLSKYQDIIIEHQKVVKGNQKRLESLRELAGKENLEYPSVTLPPQPHTKEGVDAYNEVIARVRMWVNLNLWQKLKLSRDDAKPLLRLKGFPSFPLVERQANEVDWWDMVCNVKKLINEKKEDGKVFWQNLAGYKRQEALRPYLSSEEDRKKGKKFARYQLGDLLLHLEKKHGEDWGKVYDEAWERIDKKVEGLSKHIKLEEERRSEDAQSKAALTDWLRAKASFVIEGLKEADKDEFCRCELKLQKWYGDLRGKPFAIEAENSILDISGFSKQYNCAFIWQKDGVKKLNLYLIINYFKGGKLRFKKIKPEAFEANRFYTVINKKSGEIVPMEVNFNFDDPNLIILPLAFGKRQGREFIWNDLLSLETGSLKLANGRVIEKTLYNRRTRQDEPALFVALTFERREVLDSSNIKPMNLIGVDRGENIPAVIALTDPEGCPLSRFKDSLGNPTHILRIGESYKEKQRTIQAKKEVEQRRAGGYSRKYASKAKNLADDMVRNTARDLLYYAVTQDAMLIFENLSRGFGRQGKRTFMAERQYTRMEDWLTAKLAYEGLPSKTYLSKTLAQYTSKTCSNCGFTITSADYDRVLEKLKKTATGWMTTINGKELKVEGQITYYNRYKRQNVVKDLSVELDRLSEESVNNDISSWTKGRSGEALSLLKKRFSHRPVQEKFVCLNCGFETHADEQAALNIARSWLFLRSQEYKKYQTNKTTGNTDKRAFVETWQSFYRKKLKEVWKPAV

SEQ ID NO: 33163 - protein, 978 aa, synthetic construct
  REGION 1..978: note = engineered CasX variant
QEIKRINGIRRRLVKDSNTKKAGKTGPMKTLLVRVMTPDLRERLENLRKKPPNIPQPISNTSRANLNKLLTDYTEMKKAILHVYWEEFQKDPVGLMSRVAQPASKKIDQNKLKPEMDEKGNLTTAGFACSQCGQPLFVYKLEQVSEKGKAYTNYFGRCNVAEHEKLILLAQLKPEKDSDEAVTYSLGKFGQRALDFYSIHVTKESTHPVKPLAQIAGNRYASYPVGKALSDACMGTIASFLSKYQDIIIEHQKVVKGNQKRLESLRELAGKENLEYPSVTLPPQPHTKEGVDAYNEVIARVRMWVNLNLWQKLKLSRDDAKPLLRLKGFPSFPLVERQANEVDWWDMVCNVKKLINEKKEDGKVFWQNLAGYKRQEALRPYLSSEEDRKKGKKFARYQLGDLLLHLEKKHGEDWGKVYDEAWERIDKKVEGLSKHIKLEEERRSEDAQSKAALTDWLRAKASFVIEGLKEADKDEFCRCELKLQKWYGDLRGKPFAIEAENSILDISGFSKQYNCAFIWQKDGVKKLNLYLIINYFKGGKLRFKKIKPEAFEANRFYTVINKKSGEIVPMEVNFNFDDPNLIILPLAFGKRQGREFIWNDLLSLETGSLKLANGRVIEKTLYNRRTRQDEPALFVALTFERREVLDSSNIKPMNLIGVDRGENIPAVIALTDPEGCPLSRFKDSLGNPTHILRIGESYKEKQRTIQAKKEVEQRRAGGYSRKYASKAKNLADDMVRNTARDLLYYAVTQDAMLIFENLSRGFGRQGKRTFMAERQYTRMEDWLTAKLAYEGLPSKTYLSKTLAQYTSKTCSNCGFTITSADYDRVLEKLKKTATGWMTTINGKELKVEGQITYYNRYKRQNVVKDLSVELDRLSEESVNNDISSWTKGRSGEALSLLKKRFSHRPVQEKFVCLNCGFETHADEQAALNIARSWLFLRSQEYKKYQTNKTTGNTDKRAFVETWQSFYRKKLKEVWKPAV

SEQ ID NO: 33164 - protein, 978 aa, synthetic construct
  REGION 1..978: note = engineered CasX variant
QEIKRINGIRRRLVKDSNTKKAGKTGPMKTLLVRVMTPDLRERLENLRKKPPNIPQPISNTSRANLNKLLTDYTEMKKAILHVYWEEFQKDPVGLMSRVAQPASKKIDQNKLKPEMDEKGNLTTAGFACSQCGQPLFVYKLEQVSEKGKAYTNYFGRCNVAEHEKLILLAQLKPEKDSDEAVTYSLGKFGQRALDFYSIHVTKESTHPVKPLAQIAGNRYASHPVGKALSDACMGTIASFLSKYQDIIIEHQKVVKGNQKRLESLRELAGKENLEYPSVTLPPQPHTKEGVDAYNEVIARVRMWVNLNLWQKLKLSRDDAKPLLRLKGFPSFPLVERQANEVDWWDMVCNVKKLINEKKEDGKVFWQNLAGYKRQEALRPYLSSEEDRKKGKKFARYQLGDLLLHLEKKHGEDWGKVYDEAWERIDKKVEGLSKHIKLEEERRSEDAQSKAALTDWLRAKASFVIEGLKEADKDEFCRCELKLQKWYGDLRGKPFAIEAENSILDISGFSKQYNCAFIWQKDGVKKLNLYLIINYFKGGKLRFKKIKPEAFEANRFYTVINKKSGEIVPMEVNFNFDDPNLIILPLAFGKRQGREFIWNDLLSLETGSLKLANGRVIEKTLYNRRTRQDEPALFVALTFERREVLDSSNIKPMNLIGVDRGENIPAVIALTDPEGCPLSRFKDSLGNPTHILRIGESYKEKQRTIQAKKEVEQRRAGGYSRKYASKAKNLADDMVRNTARDLLYYAVTQDAMLIFENLSRGFGRQGKRTFMAERQYTRMEDWLTAKLAYEGLPSKTYLSKTLAQYTSKTCSNCGFTITSADYDRVLEKLKKTATGWMTTINGKELKVEGQITYYNRYKRQNVVKDLSVELDRLSEESVNNDISSWTKGRSGEALSLLKKRFSHRPVQEKFVCLNCGFETHADEQAALNIARSWLFLRSQEYKKYQTNKTTGNTDKRAFVETWQSFYRKKLKEVWKPAV

SEQ ID NO: 33165 - protein, 978 aa, synthetic construct
  REGION 1..978: note = engineered CasX variant
QEIKRINGIRRRLVKDSNTKKAGKTGPMKTLLVRVMTPDLRERLENLRKKPPNIPQPISNTSRANLNKLLTDYTEMKKAILHVYWEEFQKDPVGLMSRVAQPASKKIDQNKLKPEMDEKGNLTTAGFACSQCGQPLFVYKLEQVSEKGKAYTNYFGRCNVAEHEKLILLAQLKPEKDSDEAVTYSLGKFGQRALDFYSIHVTKESTHPVKPLAQIAGNRYASSPVGKALSDACMGTIASFLSKYQDIIIEHQKVVKGNQKRLESLRELAGKENLEYPSVTLPPQPHTKEGVDAYNEVIARVRMWVNLNLWQKLKLSRDDAKPLLRLKGFPSFPLVERQANEVDWWDMVCNVKKLINEKKEDGKVFWQNLAGYKRQEALRPYLSSEEDRKKGKKFARYQLGDLLLHLEKKHGEDWGKVYDEAWERIDKKVEGLSKHIKLEEERRSEDAQSKAALTDWLRAKASFVIEGLKEADKDEFCRCELKLQKWYGDLRGKPFAIEAENSILDISGFSKQYNCAFIWQKDGVKKLNLYLIINYFKGGKLRFKKIKPEAFEANRFYTVINKKSGEIVPMEVNFNFDDPNLIILPLAFGKRQGREFIWNDLLSLETGSLKLANGRVIEKTLYNRRTRQDEPALFVALTFERREVLDSSNIKPMNLIGVDRGENIPAVIALTDPEGCPLSRFKDSLGNPTHILRIGESYKEKQRTIQAKKEVEQRRAGGYSRKYASKAKNLADDMVRNTARDLLYYAVTQDAMLIFENLSRGFGRQGKRTFMAERQYTRMEDWLTAKLAYEGLPSKTYLSKTLAQYTSKTCSNCGFTITSADYDRVLEKLKKTATGWMTTINGKELKVEGQITYYNRYKRQNVVKDLSVELDRLSEESVNNDISSWTKGRSGEALSLLKKRFSHRPVQEKFVCLNCGFETHADEQAALNIARSWLFLRSQEYKKYQTNKTTGNTDKRAFVETWQSFYRKKLKEVWKPAV

SEQ ID NO: 33166 - protein, 978 aa, synthetic construct
  REGION 1..978: note = engineered CasX variant
QEIKRINGIRRRLVKDSNTKKAGKTGPMKTLLVRVMTPDLRERLENLRKKPPNIPQPISNTSRANLNKLLTDYTEMKKAILHVYWEEFQKDPVGLMSRVAQPASKKIDQNKLKPEMDEKGNLTTAGFACSQCGQPLFVYKLEQVSEKGKAYTNYFGRCNVAEHEKLILLAQLKPEKDSDEAVTYSLGKFGQRALDFYSIHVTKESTHPVKPLAQIAGNRYASTPVGKALSDACMGTIASFLSKYQDIIIEHQKVVKGNQKRLESLRELAGKENLEYPSVTLPPQPHTKEGVDAYNEVIARVRMWVNLNLWQKLKLSRDDAKPLLRLKGFPSFPLVERQANEVDWWDMVCNVKKLINEKKEDGKVFWQNLAGYKRQEALRPYLSSEEDRKKGKKFARYQLGDLLLHLEKKHGEDWGKVYDEAWERIDKKVEGLSKHIKLEEERRSEDAQSKAALTDWLRAKASFVIEGLKEADKDEFCRCELKLQKWYGDLRGKPFAIEAENSILDISGFSKQYNCAFIWQKDGVKKLNLYLIINYFKGGKLRFKKIKPEAFEANRFYTVINKKSGEIVPMEVNFNFDDPNLIILPLAFGKRQGREFIWNDLLSLETGSLKLANGRVIEKTLYNRRTRQDEPALFVALTFERREVLDSSNIKPMNLIGVDRGENIPAVIALTDPEGCPLSRFKDSLGNPTHILRIGESYKEKQRTIQAKKEVEQRRAGGYSRKYASKAKNLADDMVRNTARDLLYYAVTQDAMLIFENLSRGFGRQGKRTFMAERQYTRMEDWLTAKLAYEGLPSKTYLSKTLAQYTSKTCSNCGFTITSADYDRVLEKLKKTATGWMTTINGKELKVEGQITYYNRYKRQNVVKDLSVELDRLSEESVNNDISSWTKGRSGEALSLLKKRFSHRPVQEKFVCLNCGFETHADEQAALNIARSWLFLRSQEYKKYQTNKTTGNTDKRAFVETWQSFYRKKLKEVWKPAV

SEQ ID NO: 33167 - protein, 978 aa, synthetic construct
  REGION 1..978: note = engineered CasX variant
QEIKRINGIRRRLVKDSNTKKAGKTGPMKTLLVRVMTPDLRERLENLRKKPPNIPQPISNTSRANLNKLLTDYTEMKKAILHVYWEEFQKDPVGLMSRVAQPASKKIDQNKLKPEMDEKGNLTTAGFACSQCGQPLFVYKLEQVSEKGKAYTNYFGRCNVAEHEKLILLAQLKPEKDSDEAVTYSLGKFGQRALDFYSIHVTKESTHPVKPLAQIAGNRYASAPVGKALSDACMGTIASFLSKYQDIIIEHQKVVKGNQKRLESLRELAGKENLEYPSVTLPPQPHTKEGVDAYNEVIARVRMWVNLNLWQKLKLSRDDAKPLLRLKGFPSFPLVERQANEVDWWDMVCNVKKLINEKKEDGKVFWQNLAGYKRQEALRPYLSSEEDRKKGKKFARYQLGDLLLHLEKKHGEDWGKVYDEAWERIDKKVEGLSKHIKLEEERRSEDAQSKAALTDWLRAKASFVIEGLKEADKDEFCRCELKLQKWYGDLRGKPFAIEAENSILDISGFSKQYNCAFIWQKDGVKKLNLYLIINYFKGGKLRFKKIKPEAFEANRFYTVINKKSGEIVPMEVNFNFDDPNLIILPLAFGKRQGREFIWNDLLSLETGSLKLANGRVIEKTLYNRRTRQDEPALFVALTFERREVLDSSNIKPMNLIGVDRGENIPAVIALTDPEGCPLSRFKDSLGNPTHILRIGESYKEKQRTIQAKKEVEQRRAGGYSRKYASKAKNLADDMVRNTARDLLYYAVTQDAMLIFENLSRGFGRQGKRTFMAERQYTRMEDWLTAKLAYEGLPSKTYLSKTLAQYTSKTCSNCGFTITSADYDRVLEKLKKTATGWMTTINGKELKVEGQITYYNRYKRQNVVKDLSVELDRLSEESVNNDISSWTKGRSGEALSLLKKRFSHRPVQEKFVCLNCGFETHADEQAALNIARSWLFLRSQEYKKYQTNKTTGNTDKRAFVETWQSFYRKKLKEVWKPAV

SEQ ID NO: 33168 - protein, 978 aa, synthetic construct
  REGION 1..978: note = engineered CasX variant
QEIKRINGIRRRLVKDSNTKKAGKTGPMKTLLVRVMTPDLRERLENLRKKPPNIPQPISNTSRANLNKLLTDYTEMKKAILHVYWEEFQKDPVGLMSRVAQPASKKIDQNKLKPEMDEKGNLTTAGFACSQCGQPLFVYKLEQVSEKGKAYTNYFGRCNVAEHEKLILLAQLKPEKDSDEAVTYSLGKFGQRALDFYSIHVTKESTHPVKPLAQIAGNRYASVPVGKALSDACMGTIASFLSKYQDIIIEHQKVVKGNQKRLESLRELAGKENLEYPSVTLPPQPHTKEGVDAYNEVIARVRMWVNLNLWQKLKLSRDDAKPLLRLKGFPSFPLVERQANEVDWWDMVCNVKKLINEKKEDGKVFWQNLAGYKRQEALRPYLSSEEDRKKGKKFARYQLGDLLLHLEKKHGEDWGKVYDEAWERIDKKVEGLSKHIKLEEERRSEDAQSKAALTDWLRAKASFVIEGLKEADKDEFCRCELKLQKWYGDLRGKPFAIEAENSILDISGFSKQYNCAFIWQKDGVKKLNLYLIINYFKGGKLRFKKIKPEAFEANRFYTVINKKSGEIVPMEVNFNFDDPNLIILPLAFGKRQGREFIWNDLLSLETGSLKLANGRVIEKTLYNRRTRQDEPALFVALTFERREVLDSSNIKPMNLIGVDRGENIPAVIALTDPEGCPLSRFKDSLGNPTHILRIGESYKEKQRTIQAKKEVEQRRAGGYSRKYASKAKNLADDMVRNTARDLLYYAVTQDAMLIFENLSRGFGRQGKRTFMAERQYTRMEDWLTAKLAYEGLPSKTYLSKTLAQYTSKTCSNCGFTITSADYDRVLEKLKKTATGWMTTINGKELKVEGQITYYNRYKRQNVVKDLSVELDRLSEESVNNDISSWTKGRSGEALSLLKKRFSHRPVQEKFVCLNCGFETHADEQAALNIARSWLFLRSQEYKKYQTNKTTGNTDKRAFVETWQSFYRKKLKEVWKPAV

SEQ ID NO: 33169 - protein, 978 aa, synthetic construct
  REGION 1..978: note = engineered CasX variant
QEIKRINGIRRRLVKDSNTKKAGKTGPMKTLLVRVMTPDLRERLENLRKKPPNIPQPISNTSRANLNKLLTDYTEMKKAILHVYWEEFQKDPVGLMSRVAQPASKKIDQNKLKPEMDEKGNLTTAGFACSQCGQPLFVYKLEQVSEKGKAYTNYFGRCNVAEHEKLIKLAQLKPEKDSDEAVTYSLGKFGQRALDFYSIHVTKESTHPVKPLAQIAGNRYASGPVGKALSDACMGTIASFLSKYQDIIIEHQKVVKGNQKRLESLRELAGKENLEYPSVTLPPQPHTKEGVDAYNEVIARVRMWVNLNLWQKLKLSRDDAKPLLRLKGFPSFPLVERQANEVDWWDMVCNVKKLINEKKEDGKVFWQNLAGYKRQEALRPYLSSEEDRKKGKKFARYQLGDLLLHLEKKHGEDWGKVYDEAWERIDKKVEGLSKHIKLEEERRSEDAQSKAALTDWLRAKASFVIEGLKEADKDEFCRCELKLQKWYGDLRGKPFAIEAENSILDISGFSKQYNCAFIWQKDGVKKLNLYLIINYFKGGKLRFKKIKPEAFEANRFYTVINKKSGEIVPMEVNFNFDDPNLIILPLAFGKRQGREFIWNDLLSLETGSLKLANGRVIEKTLYNRRTRQDEPALFVALTFERREVLDSSNIKPMNLIGVDRGENIPAVIALTDPEGCPLSRFKDSLGNPTHILRIGESYKEKQRTIQAKKEVEQRRAGGYSRKYASKAKNLADDMVRNTARDLLYYAVTQDAMLIFENLSRGFGRQGKRTFMAERQYTRMEDWLTAKLAYEGLPSKTYLSKTLAQYTSKTCSNCGFTITSADYDRVLEKLKKTATGWMTTINGKELKVEGQITYYNRYKRQNVVKDLSVELDRLSEESVNNDISSWTKGRSGEALSLLKKRFSHRPVQEKFVCLNCGFETHADEQAALNIARSWLFLRSQEYKKYQTNKTTGNTDKRAFVETWQSFYRKKLKEVWKPAV

SEQ ID NO: 33170 - protein, 977 aa, synthetic construct
  REGION 1..977: note = engineered CasX variant
QEIKRINGIRRRLVKDSNTKKAGKTGPMKTLLVRVMTPDLRERLENLRKKPPNIPQPISNTSRANLNKLLTDYTEMKKAILHVYWEEFQKDPVGLMSRVAQPASKKIDQNKLKPEMDEKGNLTTAGFACSQCGQPLFVYKLEQVSEKGKAYTNYFGRCNVAEHEKLILLAQLKPEKDSDEAVTYSLGKFGQRALDFYSIHVTKESTHPVKPLAQIAGNRYASPVGKALSDACMGTIASFLSKYQDIIIEHQKVVKGNQKRLESLRELAGKENLEYPSVTLPPQPHTKEGVDAYNEVIARVRMWVNLNLWQKLKLSRDDAKPLLRLKGFPSFPLVERQANEVDWWDMVCNVKKLINEKKEDGKVFWQNLAGYKRQEALRPYLSSEEDRKKGKKFARYQLGDLLLHLEKKHGEDWGKVYDEAWERIDKKVEGLSKHIKLEEERRSEDAQSKAALTDWLRAKASFVIEGLKEADKDEFCRCELKLQKWYGDLRGKPFAIEAENSILDISGFSKQYNCAFIWQKDGVKKLNLYLIINYFKGGKLRFKKIKPEAFEANRFYTVINKKSGEIVPMEVNFNFDDPNLIILPLAFGKRQGREFIWNDLLSLETGSLKLANGRVIEKTLYNRRTRQDEPALFVALTFERREVLDSSNIKPMNLIGVDRGENIPAVIALTDPEGCPLSRFKDSLGNPTHILRIGESYKEKQRTIQAKKEVEQRRAGGYSRKYASKAKNLADDMVRNTARDLLYYAVTQDAMLIFENLSRGFGRQGKRTFMAERQYTRMEDWLTAKLAYEGLPSKTYLSKTLAQYTSKTCSNCGFTITSADYDRVLEKLKKTATGWMTTINGKELKVEGQITYYNRYKRQNVVKDLSVELDRLSEESVNNDISSWTKGRSGEALSLLKKRFSHRPVQEKFVCLNCGFETHADEQAALNIARSWLFLRSQEYKKYQTNKTTGNTDKRAFVETWQSFYRKKLKEVWKPAV

SEQ ID NO: 33171 - protein, 978 aa, synthetic construct
  REGION 1..978: note = engineered CasX variant
QEIKRINGIRRRLVKDSNTKKAGKTGPMKTLLVRVMTPDLRERLENLRKKPENIPQPISNTSQANLNKLLTDYTEMKKAILHVYWEEFQKDPVGLMSRVAQPASKKIDQNKLKPEMDEKGNLTTAGFACSQCGQPLFVYKLEQVSEKGKAYTNYFGRCNVAEHEKLILLAQLKPEKDSDEAVTYSLGKFGQRALDFYSIHVTKESTHPVKPLAQIAGNRYASYPVGKALSDACMGTIASFLSKYQDIIIEHQKVVKGNQKRLESLRELAGKENLEYPSVTLPPQPHTKEGVDAYNEVIARVRMWVNLNLWQKLKLSRDDAKPLLRLKGFPSFPLVERQANEVDWWDMVCNVKKLINEKKEDGKVFWQNLAGYKRQEALRPYLSSEEDRKKGKKFARYQLGDLLLHLEKKHGEDWGKVYDEAWERIDKKVEGLSKHIKLEEERRSEDAQSKAALTDWLRAKASFVIEGLKEADKDEFCRCELKLQKWYGDLRGKPFAIEAENSILDISGFSKQYNCAFIWQKDGVKKLNLYLIINYFKGGKLRFKKIKPEAFEANRFYTVINKKSGEIVPMEVNFNFDDPNLIILPLAFGKRQGREFIWNDLLSLETGSLKLANGRVIEKTLYNRRTRQDEPALFVALTFERREVLDSSNIKPMNLIGVDRGENIPAVIALTDPEGCPLSRFKDSLGNPTHILRIGESYKEKQRTIQAKKEVEQRRAGGYSRKYASKAKNLADDMVRNTARDLLYYAVTQDAMLIFENLSRGFGRQGKRTFMAERQYTRMEDWLTAKLAYEGLPSKTYLSKTLAQYTSKTCSNCGFTITSADYDRVLEKLKKTATGWMTTINGKELKVEGQITYYNRYKRQNVVKDLSVELDRLSEESVNNDISSWTKGRSGEALSLLKKRFSHRPVQEKFVCLNCGFETHADEQAALNIARSWLFLRSQEYKKYQTNKTTGNTDKRAFVETWQSFYRKKLKEVWKPAV

SEQ ID NO: 33172 - protein, 978 aa, synthetic construct
  REGION 1..978: note = engineered CasX variant
QEIKRINGIRRRLVKDSNTKKAGKTGPMKTLLVRVMTPDLRERLENLRKKPENIPQPISNTSQANLNKLLTDYTEMKKAILHVYWEEFQKDPVGLMSRVAQPASKKIDQNKLKPEMDEKGNLTTAGFACSQCGQPLFVYKLEQVSEKGKAYTNYFGRCNVAEHEKLILLAQLKPEKDSDEAVTYSLGKFGQRALDFYSIHVTKESTHPVKPLAQIAGNRYASHPVGKALSDACMGTIASFLSKYQDIIIEHQKVVKGNQKRLESLRELAGKENLEYPSVTLPPQPHTKEGVDAYNEVIARVRMWVNLNLWQKLKLSRDDAKPLLRLKGFPSFPLVERQANEVDWWDMVCNVKKLINEKKEDGKVFWQNLAGYKRQEALRPYLSSEEDRKKGKKFARYQLGDLLLHLEKKHGEDWGKVYDEAWERIDKKVEGLSKHIKLEEERRSEDAQSKAALTDWLRAKASFVIEGLKEADKDEFCRCELKLQKWYGDLRGKPFAIEAENSILDISGFSKQYNCAFIWQKDGVKKLNLYLIINYFKGGKLRFKKIKPEAFEANRFYTVINKKSGEIVPMEVNFNFDDPNLIILPLAFGKRQGREFIWNDLLSLETGSLKLANGRVIEKTLYNRRTRQDEPALFVALTFERREVLDSSNIKPMNLIGVDRGENIPAVIALTDPEGCPLSRFKDSLGNPTHILRIGESYKEKQRTIQAKKEVEQRRAGGYSRKYASKAKNLADDMVRNTARDLLYYAVTQDAMLIFENLSRGFGRQGKRTFMAERQYTRMEDWLTAKLAYEGLPSKTYLSKTLAQYTSKTCSNCGFTITSADYDRVLEKLKKTATGWMTTINGKELKVEGQITYYNRYKRQNVVKDLSVELDRLSEESVNNDISSWTKGRSGEALSLLKKRFSHRPVQEKFVCLNCGFETHADEQAALNIARSWLFLRSQEYKKYQTNKTTGNTDKRAFVETWQSFYRKKLKEVWKPAV

SEQ ID NO: 33173 - protein, 978 aa, synthetic construct
  REGION 1..978: note = engineered CasX variant
QEIKRINGIRRRLVKDSNTKKAGKTGPMKTLLVRVMTPDLRERLENLRKKPENIPQPISNTSQANLNKLLTDYTEMKKAILHVYWEEFQKDPVGLMSRVAQPASKKIDQNKLKPEMDEKGNLTTAGFACSQCGQPLFVYKLEQVSEKGKAYTNYFGRCNVAEHEKLILLAQLKPEKDSDEAVTYSLGKFGQRALDFYSIHVTKESTHPVKPLAQIAGNRYASSPVGKALSDACMGTIASFLSKYQDIIIEHQKVVKGNQKRLESLRELAGKENLEYPSVTLPPQPHTKEGVDAYNEVIARVRMWVNLNLWQKLKLSRDDAKPLLRLKGFPSFPLVERQANEVDWWDMVCNVKKLINEKKEDGKVFWQNLAGYKRQEALRPYLSSEEDRKKGKKFARYQLGDLLLHLEKKHGEDWGKVYDEAWERIDKKVEGLSKHIKLEEERRSEDAQSKAALTDWLRAKASFVIEGLKEADKDEFCRCELKLQKWYGDLRGKPFAIEAENSILDISGFSKQYNCAFIWQKDGVKKLNLYLIINYFKGGKLRFKKIKPEAFEANRFYTVINKKSGEIVPMEVNFNFDDPNLIILPLAFGKRQGREFIWNDLLSLETGSLKLANGRVIEKTLYNRRTRQDEPALFVALTFERREVLDSSNIKPMNLIGVDRGENIPAVIALTDPEGCPLSRFKDSLGNPTHILRIGESYKEKQRTIQAKKEVEQRRAGGYSRKYASKAKNLADDMVRNTARDLLYYAVTQDAMLIFENLSRGFGRQGKRTFMAERQYTRMEDWLTAKLAYEGLPSKTYLSKTLAQYTSKTCSNCGFTITSADYDRVLEKLKKTATGWMTTINGKELKVEGQITYYNRYKRQNVVKDLSVELDRLSEESVNNDISSWTKGRSGEALSLLKKRFSHRPVQEKFVCLNCGFETHADEQAALNIARSWLFLRSQEYKKYQTNKTTGNTDKRAFVETWQSFYRKKLKEVWKPAV

SEQ ID NO: 33174 - protein, 978 aa, synthetic construct
  REGION 1..978: note = engineered CasX variant
QEIKRINGIRRRLVKDSNTKKAGKTGPMKTLLVRVMTPDLRERLENLRKKPENIPQPISNTSQANLNKLLTDYTEMKKAILHVYWEEFQKDPVGLMSRVAQPASKKIDQNKLKPEMDEKGNLTTAGFACSQCGQPLFVYKLEQVSEKGKAYTNYFGRCNVAEHEKLILLAQLKPEKDSDEAVTYSLGKFGQRALDFYSIHVTKESTHPVKPLAQIAGNRYASTPVGKALSDACMGTIASFLSKYQDIIIEHQKVVKGNQKRLESLRELAGKENLEYPSVTLPPQPHTKEGVDAYNEVIARVRMWVNLNLWQKLKLSRDDAKPLLRLKGFPSFPLVERQANEVDWWDMVCNVKKLINEKKEDGKVFWQNLAGYKRQEALRPYLSSEEDRKKGKKFARYQLGDLLLHLEKKHGEDWGKVYDEAWERIDKKVEGLSKHIKLEEERRSEDAQSKAALTDWLRAKASFVIEGLKEADKDEFCRCELKLQKWYGDLRGKPFAIEAENSILDISGFSKQYNCAFIWQKDGVKKLNLYLIINYFKGGKLRFKKIKPEAFEANRFYTVINKKSGEIVPMEVNFNFDDPNLIILPLAFGKRQGREFIWNDLLSLETGSLKLANGRVIEKTLYNRRTRQDEPALFVALTFERREVLDSSNIKPMNLIGVDRGENIPAVIALTDPEGCPLSRFKDSLGNPTHILRIGESYKEKQRTIQAKKEVEQRRAGGYSRKYASKAKNLADDMVRNTARDLLYYAVTQDAMLIFENLSRGFGRQGKRTFMAERQYTRMEDWLTAKLAYEGLPSKTYLSKTLAQYTSKTCSNCGFTITSADYDRVLEKLKKTATGWMTTINGKELKVEGQITYYNRYKRQNVVKDLSVELDRLSEESVNNDISSWTKGRSGEALSLLKKRFSHRPVQEKFVCLNCGFETHADEQAALNIARSWLFLRSQEYKKYQTNKTTGNTDKRAFVETWQSFYRKKLKEVWKPAV

SEQ ID NO: 33175 - protein, 978 aa, synthetic construct
  REGION 1..978: note = engineered CasX variant
QEIKRINGIRRRLVKDSNTKKAGKTGPMKTLLVRVMTPDLRERLENLRKKPENIPQPISNTSQANLNKLLTDYTEMKKAILHVYWEEFQKDPVGLMSRVAQPASKKIDQNKLKPEMDEKGNLTTAGFACSQCGQPLFVYKLEQVSEKGKAYTNYFGRCNVAEHEKLILLAQLKPEKDSDEAVTYSLGKFGQRALDFYSIHVTKESTHPVKPLAQIAGNRYASAPVGKALSDACMGTIASFLSKYQDIIIEHQKVVKGNQKRLESLRELAGKENLEYPSVTLPPQPHTKEGVDAYNEVIARVRMWVNLNLWQKLKLSRDDAKPLLRLKGFPSFPLVERQANEVDWWDMVCNVKKLINEKKEDGKVFWQNLAGYKRQEALRPYLSSEEDRKKGKKFARYQLGDLLLHLEKKHGEDWGKVYDEAWERIDKKVEGLSKHIKLEEERRSEDAQSKAALTDWLRAKASFVIEGLKEADKDEFCRCELKLQKWYGDLRGKPFAIEAENSILDISGFSKQYNCAFIWQKDGVKKLNLYLIINYFKGGKLRFKKIKPEAFEANRFYTVINKKSGEIVPMEVNFNFDDPNLIILPLAFGKRQGREFIWNDLLSLETGSLKLANGRVIEKTLYNRRTRQDEPALFVALTFERREVLDSSNIKPMNLIGVDRGENIPAVIALTDPEGCPLSRFKDSLGNPTHILRIGESYKEKQRTIQAKKEVEQRRAGGYSRKYASKAKNLADDMVRNTARDLLYYAVTQDAMLIFENLSRGFGRQGKRTFMAERQYTRMEDWLTAKLAYEGLPSKTYLSKTLAQYTSKTCSNCGFTITSADYDRVLEKLKKTATGWMTTINGKELKVEGQITYYNRYKRQNVVKDLSVELDRLSEESVNNDISSWTKGRSGEALSLLKKRFSHRPVQEKFVCLNCGFETHADEQAALNIARSWLFLRSQEYKKYQTNKTTGNTDKRAFVETWQSFYRKKLKEVWKPAV

SEQ ID NO: 33176 - protein, 978 aa, synthetic construct
  REGION 1..978: note = engineered CasX variant
QEIKRINGIRRRLVKDSNTKKAGKTGPMKTLLVRVMTPDLRERLENLRKKPENIPQPISNTSQANLNKLLTDYTEMKKAILHVYWEEFQKDPVGLMSRVAQPASKKIDQNKLKPEMDEKGNLTTAGFACSQCGQPLFVYKLEQVSEKGKAYTNYFGRCNVAEHEKLILLAQLKPEKDSDEAVTYSLGKFGQRALDFYSIHVTKESTHPVKPLAQIAGNRYASVPVGKALSDACMGTIASFLSKYQDIIIEHQKVVKGNQKRLESLRELAGKENLEYPSVTLPPQPHTKEGVDAYNEVIARVRMWVNLNLWQKLKLSRDDAKPLLRLKGFPSFPLVERQANEVDWWDMVCNVKKLINEKKEDGKVFWQNLAGYKRQEALRPYLSSEEDRKKGKKFARYQLGDLLLHLEKKHGEDWGKVYDEAWERIDKKVEGLSKHIKLEEERRSEDAQSKAALTDWLRAKASFVIEGLKEADKDEFCRCELKLQKWYGDLRGKPFAIEAENSILDISGFSKQYNCAFIWQKDGVKKLNLYLIINYFKGGKLRFKKIKPEAFEANRFYTVINKKSGEIVPMEVNFNFDDPNLIILPLAFGKRQGREFIWNDLLSLETGSLKLANGRVIEKTLYNRRTRQDEPALFVALTFERREVLDSSNIKPMNLIGVDRGENIPAVIALTDPEGCPLSRFKDSLGNPTHILRIGESYKEKQRTIQAKKEVEQRRAGGYSRKYASKAKNLADDMVRNTARDLLYYAVTQDAMLIFENLSRGFGRQGKRTFMAERQYTRMEDWLTAKLAYEGLPSKTYLSKTLAQYTSKTCSNCGFTITSADYDRVLEKLKKTATGWMTTINGKELKVEGQITYYNRYKRQNVVKDLSVELDRLSEESVNNDISSWTKGRSGEALSLLKKRFSHRPVQEKFVCLNCGFETHADEQAALNIARSWLFLRSQEYKKYQTNKTTGNTDKRAFVETWQSFYRKKLKEVWKPAV

SEQ ID NO: 33177 - protein, 978 aa, synthetic construct
  REGION 1..978: note = engineered CasX variant
QEIKRINGIRRRLVKDSNTKKAGKTGPMKTLLVRVMTPDLRERLENLRKKPENIPQPISNTSQANLNKLLTDYTEMKKAILHVYWEEFQKDPVGLMSRVAQPASKKIDQNKLKPEMDEKGNLTTAGFACSQCGQPLFVYKLEQVSEKGKAYTNYFGRCNVAEHEKLIKLAQLKPEKDSDEAVTYSLGKFGQRALDFYSIHVTKESTHPVKPLAQIAGNRYASGPVGKALSDACMGTIASFLSKYQDIIIEHQKVVKGNQKRLESLRELAGKENLEYPSVTLPPQPHTKEGVDAYNEVIARVRMWVNLNLWQKLKLSRDDAKPLLRLKGFPSFPLVERQANEVDWWDMVCNVKKLINEKKEDGKVFWQNLAGYKRQEALRPYLSSEEDRKKGKKFARYQLGDLLLHLEKKHGEDWGKVYDEAWERIDKKVEGLSKHIKLEEERRSEDAQSKAALTDWLRAKASFVIEGLKEADKDEFCRCELKLQKWYGDLRGKPFAIEAENSILDISGFSKQYNCAFIWQKDGVKKLNLYLIINYFKGGKLRFKKIKPEAFEANRFYTVINKKSGEIVPMEVNFNFDDPNLIILPLAFGKRQGREFIWNDLLSLETGSLKLANGRVIEKTLYNRRTRQDEPALFVALTFERREVLDSSNIKPMNLIGVDRGENIPAVIALTDPEGCPLSRFKDSLGNPTHILRIGESYKEKQRTIQAKKEVEQRRAGGYSRKYASKAKNLADDMVRNTARDLLYYAVTQDAMLIFENLSRGFGRQGKRTFMAERQYTRMEDWLTAKLAYEGLPSKTYLSKTLAQYTSKTCSNCGFTITSADYDRVLEKLKKTATGWMTTINGKELKVEGQITYYNRYKRQNVVKDLSVELDRLSEESVNNDISSWTKGRSGEALSLLKKRFSHRPVQEKFVCLNCGFETHADEQAALNIARSWLFLRSQEYKKYQTNKTTGNTDKRAFVETWQSFYRKKLKEVWKPAV

SEQ ID NO: 33178 - protein, 977 aa, synthetic construct
  REGION 1..977: note = engineered CasX variant
QEIKRINGIRRRLVKDSNTKKAGKTGPMKTLLVRVMTPDLRERLENLRKKPENIPQPISNTSQANLNKLLTDYTEMKKAILHVYWEEFQKDPVGLMSRVAQPASKKIDQNKLKPEMDEKGNLTTAGFACSQCGQPLFVYKLEQVSEKGKAYTNYFGRCNVAEHEKLILLAQLKPEKDSDEAVTYSLGKFGQRALDFYSIHVTKESTHPVKPLAQIAGNRYASPVGKALSDACMGTIASFLSKYQDIIIEHQKVVKGNQKRLESLRELAGKENLEYPSVTLPPQPHTKEGVDAYNEVIARVRMWVNLNLWQKLKLSRDDAKPLLRLKGFPSFPLVERQANEVDWWDMVCNVKKLINEKKEDGKVFWQNLAGYKRQEALRPYLSSEEDRKKGKKFARYQLGDLLLHLEKKHGEDWGKVYDEAWERIDKKVEGLSKHIKLEEERRSEDAQSKAALTDWLRAKASFVIEGLKEADKDEFCRCELKLQKWYGDLRGKPFAIEAENSILDISGFSKQYNCAFIWQKDGVKKLNLYLIINYFKGGKLRFKKIKPEAFEANRFYTVINKKSGEIVPMEVNFNFDDPNLIILPLAFGKRQGREFIWNDLLSLETGSLKLANGRVIEKTLYNRRTRQDEPALFVALTFERREVLDSSNIKPMNLIGVDRGENIPAVIALTDPEGCPLSRFKDSLGNPTHILRIGESYKEKQRTIQAKKEVEQRRAGGYSRKYASKAKNLADDMVRNTARDLLYYAVTQDAMLIFENLSRGFGRQGKRTFMAERQYTRMEDWLTAKLAYEGLPSKTYLSKTLAQYTSKTCSNCGFTITSADYDRVLEKLKKTATGWMTTINGKELKVEGQITYYNRYKRQNVVKDLSVELDRLSEESVNNDISSWTKGRSGEALSLLKKRFSHRPVQEKFVCLNCGFETHADEQAALNIARSWLFLRSQEYKKYQTNKTTGNTDKRAFVETWQSFYRKKLKEVWKPAV

SEQ ID NO: 33179 - protein, 978 aa, synthetic construct
  REGION 1..978: note = engineered CasX variant
QEIKRINGIRRRLVKDSNTKKAGKTGPMKTLLVRVMTPDLRERLENLRKKPENIPQPISNTSRANLNKLLTDYTEMKKAILHVYDEEFQKDPVGLMSRVAQPASKKIDQNKLKPEMDEKGNLTTAGFACSQCGQPLFVYKLEQVSEKGKAYTNYFGRCNVAEHEKLILLAQLKPEKDSDEAVTYSLGKFGQRALDFYSIHVTKESTHPVKPLAQIAGNRYASYPVGKALSDACMGTIASFLSKYQDIIIEHQKVVKGNQKRLESLRELAGKENLEYPSVTLPPQPHTKEGVDAYNEVIARVRMWVNLNLWQKLKLSRDDAKPLLRLKGFPSFPLVERQANEVDWWDMVCNVKKLINEKKEDGKVFWQNLAGYKRQEALRPYLSSEEDRKKGKKFARYQLGDLLLHLEKKHGEDWGKVYDEAWERIDKKVEGLSKHIKLEEERRSEDAQSKAALTDWLRAKASFVIEGLKEADKDEFCRCELKLQKWYGDLRGKPFAIEAENSILDISGFSKQYNCAFIWQKDGVKKLNLYLIINYFKGGKLRFKKIKPEAFEANRFYTVINKKSGEIVPMEVNFNFDDPNLIILPLAFGKRQGREFIWNDLLSLETGSLKLANGRVIEKTLYNRRTRQDEPALFVALTFERREVLDSSNIKPMNLIGVDRGENIPAVIALTDPEGCPLSRFKDSLGNPTHILRIGESYKEKQRTIQAKKEVEQRRAGGYSRKYASKAKNLADDMVRNTARDLLYYAVTQDAMLIFENLSRGFGRQGKRTFMAERQYTRMEDWLTAKLAYEGLPSKTYLSKTLAQYTSKTCSNCGFTITSADYDRVLEKLKKTATGWMTTINGKELKVEGQITYYNRYKRQNVVKDLSVELDRLSEESVNNDISSWTKGRSGEALSLLKKRFSHRPVQEKFVCLNCGFETHADEQAALNIARSWLFLRSQEYKKYQTNKTTGNTDKRAFVETWQSFYRKKLKEVWKPAV

SEQ ID NO: 33180 - protein, 978 aa, synthetic construct
  REGION 1..978: note = engineered CasX variant
QEIKRINGIRRRLVKDSNTKKAGKTGPMKTLLVRVMTPDLRERLENLRKKPENIPQPISNTSRANLNKLLTDYTEMKKAILHVYDEEFQKDPVGLMSRVAQPASKKIDQNKLKPEMDEKGNLTTAGFACSQCGQPLFVYKLEQVSEKGKAYTNYFGRCNVAEHEKLILLAQLKPEKDSDEAVTYSLGKFGQRALDFYSIHVTKESTHPVKPLAQIAGNRYASHPVGKALSDACMGTIASFLSKYQDIIIEHQKVVKGNQKRLESLRELAGKENLEYPSVTLPPQPHTKEGVDAYNEVIARVRMWVNLNLWQKLKLSRDDAKPLLRLKGFPSFPLVERQANEVDWWDMVCNVKKLINEKKEDGKVFWQNLAGYKRQEALRPYLSSEEDRKKGKKFARYQLGDLLLHLEKKHGEDWGKVYDEAWERIDKKVEGLSKHIKLEEERRSEDAQSKAALTDWLRAKASFVIEGLKEADKDEFCRCELKLQKWYGDLRGKPFAIEAENSILDISGFSKQYNCAFIWQKDGVKKLNLYLIINYFKGGKLRFKKIKPEAFEANRFYTVINKKSGEIVPMEVNFNFDDPNLIILPLAFGKRQGREFIWNDLLSLETGSLKLANGRVIEKTLYNRRTRQDEPALFVALTFERREVLDSSNIKPMNLIGVDRGENIPAVIALTDPEGCPLSRFKDSLGNPTHILRIGESYKEKQRTIQAKKEVEQRRAGGYSRKYASKAKNLADDMVRNTARDLLYYAVTQDAMLIFENLSRGFGRQGKRTFMAERQYTRMEDWLTAKLAYEGLPSKTYLSKTLAQYTSKTCSNCGFTITSADYDRVLEKLKKTATGWMTTINGKELKVEGQITYYNRYKRQNVVKDLSVELDRLSEESVNNDISSWTKGRSGEALSLLKKRFSHRPVQEKFVCLNCGFETHADEQAALNIARSWLFLRSQEYKKYQTNKTTGNTDKRAFVETWQSFYRKKLKEVWKPAV

SEQ ID NO: 33181 - protein, 978 aa, synthetic construct
  REGION 1..978: note = engineered CasX variant
QEIKRINGIRRRLVKDSNTKKAGKTGPMKTLLVRVMTPDLRERLENLRKKPENIPQPISNTSRANLNKLLTDYTEMKKAILHVYDEEFQKDPVGLMSRVAQPASKKIDQNKLKPEMDEKGNLTTAGFACSQCGQPLFVYKLEQVSEKGKAYTNYFGRCNVAEHEKLILLAQLKPEKDSDEAVTYSLGKFGQRALDFYSIHVTKESTHPVKPLAQIAGNRYASSPVGKALSDACMGTIASFLSKYQDIIIEHQKVVKGNQKRLESLRELAGKENLEYPSVTLPPQPHTKEGVDAYNEVIARVRMWVNLNLWQKLKLSRDDAKPLLRLKGFPSFPLVERQANEVDWWDMVCNVKKLINEKKEDGKVFWQNLAGYKRQEALRPYLSSEEDRKKGKKFARYQLGDLLLHLEKKHGEDWGKVYDEAWERIDKKVEGLSKHIKLEEERRSEDAQSKAALTDWLRAKASFVIEGLKEADKDEFCRCELKLQKWYGDLRGKPFAIEAENSILDISGFSKQYNCAFIWQKDGVKKLNLYLIINYFKGGKLRFKKIKPEAFEANRFYTVINKKSGEIVPMEVNFNFDDPNLIILPLAFGKRQGREFIWNDLLSLETGSLKLANGRVIEKTLYNRRTRQDEPALFVALTFERREVLDSSNIKPMNLIGVDRGENIPAVIALTDPEGCPLSRFKDSLGNPTHILRIGESYKEKQRTIQAKKEVEQRRAGGYSRKYASKAKNLADDMVRNTARDLLYYAVTQDAMLIFENLSRGFGRQGKRTFMAERQYTRMEDWLTAKLAYEGLPSKTYLSKTLAQYTSKTCSNCGFTITSADYDRVLEKLKKTATGWMTTINGKELKVEGQITYYNRYKRQNVVKDLSVELDRLSEESVNNDISSWTKGRSGEALSLLKKRFSHRPVQEKFVCLNCGFETHADEQAALNIARSWLFLRSQEYKKYQTNKTTGNTDKRAFVETWQSFYRKKLKEVWKPAV

SEQ ID NO: 33182 - protein, 978 aa, synthetic construct
  REGION 1..978: note = engineered CasX variant
QEIKRINGIRRRLVKDSNTKKAGKTGPMKTLLVRVMTPDLRERLENLRKKPENIPQPISNTSRANLNKLLTDYTEMKKAILHVYDEEFQKDPVGLMSRVAQPASKKIDQNKLKPEMDEKGNLTTAGFACSQCGQPLFVYKLEQVSEKGKAYTNYFGRCNVAEHEKLILLAQLKPEKDSDEAVTYSLGKFGQRALDFYSIHVTKESTHPVKPLAQIAGNRYASTPVGKALSDACMGTIASFLSKYQDIIIEHQKVVKGNQKRLESLRELAGKENLEYPSVTLPPQPHTKEGVDAYNEVIARVRMWVNLNLWQKLKLSRDDAKPLLRLKGFPSFPLVERQANEVDWWDMVCNVKKLINEKKEDGKVFWQNLAGYKRQEALRPYLSSEEDRKKGKKFARYQLGDLLLHLEKKHGEDWGKVYDEAWERIDKKVEGLSKHIKLEEERRSEDAQSKAALTDWLRAKASFVIEGLKEADKDEFCRCELKLQKWYGDLRGKPFAIEAENSILDISGFSKQYNCAFIWQKDGVKKLNLYLIINYFKGGKLRFKKIKPEAFEANRFYTVINKKSGEIVPMEVNFNFDDPNLIILPLAFGKRQGREFIWNDLLSLETGSLKLANGRVIEKTLYNRRTRQDEPALFVALTFERREVLDSSNIKPMNLIGVDRGENIPAVIALTDPEGCPLSRFKDSLGNPTHILRIGESYKEKQRTIQAKKEVEQRRAGGYSRKYASKAKNLADDMVRNTARDLLYYAVTQDAMLIFENLSRGFGRQGKRTFMAERQYTRMEDWLTAKLAYEGLPSKTYLSKTLAQYTSKTCSNCGFTITSADYDRVLEKLKKTATGWMTTINGKELKVEGQITYYNRYKRQNVVKDLSVELDRLSEESVNNDISSWTKGRSGEALSLLKKRFSHRPVQEKFVCLNCGFETHADEQAALNIARSWLFLRSQEYKKYQTNKTTGNTDKRAFVETWQSFYRKKLKEVWKPAV

SEQ ID NO: 33183 - protein, 978 aa, synthetic construct
  REGION 1..978: note = engineered CasX variant
QEIKRINGIRRRLVKDSNTKKAGKTGPMKTLLVRVMTPDLRERLENLRKKPENIPQPISNTSRANLNKLLTDYTEMKKAILHVYDEEFQKDPVGLMSRVAQPASKKIDQNKLKPEMDEKGNLTTAGFACSQCGQPLFVYKLEQVSEKGKAYTNYFGRCNVAEHEKLILLAQLKPEKDSDEAVTYSLGKFGQRALDFYSIHVTKESTHPVKPLAQIAGNRYASAPVGKALSDACMGTIASFLSKYQDIIIEHQKVVKGNQKRLESLRELAGKENLEYPSVTLPPQPHTKEGVDAYNEVIARVRMWVNLNLWQKLKLSRDDAKPLLRLKGFPSFPLVERQANEVDWWDMVCNVKKLINEKKEDGKVFWQNLAGYKRQEALRPYLSSEEDRKKGKKFARYQLGDLLLHLEKKHGEDWGKVYDEAWERIDKKVEGLSKHIKLEEERRSEDAQSKAALTDWLRAKASFVIEGLKEADKDEFCRCELKLQKWYGDLRGKPFAIEAENSILDISGFSKQYNCAFIWQKDGVKKLNLYLIINYFKGGKLRFKKIKPEAFEANRFYTVINKKSGEIVPMEVNFNFDDPNLIILPLAFGKRQGREFIWNDLLSLETGSLKLANGRVIEKTLYNRRTRQDEPALFVALTFERREVLDSSNIKPMNLIGVDRGENIPAVIALTDPEGCPLSRFKDSLGNPTHILRIGESYKEKQRTIQAKKEVEQRRAGGYSRKYASKAKNLADDMVRNTARDLLYYAVTQDAMLIFENLSRGFGRQGKRTFMAERQYTRMEDWLTAKLAYEGLPSKTYLSKTLAQYTSKTCSNCGFTITSADYDRVLEKLKKTATGWMTTINGKELKVEGQITYYNRYKRQNVVKDLSVELDRLSEESVNNDISSWTKGRSGEALSLLKKRFSHRPVQEKFVCLNCGFETHADEQAALNIARSWLFLRSQEYKKYQTNKTTGNTDKRAFVETWQSFYRKKLKEVWKPAV

SEQ ID NO: 33184 - protein, 978 aa, synthetic construct
  REGION 1..978: note = engineered CasX variant
QEIKRINGIRRRLVKDSNTKKAGKTGPMKTLLVRVMTPDLRERLENLRKKPENIPQPISNTSRANLNKLLTDYTEMKKAILHVYDEEFQKDPVGLMSRVAQPASKKIDQNKLKPEMDEKGNLTTAGFACSQCGQPLFVYKLEQVSEKGKAYTNYFGRCNVAEHEKLILLAQLKPEKDSDEAVTYSLGKFGQRALDFYSIHVTKESTHPVKPLAQIAGNRYASVPVGKALSDACMGTIASFLSKYQDIIIEHQKVVKGNQKRLESLRELAGKENLEYPSVTLPPQPHTKEGVDAYNEVIARVRMWVNLNLWQKLKLSRDDAKPLLRLKGFPSFPLVERQANEVDWWDMVCNVKKLINEKKEDGKVFWQNLAGYKRQEALRPYLSSEEDRKKGKKFARYQLGDLLLHLEKKHGEDWGKVYDEAWERIDKKVEGLSKHIKLEEERRSEDAQSKAALTDWLRAKASFVIEGLKEADKDEFCRCELKLQKWYGDLRGKPFAIEAENSILDISGFSKQYNCAFIWQKDGVKKLNLYLIINYFKGGKLRFKKIKPEAFEANRFYTVINKKSGEIVPMEVNFNFDDPNLIILPLAFGKRQGREFIWNDLLSLETGSLKLANGRVIEKTLYNRRTRQDEPALFVALTFERREVLDSSNIKPMNLIGVDRGENIPAVIALTDPEGCPLSRFKDSLGNPTHILRIGESYKEKQRTIQAKKEVEQRRAGGYSRKYASKAKNLADDMVRNTARDLLYYAVTQDAMLIFENLSRGFGRQGKRTFMAERQYTRMEDWLTAKLAYEGLPSKTYLSKTLAQYTSKTCSNCGFTITSADYDRVLEKLKKTATGWMTTINGKELKVEGQITYYNRYKRQNVVKDLSVELDRLSEESVNNDISSWTKGRSGEALSLLKKRFSHRPVQEKFVCLNCGFETHADEQAALNIARSWLFLRSQEYKKYQTNKTTGNTDKRAFVETWQSFYRKKLKEVWKPAV

SEQ ID NO: 33185 - protein, 978 aa, synthetic construct
  REGION 1..978: note = engineered CasX variant
QEIKRINGIRRRLVKDSNTKKAGKTGPMKTLLVRVMTPDLRERLENLRKKPENIPQPISNTSRANLNKLLTDYTEMKKAILHVYDEEFQKDPVGLMSRVAQPASKKIDQNKLKPEMDEKGNLTTAGFACSQCGQPLFVYKLEQVSEKGKAYTNYFGRCNVAEHEKLIKLAQLKPEKDSDEAVTYSLGKFGQRALDFYSIHVTKESTHPVKPLAQIAGNRYASGPVGKALSDACMGTIASFLSKYQDIIIEHQKVVKGNQKRLESLRELAGKENLEYPSVTLPPQPHTKEGVDAYNEVIARVRMWVNLNLWQKLKLSRDDAKPLLRLKGFPSFPLVERQANEVDWWDMVCNVKKLINEKKEDGKVFWQNLAGYKRQEALRPYLSSEEDRKKGKKFARYQLGDLLLHLEKKHGEDWGKVYDEAWERIDKKVEGLSKHIKLEEERRSEDAQSKAALTDWLRAKASFVIEGLKEADKDEFCRCELKLQKWYGDLRGKPFAIEAENSILDISGFSKQYNCAFIWQKDGVKKLNLYLIINYFKGGKLRFKKIKPEAFEANRFYTVINKKSGEIVPMEVNFNFDDPNLIILPLAFGKRQGREFIWNDLLSLETGSLKLANGRVIEKTLYNRRTRQDEPALFVALTFERREVLDSSNIKPMNLIGVDRGENIPAVIALTDPEGCPLSRFKDSLGNPTHILRIGESYKEKQRTIQAKKEVEQRRAGGYSRKYASKAKNLADDMVRNTARDLLYYAVTQDAMLIFENLSRGFGRQGKRTFMAERQYTRMEDWLTAKLAYEGLPSKTYLSKTLAQYTSKTCSNCGFTITSADYDRVLEKLKKTATGWMTTINGKELKVEGQITYYNRYKRQNVVKDLSVELDRLSEESVNNDISSWTKGRSGEALSLLKKRFSHRPVQEKFVCLNCGFETHADEQAALNIARSWLFLRSQEYKKYQTNKTTGNTDKRAFVETWQSFYRKKLKEVWKPAV

SEQ ID NO: 33186 - protein, 977 aa, synthetic construct
  REGION 1..977: note = engineered CasX variant
QEIKRINGIRRRLVKDSNTKKAGKTGPMKTLLVRVMTPDLRERLENLRKKPENIPQPISNTSRANLNKLLTDYTEMKKAILHVYDEEFQKDPVGLMSRVAQPASKKIDQNKLKPEMDEKGNLTTAGFACSQCGQPLFVYKLEQVSEKGKAYTNYFGRCNVAEHEKLILLAQLKPEKDSDEAVTYSLGKFGQRALDFYSIHVTKESTHPVKPLAQIAGNRYASPVGKALSDACMGTIASFLSKYQDIIIEHQKVVKGNQKRLESLRELAGKENLEYPSVTLPPQPHTKEGVDAYNEVIARVRMWVNLNLWQKLKLSRDDAKPLLRLKGFPSFPLVERQANEVDWWDMVCNVKKLINEKKEDGKVFWQNLAGYKRQEALRPYLSSEEDRKKGKKFARYQLGDLLLHLEKKHGEDWGKVYDEAWERIDKKVEGLSKHIKLEEERRSEDAQSKAALTDWLRAKASFVIEGLKEADKDEFCRCELKLQKWYGDLRGKPFAIEAENSILDISGFSKQYNCAFIWQKDGVKKLNLYLIINYFKGGKLRFKKIKPEAFEANRFYTVINKKSGEIVPMEVNFNFDDPNLIILPLAFGKRQGREFIWNDLLSLETGSLKLANGRVIEKTLYNRRTRQDEPALFVALTFERREVLDSSNIKPMNLIGVDRGENIPAVIALTDPEGCPLSRFKDSLGNPTHILRIGESYKEKQRTIQAKKEVEQRRAGGYSRKYASKAKNLADDMVRNTARDLLYYAVTQDAMLIFENLSRGFGRQGKRTFMAERQYTRMEDWLTAKLAYEGLPSKTYLSKTLAQYTSKTCSNCGFTITSADYDRVLEKLKKTATGWMTTINGKELKVEGQITYYNRYKRQNVVKDLSVELDRLSEESVNNDISSWTKGRSGEALSLLKKRFSHRPVQEKFVCLNCGFETHADEQAALNIARSWLFLRSQEYKKYQTNKTTGNTDKRAFVETWQSFYRKKLKEVWKPAV

SEQ ID NO: 33187 - protein, 978 aa, synthetic construct
  REGION 1..978: note = engineered CasX variant
QEIKRINGIRRRLVKDSNTKKAGKTGPMKTLLVRVMTPDLRERLENLRKKPENIPQPISNTSRANLNKLLTDYTEMKKAILHVYWEEFQKDPVGLMSRVAQPASKKIDQNKLKPEMDEKGNLTTAGFACSQCGQPLFVYKLEQVSEKGKAYTNYFGRCNVAEHEKLIKLAQLKPEKDSDEAVTYSLGKFGQRALDFYSIHVTKESTHPVKPLAQIAGNRYASYPVGKALSDACMGTIASFLSKYQDIIIEHQKVVKGNQKRLESLRELAGKENLEYPSVTLPPQPHTKEGVDAYNEVIARVRMWVNLNLWQKLKLSRDDAKPLLRLKGFPSFPLVERQANEVDWWDMVCNVKKLINEKKEDGKVFWQNLAGYKRQEALRPYLSSEEDRKKGKKFARYQLGDLLLHLEKKHGEDWGKVYDEAWERIDKKVEGLSKHIKLEEERRSEDAQSKAALTDWLRAKASFVIEGLKEADKDEFCRCELKLQKWYGDLRGKPFAIEAENSILDISGFSKQYNCAFIWQKDGVKKLNLYLIINYFKGGKLRFKKIKPEAFEANRFYTVINKKSGEIVPMEVNFNFDDPNLIILPLAFGKRQGREFIWNDLLSLETGSLKLANGRVIEKTLYNRRTRQDEPALFVALTFERREVLDSSNIKPMNLIGVDRGENIPAVIALTDPEGCPLSRFKDSLGNPTHILRIGESYKEKQRTIQAKKEVEQRRAGGYSRKYASKAKNLADDMVRNTARDLLYYAVTQDAMLIFENLSRGFGRQGKRTFMAERQYTRMEDWLTAKLAYEGLPSKTYLSKTLAQYTSKTCSNCGFTITSADYDRVLEKLKKTATGWMTTINGKELKVEGQITYYNRYKRQNVVKDLSVELDRLSEESVNNDISSWTKGRSGEALSLLKKRFSHRPVQEKFVCLNCGFETHADEQAALNIARSWLFLRSQEYKKYQTNKTTGNTDKRAFVETWQSFYRKKLKEVWKPAV

SEQ ID NO: 33188 - protein, 978 aa, synthetic construct
  REGION 1..978: note = engineered CasX variant
QEIKRINGIRRRLVKDSNTKKAGKTGPMKTLLVRVMTPDLRERLENLRKKPENIPQPISNTSRANLNKLLTDYTEMKKAILHVYWEEFQKDPVGLMSRVAQPASKKIDQNKLKPEMDEKGNLTTAGFACSQCGQPLFVYKLEQVSEKGKAYTNYFGRCNVAEHEKLIKLAQLKPEKDSDEAVTYSLGKFGQRALDFYSIHVTKESTHPVKPLAQIAGNRYASHPVGKALSDACMGTIASFLSKYQDIIIEHQKVVKGNQKRLESLRELAGKENLEYPSVTLPPQPHTKEGVDAYNEVIARVRMWVNLNLWQKLKLSRDDAKPLLRLKGFPSFPLVERQANEVDWWDMVCNVKKLINEKKEDGKVFWQNLAGYKRQEALRPYLSSEEDRKKGKKFARYQLGDLLLHLEKKHGEDWGKVYDEAWERIDKKVEGLSKHIKLEEERRSEDAQSKAALTDWLRAKASFVIEGLKEADKDEFCRCELKLQKWYGDLRGKPFAIEAENSILDISGFSKQYNCAFIWQKDGVKKLNLYLIINYFKGGKLRFKKIKPEAFEANRFYTVINKKSGEIVPMEVNFNFDDPNLIILPLAFGKRQGREFIWNDLLSLETGSLKLANGRVIEKTLYNRRTRQDEPALFVALTFERREVLDSSNIKPMNLIGVDRGENIPAVIALTDPEGCPLSRFKDSLGNPTHILRIGESYKEKQRTIQAKKEVEQRRAGGYSRKYASKAKNLADDMVRNTARDLLYYAVTQDAMLIFENLSRGFGRQGKRTFMAERQYTRMEDWLTAKLAYEGLPSKTYLSKTLAQYTSKTCSNCGFTITSADYDRVLEKLKKTATGWMTTINGKELKVEGQITYYNRYKRQNVVKDLSVELDRLSEESVNNDISSWTKGRSGEALSLLKKRFSHRPVQEKFVCLNCGFETHADEQAALNIARSWLFLRSQEYKKYQTNKTTGNTDKRAFVETWQSFYRKKLKEVWKPAV

SEQ ID NO: 33189 - protein, 978 aa, synthetic construct
  REGION 1..978: note = engineered CasX variant
QEIKRINGIRRRLVKDSNTKKAGKTGPMKTLLVRVMTPDLRERLENLRKKPENIPQPISNTSRANLNKLLTDYTEMKKAILHVYWEEFQKDPVGLMSRVAQPASKKIDQNKLKPEMDEKGNLTTAGFACSQCGQPLFVYKLEQVSEKGKAYTNYFGRCNVAEHEKLIKLAQLKPEKDSDEAVTYSLGKFGQRALDFYSIHVTKESTHPVKPLAQIAGNRYASTPVGKALSDACMGTIASFLSKYQDIIIEHQKVVKGNQKRLESLRELAGKENLEYPSVTLPPQPHTKEGVDAYNEVIARVRMWVNLNLWQKLKLSRDDAKPLLRLKGFPSFPLVERQANEVDWWDMVCNVKKLINEKKEDGKVFWQNLAGYKRQEALRPYLSSEEDRKKGKKFARYQLGDLLLHLEKKHGEDWGKVYDEAWERIDKKVEGLSKHIKLEEERRSEDAQSKAALTDWLRAKASFVIEGLKEADKDEFCRCELKLQKWYGDLRGKPFAIEAENSILDISGFSKQYNCAFIWQKDGVKKLNLYLIINYFKGGKLRFKKIKPEAFEANRFYTVINKKSGEIVPMEVNFNFDDPNLIILPLAFGKRQGREFIWNDLLSLETGSLKLANGRVIEKTLYNRRTRQDEPALFVALTFERREVLDSSNIKPMNLIGVDRGENIPAVIALTDPEGCPLSRFKDSLGNPTHILRIGESYKEKQRTIQAKKEVEQRRAGGYSRKYASKAKNLADDMVRNTARDLLYYAVTQDAMLIFENLSRGFGRQGKRTFMAERQYTRMEDWLTAKLAYEGLPSKTYLSKTLAQYTSKTCSNCGFTITSADYDRVLEKLKKTATGWMTTINGKELKVEGQITYYNRYKRQNVVKDLSVELDRLSEESVNNDISSWTKGRSGEALSLLKKRFSHRPVQEKFVCLNCGFETHADEQAALNIARSWLFLRSQEYKKYQTNKTTGNTDKRAFVETWQSFYRKKLKEVWKPAV

SEQ ID NO: 33190 - protein, 978 aa, synthetic construct
  REGION 1..978: note = engineered CasX variant
QEIKRINGIRRRLVKDSNTKKAGKTGPMKTLLVRVMTPDLRERLENLRKKPENIPQPISNTSRANLNKLLTDYTEMKKAILHVYWEEFQKDPVGLMSRVAQPASKKIDQNKLKPEMDEKGNLTTAGFACSQCGQPLFVYKLEQVSEKGKAYTNYFGRCNVAEHEKLIKLAQLKPEKDSDEAVTYSLGKFGQRALDFYSIHVTKESTHPVKPLAQIAGNRYASAPVGKALSDACMGTIASFLSKYQDIIIEHQKVVKGNQKRLESLRELAGKENLEYPSVTLPPQPHTKEGVDAYNEVIARVRMWVNLNLWQKLKLSRDDAKPLLRLKGFPSFPLVERQANEVDWWDMVCNVKKLINEKKEDGKVFWQNLAGYKRQEALRPYLSSEEDRKKGKKFARYQLGDLLLHLEKKHGEDWGKVYDEAWERIDKKVEGLSKHIKLEEERRSEDAQSKAALTDWLRAKASFVIEGLKEADKDEFCRCELKLQKWYGDLRGKPFAIEAENSILDISGFSKQYNCAFIWQKDGVKKLNLYLIINYFKGGKLRFKKIKPEAFEANRFYTVINKKSGEIVPMEVNFNFDDPNLIILPLAFGKRQGREFIWNDLLSLETGSLKLANGRVIEKTLYNRRTRQDEPALFVALTFERREVLDSSNIKPMNLIGVDRGENIPAVIALTDPEGCPLSRFKDSLGNPTHILRIGESYKEKQRTIQAKKEVEQRRAGGYSRKYASKAKNLADDMVRNTARDLLYYAVTQDAMLIFENLSRGFGRQGKRTFMAERQYTRMEDWLTAKLAYEGLPSKTYLSKTLAQYTSKTCSNCGFTITSADYDRVLEKLKKTATGWMTTINGKELKVEGQITYYNRYKRQNVVKDLSVELDRLSEESVNNDISSWTKGRSGEALSLLKKRFSHRPVQEKFVCLNCGFETHADEQAALNIARSWLFLRSQEYKKYQTNKTTGNTDKRAFVETWQSFYRKKLKEVWKPAV

SEQ ID NO: 33191 - protein, 978 aa, synthetic construct
  REGION 1..978: note = engineered CasX variant
QEIKRINGIRRRLVKDSNTKKAGKTGPMKTLLVRVMTPDLRERLENLRKKPENIPQPISNTSRANLNKLLTDYTEMKKAILHVYWEEFQKDPVGLMSRVAQPASKKIDQNKLKPEMDEKGNLTTAGFACSQCGQPLFVYKLEQVSEKGKAYTNYFGRCNVAEHEKLIKLAQLKPEKDSDEAVTYSLGKFGQRALDFYSIHVTKESTHPVKPLAQIAGNRYASVPVGKALSDACMGTIASFLSKYQDIIIEHQKVVKGNQKRLESLRELAGKENLEYPSVTLPPQPHTKEGVDAYNEVIARVRMWVNLNLWQKLKLSRDDAKPLLRLKGFPSFPLVERQANEVDWWDMVCNVKKLINEKKEDGKVFWQNLAGYKRQEALRPYLSSEEDRKKGKKFARYQLGDLLLHLEKKHGEDWGKVYDEAWERIDKKVEGLSKHIKLEEERRSEDAQSKAALTDWLRAKASFVIEGLKEADKDEFCRCELKLQKWYGDLRGKPFAIEAENSILDISGFSKQYNCAFIWQKDGVKKLNLYLIINYFKGGKLRFKKIKPEAFEANRFYTVINKKSGEIVPMEVNFNFDDPNLIILPLAFGKRQGREFIWNDLLSLETGSLKLANGRVIEKTLYNRRTRQDEPALFVALTFERREVLDSSNIKPMNLIGVDRGENIPAVIALTDPEGCPLSRFKDSLGNPTHILRIGESYKEKQRTIQAKKEVEQRRAGGYSRKYASKAKNLADDMVRNTARDLLYYAVTQDAMLIFENLSRGFGRQGKRTFMAERQYTRMEDWLTAKLAYEGLPSKTYLSKTLAQYTSKTCSNCGFTITSADYDRVLEKLKKTATGWMTTINGKELKVEGQITYYNRYKRQNVVKDLSVELDRLSEESVNNDISSWTKGRSGEALSLLKKRFSHRPVQEKFVCLNCGFETHADEQAALNIARSWLFLRSQEYKKYQTNKTTGNTDKRAFVETWQSFYRKKLKEVWKPAV

SEQ ID NO: 33192 - protein, 979 aa, synthetic construct
  REGION 1..979: note = engineered CasX variant
QEIKRINGIRRRLVKDSNTKKAGKTGPMKTLLVRVMTPDLRERLENLRKKPENIPQPISNTSRANLNKLLTDYTEMKKAILHVYWEEFQKDPVGLMSRVAQPASKKIDQNKLKPEMDEKGNLTTAGFACSQCGQPLFVYKLEQVSEKGKAYTNYFGRCNVAEHEKLIKKLAQLKPEKDSDEAVTYSLGKFGQRALDFYSIHVTKESTHPVKPLAQIAGNRYASGPVGKALSDACMGTIASFLSKYQDIIIEHQKVVKGNQKRLESLRELAGKENLEYPSVTLPPQPHTKEGVDAYNEVIARVRMWVNLNLWQKLKLSRDDAKPLLRLKGFPSFPLVERQANEVDWWDMVCNVKKLINEKKEDGKVFWQNLAGYKRQEALRPYLSSEEDRKKGKKFARYQLGDLLLHLEKKHGEDWGKVYDEAWERIDKKVEGLSKHIKLEEERRSEDAQSKAALTDWLRAKASFVIEGLKEADKDEFCRCELKLQKWYGDLRGKPFAIEAENSILDISGFSKQYNCAFIWQKDGVKKLNLYLIINYFKGGKLRFKKIKPEAFEANRFYTVINKKSGEIVPMEVNFNFDDPNLIILPLAFGKRQGREFIWNDLLSLETGSLKLANGRVIEKTLYNRRTRQDEPALFVALTFERREVLDSSNIKPMNLIGVDRGENIPAVIALTDPEGCPLSRFKDSLGNPTHILRIGESYKEKQRTIQAKKEVEQRRAGGYSRKYASKAKNLADDMVRNTARDLLYYAVTQDAMLIFENLSRGFGRQGKRTFMAERQYTRMEDWLTAKLAYEGLPSKTYLSKTLAQYTSKTCSNCGFTITSADYDRVLEKLKKTATGWMTTINGKELKVEGQITYYNRYKRQNVVKDLSVELDRLSEESVNNDISSWTKGRSGEALSLLKKRFSHRPVQEKFVCLNCGFETHADEQAALNIARSWLFLRSQEYKKYQTNKTTGNTDKRAFVETWQSFYRKKLKEVWKPAV

SEQ ID NO: 33193 - protein, 977 aa, synthetic construct
  REGION 1..977: note = engineered CasX variant
QEIKRINGIRRRLVKDSNTKKAGKTGPMKTLLVRVMTPDLRERLENLRKKPENIPQPISNTSRANLNKLLTDYTEMKKAILHVYWEEFQKDPVGLMSRVAQPASKKIDQNKLKPEMDEKGNLTTAGFACSQCGQPLFVYKLEQVSEKGKAYTNYFGRCNVAEHEKLIKLAQLKPEKDSDEAVTYSLGKFGQRALDFYSIHVTKESTHPVKPLAQIAGNRYASPVGKALSDACMGTIASFLSKYQDIIIEHQKVVKGNQKRLESLRELAGKENLEYPSVTLPPQPHTKEGVDAYNEVIARVRMWVNLNLWQKLKLSRDDAKPLLRLKGFPSFPLVERQANEVDWWDMVCNVKKLINEKKEDGKVFWQNLAGYKRQEALRPYLSSEEDRKKGKKFARYQLGDLLLHLEKKHGEDWGKVYDEAWERIDKKVEGLSKHIKLEEERRSEDAQSKAALTDWLRAKASFVIEGLKEADKDEFCRCELKLQKWYGDLRGKPFAIEAENSILDISGFSKQYNCAFIWQKDGVKKLNLYLIINYFKGGKLRFKKIKPEAFEANRFYTVINKKSGEIVPMEVNFNFDDPNLIILPLAFGKRQGREFIWNDLLSLETGSLKLANGRVIEKTLYNRRTRQDEPALFVALTFERREVLDSSNIKPMNLIGVDRGENIPAVIALTDPEGCPLSRFKDSLGNPTHILRIGESYKEKQRTIQAKKEVEQRRAGGYSRKYASKAKNLADDMVRNTARDLLYYAVTQDAMLIFENLSRGFGRQGKRTFMAERQYTRMEDWLTAKLAYEGLPSKTYLSKTLAQYTSKTCSNCGFTITSADYDRVLEKLKKTATGWMTTINGKELKVEGQITYYNRYKRQNVVKDLSVELDRLSEESVNNDISSWTKGRSGEALSLLKKRFSHRPVQEKFVCLNCGFETHADEQAALNIARSWLFLRSQEYKKYQTNKTTGNTDKRAFVETWQSFYRKKLKEVWKPAV

SEQ ID NO: 33194 - protein, 978 aa, synthetic construct
  REGION 1..978: note = engineered CasX variant
QEIKRINGIRRRLVKDSNTKKAGKTGPMKTLLVRVMTPDLRERLENLRKKPENIPQPISNTSRANLNKLLTDYTEMKKAILHVYWEEFQKDPVGLMSRVAQPASKKIDQNKLKPEMDEKGNLTTAGFACSQCGQPLFVYKLEQVSEKGKAYTNYFGRCNVAEHEKLILLYQLKPEKDSDEAVTYSLGKFGQRALDFYSIHVTKESTHPVKPLAQIAGNRYASYPVGKALSDACMGTIASFLSKYQDIIIEHQKVVKGNQKRLESLRELAGKENLEYPSVTLPPQPHTKEGVDAYNEVIARVRMWVNLNLWQKLKLSRDDAKPLLRLKGFPSFPLVERQANEVDWWDMVCNVKKLINEKKEDGKVFWQNLAGYKRQEALRPYLSSEEDRKKGKKFARYQLGDLLLHLEKKHGEDWGKVYDEAWERIDKKVEGLSKHIKLEEERRSEDAQSKAALTDWLRAKASFVIEGLKEADKDEFCRCELKLQKWYGDLRGKPFAIEAENSILDISGFSKQYNCAFIWQKDGVKKLNLYLIINYFKGGKLRFKKIKPEAFEANRFYTVINKKSGEIVPMEVNFNFDDPNLIILPLAFGKRQGREFIWNDLLSLETGSLKLANGRVIEKTLYNRRTRQDEPALFVALTFERREVLDSSNIKPMNLIGVDRGENIPAVIALTDPEGCPLSRFKDSLGNPTHILRIGESYKEKQRTIQAKKEVEQRRAGGYSRKYASKAKNLADDMVRNTARDLLYYAVTQDAMLIFENLSRGFGRQGKRTFMAERQYTRMEDWLTAKLAYEGLPSKTYLSKTLAQYTSKTCSNCGFTITSADYDRVLEKLKKTATGWMTTINGKELKVEGQITYYNRYKRQNVVKDLSVELDRLSEESVNNDISSWTKGRSGEALSLLKKRFSHRPVQEKFVCLNCGFETHADEQAALNIARSWLFLRSQEYKKYQTNKTTGNTDKRAFVETWQSFYRKKLKEVWKPAV

SEQ ID NO: 33195 - protein, 978 aa, synthetic construct
  REGION 1..978: note = engineered CasX variant
QEIKRINGIRRRLVKDSNTKKAGKTGPMKTLLVRVMTPDLRERLENLRKKPENIPQPISNTSRANLNKLLTDYTEMKKAILHVYWEEFQKDPVGLMSRVAQPASKKIDQNKLKPEMDEKGNLTTAGFACSQCGQPLFVYKLEQVSEKGKAYTNYFGRCNVAEHEKLILLYQLKPEKDSDEAVTYSLGKFGQRALDFYSIHVTKESTHPVKPLAQIAGNRYASHPVGKALSDACMGTIASFLSKYQDIIIEHQKVVKGNQKRLESLRELAGKENLEYPSVTLPPQPHTKEGVDAYNEVIARVRMWVNLNLWQKLKLSRDDAKPLLRLKGFPSFPLVERQANEVDWWDMVCNVKKLINEKKEDGKVFWQNLAGYKRQEALRPYLSSEEDRKKGKKFARYQLGDLLLHLEKKHGEDWGKVYDEAWERIDKKVEGLSKHIKLEEERRSEDAQSKAALTDWLRAKASFVIEGLKEADKDEFCRCELKLQKWYGDLRGKPFAIEAENSILDISGFSKQYNCAFIWQKDGVKKLNLYLIINYFKGGKLRFKKIKPEAFEANRFYTVINKKSGEIVPMEVNFNFDDPNLIILPLAFGKRQGREFIWNDLLSLETGSLKLANGRVIEKTLYNRRTRQDEPALFVALTFERREVLDSSNIKPMNLIGVDRGENIPAVIALTDPEGCPLSRFKDSLGNPTHILRIGESYKEKQRTIQAKKEVEQRRAGGYSRKYASKAKNLADDMVRNTARDLLYYAVTQDAMLIFENLSRGFGRQGKRTFMAERQYTRMEDWLTAKLAYEGLPSKTYLSKTLAQYTSKTCSNCGFTITSADYDRVLEKLKKTATGWMTTINGKELKVEGQITYYNRYKRQNVVKDLSVELDRLSEESVNNDISSWTKGRSGEALSLLKKRFSHRPVQEKFVCLNCGFETHADEQAALNIARSWLFLRSQEYKKYQTNKTTGNTDKRAFVETWQSFYRKKLKEVWKPAV

SEQ ID NO: 33196 - protein, 978 aa, synthetic construct
  REGION 1..978: note = engineered CasX variant
QEIKRINGIRRRLVKDSNTKKAGKTGPMKTLLVRVMTPDLRERLENLRKKPENIPQPISNTSRANLNKLLTDYTEMKKAILHVYWEEFQKDPVGLMSRVAQPASKKIDQNKLKPEMDEKGNLTTAGFACSQCGQPLFVYKLEQVSEKGKAYTNYFGRCNVAEHEKLILLYQLKPEKDSDEAVTYSLGKFGQRALDFYSIHVTKESTHPVKPLAQIAGNRYASSPVGKALSDACMGTIASFLSKYQDIIIEHQKVVKGNQKRLESLRELAGKENLEYPSVTLPPQPHTKEGVDAYNEVIARVRMWVNLNLWQKLKLSRDDAKPLLRLKGFPSFPLVERQANEVDWWDMVCNVKKLINEKKEDGKVFWQNLAGYKRQEALRPYLSSEEDRKKGKKFARYQLGDLLLHLEKKHGEDWGKVYDEAWERIDKKVEGLSKHIKLEEERRSEDAQSKAALTDWLRAKASFVIEGLKEADKDEFCRCELKLQKWYGDLRGKPFAIEAENSILDISGFSKQYNCAFIWQKDGVKKLNLYLIINYFKGGKLRFKKIKPEAFEANRFYTVINKKSGEIVPMEVNFNFDDPNLIILPLAFGKRQGREFIWNDLLSLETGSLKLANGRVIEKTLYNRRTRQDEPALFVALTFERREVLDSSNIKPMNLIGVDRGENIPAVIALTDPEGCPLSRFKDSLGNPTHILRIGESYKEKQRTIQAKKEVEQRRAGGYSRKYASKAKNLADDMVRNTARDLLYYAVTQDAMLIFENLSRGFGRQGKRTFMAERQYTRMEDWLTAKLAYEGLPSKTYLSKTLAQYTSKTCSNCGFTITSADYDRVLEKLKKTATGWMTTINGKELKVEGQITYYNRYKRQNVVKDLSVELDRLSEESVNNDISSWTKGRSGEALSLLKKRFSHRPVQEKFVCLNCGFETHADEQAALNIARSWLFLRSQEYKKYQTNKTTGNTDKRAFVETWQSFYRKKLKEVWKPAV

SEQ ID NO: 33197 - protein, 978 aa, synthetic construct
  REGION 1..978: note = engineered CasX variant
QEIKRINGIRRRLVKDSNTKKAGKTGPMKTLLVRVMTPDLRERLENLRKKPENIPQPISNTSRANLNKLLTDYTEMKKAILHVYWEEFQKDPVGLMSRVAQPASKKIDQNKLKPEMDEKGNLTTAGFACSQCGQPLFVYKLEQVSEKGKAYTNYFGRCNVAEHEKLILLYQLKPEKDSDEAVTYSLGKFGQRALDFYSIHVTKESTHPVKPLAQIAGNRYASTPVGKALSDACMGTIASFLSKYQDIIIEHQKVVKGNQKRLESLRELAGKENLEYPSVTLPPQPHTKEGVDAYNEVIARVRMWVNLNLWQKLKLSRDDAKPLLRLKGFPSFPLVERQANEVDWWDMVCNVKKLINEKKEDGKVFWQNLAGYKRQEALRPYLSSEEDRKKGKKFARYQLGDLLLHLEKKHGEDWGKVYDEAWERIDKKVEGLSKHIKLEEERRSEDAQSKAALTDWLRAKASFVIEGLKEADKDEFCRCELKLQKWYGDLRGKPFAIEAENSILDISGFSKQYNCAFIWQKDGVKKLNLYLIINYFKGGKLRFKKIKPEAFEANRFYTVINKKSGEIVPMEVNFNFDDPNLIILPLAFGKRQGREFIWNDLLSLETGSLKLANGRVIEKTLYNRRTRQDEPALFVALTFERREVLDSSNIKPMNLIGVDRGENIPAVIALTDPEGCPLSRFKDSLGNPTHILRIGESYKEKQRTIQAKKEVEQRRAGGYSRKYASKAKNLADDMVRNTARDLLYYAVTQDAMLIFENLSRGFGRQGKRTFMAERQYTRMEDWLTAKLAYEGLPSKTYLSKTLAQYTSKTCSNCGFTITSADYDRVLEKLKKTATGWMTTINGKELKVEGQITYYNRYKRQNVVKDLSVELDRLSEESVNNDISSWTKGRSGEALSLLKKRFSHRPVQEKFVCLNCGFETHADEQAALNIARSWLFLRSQEYKKYQTNKTTGNTDKRAFVETWQSFYRKKLKEVWKPAV

SEQ ID NO: 33198 - protein, 978 aa, synthetic construct
  REGION 1..978: note = engineered CasX variant
QEIKRINGIRRRLVKDSNTKKAGKTGPMKTLLVRVMTPDLRERLENLRKKPENIPQPISNTSRANLNKLLTDYTEMKKAILHVYWEEFQKDPVGLMSRVAQPASKKIDQNKLKPEMDEKGNLTTAGFACSQCGQPLFVYKLEQVSEKGKAYTNYFGRCNVAEHEKLILLYQLKPEKDSDEAVTYSLGKFGQRALDFYSIHVTKESTHPVKPLAQIAGNRYASAPVGKALSDACMGTIASFLSKYQDIIIEHQKVVKGNQKRLESLRELAGKENLEYPSVTLPPQPHTKEGVDAYNEVIARVRMWVNLNLWQKLKLSRDDAKPLLRLKGFPSFPLVERQANEVDWWDMVCNVKKLINEKKEDGKVFWQNLAGYKRQEALRPYLSSEEDRKKGKKFARYQLGDLLLHLEKKHGEDWGKVYDEAWERIDKKVEGLSKHIKLEEERRSEDAQSKAALTDWLRAKASFVIEGLKEADKDEFCRCELKLQKWYGDLRGKPFAIEAENSILDISGFSKQYNCAFIWQKDGVKKLNLYLIINYFKGGKLRFKKIKPEAFEANRFYTVINKKSGEIVPMEVNFNFDDPNLIILPLAFGKRQGREFIWNDLLSLETGSLKLANGRVIEKTLYNRRTRQDEPALFVALTFERREVLDSSNIKPMNLIGVDRGENIPAVIALTDPEGCPLSRFKDSLGNPTHILRIGESYKEKQRTIQAKKEVEQRRAGGYSRKYASKAKNLADDMVRNTARDLLYYAVTQDAMLIFENLSRGFGRQGKRTFMAERQYTRMEDWLTAKLAYEGLPSKTYLSKTLAQYTSKTCSNCGFTITSADYDRVLEKLKKTATGWMTTINGKELKVEGQITYYNRYKRQNVVKDLSVELDRLSEESVNNDISSWTKGRSGEALSLLKKRFSHRPVQEKFVCLNCGFETHADEQAALNIARSWLFLRSQEYKKYQTNKTTGNTDKRAFVETWQSFYRKKLKEVWKPAV

SEQ ID NO: 33199 - protein, 978 aa, synthetic construct
  REGION 1..978: note = engineered CasX variant
QEIKRINGIRRRLVKDSNTKKAGKTGPMKTLLVRVMTPDLRERLENLRKKPENIPQPISNTSRANLNKLLTDYTEMKKAILHVYWEEFQKDPVGLMSRVAQPASKKIDQNKLKPEMDEKGNLTTAGFACSQCGQPLFVYKLEQVSEKGKAYTNYFGRCNVAEHEKLILLYQLKPEKDSDEAVTYSLGKFGQRALDFYSIHVTKESTHPVKPLAQIAGNRYASVPVGKALSDACMGTIASFLSKYQDIIIEHQKVVKGNQKRLESLRELAGKENLEYPSVTLPPQPHTKEGVDAYNEVIARVRMWVNLNLWQKLKLSRDDAKPLLRLKGFPSFPLVERQANEVDWWDMVCNVKKLINEKKEDGKVFWQNLAGYKRQEALRPYLSSEEDRKKGKKFARYQLGDLLLHLEKKHGEDWGKVYDEAWERIDKKVEGLSKHIKLEEERRSEDAQSKAALTDWLRAKASFVIEGLKEADKDEFCRCELKLQKWYGDLRGKPFAIEAENSILDISGFSKQYNCAFIWQKDGVKKLNLYLIINYFKGGKLRFKKIKPEAFEANRFYTVINKKSGEIVPMEVNFNFDDPNLIILPLAFGKRQGREFIWNDLLSLETGSLKLANGRVIEKTLYNRRTRQDEPALFVALTFERREVLDSSNIKPMNLIGVDRGENIPAVIALTDPEGCPLSRFKDSLGNPTHILRIGESYKEKQRTIQAKKEVEQRRAGGYSRKYASKAKNLADDMVRNTARDLLYYAVTQDAMLIFENLSRGFGRQGKRTFMAERQYTRMEDWLTAKLAYEGLPSKTYLSKTLAQYTSKTCSNCGFTITSADYDRVLEKLKKTATGWMTTINGKELKVEGQITYYNRYKRQNVVKDLSVELDRLSEESVNNDISSWTKGRSGEALSLLKKRFSHRPVQEKFVCLNCGFETHADEQAALNIARSWLFLRSQEYKKYQTNKTTGNTDKRAFVETWQSFYRKKLKEVWKPAV

SEQ ID NO: 33200 - protein, 978 aa, synthetic construct
  REGION 1..978: note = engineered CasX variant
QEIKRINGIRRRLVKDSNTKKAGKTGPMKTLLVRVMTPDLRERLENLRKKPENIPQPISNTSRANLNKLLTDYTEMKKAILHVYWEEFQKDPVGLMSRVAQPASKKIDQNKLKPEMDEKGNLTTAGFACSQCGQPLFVYKLEQVSEKGKAYTNYFGRCNVAEHEKLIKLYQLKPEKDSDEAVTYSLGKFGQRALDFYSIHVTKESTHPVKPLAQIAGNRYASGPVGKALSDACMGTIASFLSKYQDIIIEHQKVVKGNQKRLESLRELAGKENLEYPSVTLPPQPHTKEGVDAYNEVIARVRMWVNLNLWQKLKLSRDDAKPLLRLKGFPSFPLVERQANEVDWWDMVCNVKKLINEKKEDGKVFWQNLAGYKRQEALRPYLSSEEDRKKGKKFARYQLGDLLLHLEKKHGEDWGKVYDEAWERIDKKVEGLSKHIKLEEERRSEDAQSKAALTDWLRAKASFVIEGLKEADKDEFCRCELKLQKWYGDLRGKPFAIEAENSILDISGFSKQYNCAFIWQKDGVKKLNLYLIINYFKGGKLRFKKIKPEAFEANRFYTVINKKSGEIVPMEVNFNFDDPNLIILPLAFGKRQGREFIWNDLLSLETGSLKLANGRVIEKTLYNRRTRQDEPALFVALTFERREVLDSSNIKPMNLIGVDRGENIPAVIALTDPEGCPLSRFKDSLGNPTHILRIGESYKEKQRTIQAKKEVEQRRAGGYSRKYASKAKNLADDMVRNTARDLLYYAVTQDAMLIFENLSRGFGRQGKRTFMAERQYTRMEDWLTAKLAYEGLPSKTYLSKTLAQYTSKTCSNCGFTITSADYDRVLEKLKKTATGWMTTINGKELKVEGQITYYNRYKRQNVVKDLSVELDRLSEESVNNDISSWTKGRSGEALSLLKKRFSHRPVQEKFVCLNCGFETHADEQAALNIARSWLFLRSQEYKKYQTNKTTGNTDKRAFVETWQSFYRKKLKEVWKPAV

SEQ ID NO: 33201 - protein, 977 aa, synthetic construct
  REGION 1..977: note = engineered CasX variant
QEIKRINGIRRRLVKDSNTKKAGKTGPMKTLLVRVMTPDLRERLENLRKKPENIPQPISNTSRANLNKLLTDYTEMKKAILHVYWEEFQKDPVGLMSRVAQPASKKIDQNKLKPEMDEKGNLTTAGFACSQCGQPLFVYKLEQVSEKGKAYTNYFGRCNVAEHEKLILLYQLKPEKDSDEAVTYSLGKFGQRALDFYSIHVTKESTHPVKPLAQIAGNRYASPVGKALSDACMGTIASFLSKYQDIIIEHQKVVKGNQKRLESLRELAGKENLEYPSVTLPPQPHTKEGVDAYNEVIARVRMWVNLNLWQKLKLSRDDAKPLLRLKGFPSFPLVERQANEVDWWDMVCNVKKLINEKKEDGKVFWQNLAGYKRQEALRPYLSSEEDRKKGKKFARYQLGDLLLHLEKKHGEDWGKVYDEAWERIDKKVEGLSKHIKLEEERRSEDAQSKAALTDWLRAKASFVIEGLKEADKDEFCRCELKLQKWYGDLRGKPFAIEAENSILDISGFSKQYNCAFIWQKDGVKKLNLYLIINYFKGGKLRFKKIKPEAFEANRFYTVINKKSGEIVPMEVNFNFDDPNLIILPLAFGKRQGREFIWNDLLSLETGSLKLANGRVIEKTLYNRRTRQDEPALFVALTFERREVLDSSNIKPMNLIGVDRGENIPAVIALTDPEGCPLSRFKDSLGNPTHILRIGESYKEKQRTIQAKKEVEQRRAGGYSRKYASKAKNLADDMVRNTARDLLYYAVTQDAMLIFENLSRGFGRQGKRTFMAERQYTRMEDWLTAKLAYEGLPSKTYLSKTLAQYTSKTCSNCGFTITSADYDRVLEKLKKTATGWMTTINGKELKVEGQITYYNRYKRQNVVKDLSVELDRLSEESVNNDISSWTKGRSGEALSLLKKRFSHRPVQEKFVCLNCGFETHADEQAALNIARSWLFLRSQEYKKYQTNKTTGNTDKRAFVETWQSFYRKKLKEVWKPAV

SEQ ID NO: 33202 - protein, 978 aa, synthetic construct
  REGION 1..978: note = engineered CasX variant
QEIKRINGIRRRLVKDSNTKKAGKTGPMKTLLVRVMTPDLRERLENLRKKPENIPQPISNTSRANLNKLLTDYTEMKKAILHVYWEEFQKDPVGLMSRVAQPASKKIDQNKLKPEMDEKGNLTTAGFACSQCGQPLFVYKLEQVSEKGKAYTNYFGRCNVAEHEKLILLSQLKPEKDSDEAVTYSLGKFGQRALDFYSIHVTKESTHPVKPLAQIAGNRYASYPVGKALSDACMGTIASFLSKYQDIIIEHQKVVKGNQKRLESLRELAGKENLEYPSVTLPPQPHTKEGVDAYNEVIARVRMWVNLNLWQKLKLSRDDAKPLLRLKGFPSFPLVERQANEVDWWDMVCNVKKLINEKKEDGKVFWQNLAGYKRQEALRPYLSSEEDRKKGKKFARYQLGDLLLHLEKKHGEDWGKVYDEAWERIDKKVEGLSKHIKLEEERRSEDAQSKAALTDWLRAKASFVIEGLKEADKDEFCRCELKLQKWYGDLRGKPFAIEAENSILDISGFSKQYNCAFIWQKDGVKKLNLYLIINYFKGGKLRFKKIKPEAFEANRFYTVINKKSGEIVPMEVNFNFDDPNLIILPLAFGKRQGREFIWNDLLSLETGSLKLANGRVIEKTLYNRRTRQDEPALFVALTFERREVLDSSNIKPMNLIGVDRGENIPAVIALTDPEGCPLSRFKDSLGNPTHILRIGESYKEKQRTIQAKKEVEQRRAGGYSRKYASKAKNLADDMVRNTARDLLYYAVTQDAMLIFENLSRGFGRQGKRTFMAERQYTRMEDWLTAKLAYEGLPSKTYLSKTLAQYTSKTCSNCGFTITSADYDRVLEKLKKTATGWMTTINGKELKVEGQITYYNRYKRQNVVKDLSVELDRLSEESVNNDISSWTKGRSGEALSLLKKRFSHRPVQEKFVCLNCGFETHADEQAALNIARSWLFLRSQEYKKYQTNKTTGNTDKRAFVETWQSFYRKKLKEVWKPAV

SEQ ID NO: 33203 - protein, 978 aa, synthetic construct
  REGION 1..978: note = engineered CasX variant
QEIKRINGIRRRLVKDSNTKKAGKTGPMKTLLVRVMTPDLRERLENLRKKPENIPQPISNTSRANLNKLLTDYTEMKKAILHVYWEEFQKDPVGLMSRVAQPASKKIDQNKLKPEMDEKGNLTTAGFACSQCGQPLFVYKLEQVSEKGKAYTNYFGRCNVAEHEKLILLSQLKPEKDSDEAVTYSLGKFGQRALDFYSIHVTKESTHPVKPLAQIAGNRYASHPVGKALSDACMGTIASFLSKYQDIIIEHQKVVKGNQKRLESLRELAGKENLEYPSVTLPPQPHTKEGVDAYNEVIARVRMWVNLNLWQKLKLSRDDAKPLLRLKGFPSFPLVERQANEVDWWDMVCNVKKLINEKKEDGKVFWQNLAGYKRQEALRPYLSSEEDRKKGKKFARYQLGDLLLHLEKKHGEDWGKVYDEAWERIDKKVEGLSKHIKLEEERRSEDAQSKAALTDWLRAKASFVIEGLKEADKDEFCRCELKLQKWYGDLRGKPFAIEAENSILDISGFSKQYNCAFIWQKDGVKKLNLYLIINYFKGGKLRFKKIKPEAFEANRFYTVINKKSGEIVPMEVNFNFDDPNLIILPLAFGKRQGREFIWNDLLSLETGSLKLANGRVIEKTLYNRRTRQDEPALFVALTFERREVLDSSNIKPMNLIGVDRGENIPAVIALTDPEGCPLSRFKDSLGNPTHILRIGESYKEKQRTIQAKKEVEQRRAGGYSRKYASKAKNLADDMVRNTARDLLYYAVTQDAMLIFENLSRGFGRQGKRTFMAERQYTRMEDWLTAKLAYEGLPSKTYLSKTLAQYTSKTCSNCGFTITSADYDRVLEKLKKTATGWMTTINGKELKVEGQITYYNRYKRQNVVKDLSVELDRLSEESVNNDISSWTKGRSGEALSLLKKRFSHRPVQEKFVCLNCGFETHADEQAALNIARSWLFLRSQEYKKYQTNKTTGNTDKRAFVETWQSFYRKKLKEVWKPAV

SEQ ID NO: 33204 - protein, 978 aa, synthetic construct
  REGION 1..978: note = engineered CasX variant
QEIKRINGIRRRLVKDSNTKKAGKTGPMKTLLVRVMTPDLRERLENLRKKPENIPQPISNTSRANLNKLLTDYTEMKKAILHVYWEEFQKDPVGLMSRVAQPASKKIDQNKLKPEMDEKGNLTTAGFACSQCGQPLFVYKLEQVSEKGKAYTNYFGRCNVAEHEKLILLSQLKPEKDSDEAVTYSLGKFGQRALDFYSIHVTKESTHPVKPLAQIAGNRYASSPVGKALSDACMGTIASFLSKYQDIIIEHQKVVKGNQKRLESLRELAGKENLEYPSVTLPPQPHTKEGVDAYNEVIARVRMWVNLNLWQKLKLSRDDAKPLLRLKGFPSFPLVERQANEVDWWDMVCNVKKLINEKKEDGKVFWQNLAGYKRQEALRPYLSSEEDRKKGKKFARYQLGDLLLHLEKKHGEDWGKVYDEAWERIDKKVEGLSKHIKLEEERRSEDAQSKAALTDWLRAKASFVIEGLKEADKDEFCRCELKLQKWYGDLRGKPFAIEAENSILDISGFSKQYNCAFIWQKDGVKKLNLYLIINYFKGGKLRFKKIKPEAFEANRFYTVINKKSGEIVPMEVNFNFDDPNLIILPLAFGKRQGREFIWNDLLSLETGSLKLANGRVIEKTLYNRRTRQDEPALFVALTFERREVLDSSNIKPMNLIGVDRGENIPAVIALTDPEGCPLSRFKDSLGNPTHILRIGESYKEKQRTIQAKKEVEQRRAGGYSRKYASKAKNLADDMVRNTARDLLYYAVTQDAMLIFENLSRGFGRQGKRTFMAERQYTRMEDWLTAKLAYEGLPSKTYLSKTLAQYTSKTCSNCGFTITSADYDRVLEKLKKTATGWMTTINGKELKVEGQITYYNRYKRQNVVKDLSVELDRLSEESVNNDISSWTKGRSGEALSLLKKRFSHRPVQEKFVCLNCGFETHADEQAALNIARSWLFLRSQEYKKYQTNKTTGNTDKRAFVETWQSFYRKKLKEVWKPAV

SEQ ID NO: 33205 - protein, 978 aa, synthetic construct
  REGION 1..978: note = engineered CasX variant
QEIKRINGIRRRLVKDSNTKKAGKTGPMKTLLVRVMTPDLRERLENLRKKPENIPQPISNTSRANLNKLLTDYTEMKKAILHVYWEEFQKDPVGLMSRVAQPASKKIDQNKLKPEMDEKGNLTTAGFACSQCGQPLFVYKLEQVSEKGKAYTNYFGRCNVAEHEKLILLSQLKPEKDSDEAVTYSLGKFGQRALDFYSIHVTKESTHPVKPLAQIAGNRYASTPVGKALSDACMGTIASFLSKYQDIIIEHQKVVKGNQKRLESLRELAGKENLEYPSVTLPPQPHTKEGVDAYNEVIARVRMWVNLNLWQKLKLSRDDAKPLLRLKGFPSFPLVERQANEVDWWDMVCNVKKLINEKKEDGKVFWQNLAGYKRQEALRPYLSSEEDRKKGKKFARYQLGDLLLHLEKKHGEDWGKVYDEAWERIDKKVEGLSKHIKLEEERRSEDAQSKAALTDWLRAKASFVIEGLKEADKDEFCRCELKLQKWYGDLRGKPFAIEAENSILDISGFSKQYNCAFIWQKDGVKKLNLYLIINYFKGGKLRFKKIKPEAFEANRFYTVINKKSGEIVPMEVNFNFDDPNLIILPLAFGKRQGREFIWNDLLSLETGSLKLANGRVIEKTLYNRRTRQDEPALFVALTFERREVLDSSNIKPMNLIGVDRGENIPAVIALTDPEGCPLSRFKDSLGNPTHILRIGESYKEKQRTIQAKKEVEQRRAGGYSRKYASKAKNLADDMVRNTARDLLYYAVTQDAMLIFENLSRGFGRQGKRTFMAERQYTRMEDWLTAKLAYEGLPSKTYLSKTLAQYTSKTCSNCGFTITSADYDRVLEKLKKTATGWMTTINGKELKVEGQITYYNRYKRQNVVKDLSVELDRLSEESVNNDISSWTKGRSGEALSLLKKRFSHRPVQEKFVCLNCGFETHADEQAALNIARSWLFLRSQEYKKYQTNKTTGNTDKRAFVETWQSFYRKKLKEVWKPAV

SEQ ID NO: 33206 - protein, 978 aa, synthetic construct
  REGION 1..978: note = engineered CasX variant
QEIKRINGIRRRLVKDSNTKKAGKTGPMKTLLVRVMTPDLRERLENLRKKPENIPQPISNTSRANLNKLLTDYTEMKKAILHVYWEEFQKDPVGLMSRVAQPASKKIDQNKLKPEMDEKGNLTTAGFACSQCGQPLFVYKLEQVSEKGKAYTNYFGRCNVAEHEKLILLSQLKPEKDSDEAVTYSLGKFGQRALDFYSIHVTKESTHPVKPLAQIAGNRYASAPVGKALSDACMGTIASFLSKYQDIIIEHQKVVKGNQKRLESLRELAGKENLEYPSVTLPPQPHTKEGVDAYNEVIARVRMWVNLNLWQKLKLSRDDAKPLLRLKGFPSFPLVERQANEVDWWDMVCNVKKLINEKKEDGKVFWQNLAGYKRQEALRPYLSSEEDRKKGKKFARYQLGDLLLHLEKKHGEDWGKVYDEAWERIDKKVEGLSKHIKLEEERRSEDAQSKAALTDWLRAKASFVIEGLKEADKDEFCRCELKLQKWYGDLRGKPFAIEAENSILDISGFSKQYNCAFIWQKDGVKKLNLYLIINYFKGGKLRFKKIKPEAFEANRFYTVINKKSGEIVPMEVNFNFDDPNLIILPLAFGKRQGREFIWNDLLSLETGSLKLANGRVIEKTLYNRRTRQDEPALFVALTFERREVLDSSNIKPMNLIGVDRGENIPAVIALTDPEGCPLSRFKDSLGNPTHILRIGESYKEKQRTIQAKKEVEQRRAGGYSRKYASKAKNLADDMVRNTARDLLYYAVTQDAMLIFENLSRGFGRQGKRTFMAERQYTRMEDWLTAKLAYEGLPSKTYLSKTLAQYTSKTCSNCGFTITSADYDRVLEKLKKTATGWMTTINGKELKVEGQITYYNRYKRQNVVKDLSVELDRLSEESVNNDISSWTKGRSGEALSLLKKRFSHRPVQEKFVCLNCGFETHADEQAALNIARSWLFLRSQEYKKYQTNKTTGNTDKRAFVETWQSFYRKKLKEVWKPAV

SEQ ID NO: 33207 - protein, 978 aa, synthetic construct
  REGION 1..978: note = engineered CasX variant
QEIKRINGIRRRLVKDSNTKKAGKTGPMKTLLVRVMTPDLRERLENLRKKPENIPQPISNTSRANLNKLLTDYTEMKKAILHVYWEEFQKDPVGLMSRVAQPASKKIDQNKLKPEMDEKGNLTTAGFACSQCGQPLFVYKLEQVSEKGKAYTNYFGRCNVAEHEKLILLSQLKPEKDSDEAVTYSLGKFGQRALDFYSIHVTKESTHPVKPLAQIAGNRYASVPVGKALSDACMGTIASFLSKYQDIIIEHQKVVKGNQKRLESLRELAGKENLEYPSVTLPPQPHTKEGVDAYNEVIARVRMWVNLNLWQKLKLSRDDAKPLLRLKGFPSFPLVERQANEVDWWDMVCNVKKLINEKKEDGKVFWQNLAGYKRQEALRPYLSSEEDRKKGKKFARYQLGDLLLHLEKKHGEDWGKVYDEAWERIDKKVEGLSKHIKLEEERRSEDAQSKAALTDWLRAKASFVIEGLKEADKDEFCRCELKLQKWYGDLRGKPFAIEAENSILDISGFSKQYNCAFIWQKDGVKKLNLYLIINYFKGGKLRFKKIKPEAFEANRFYTVINKKSGEIVPMEVNFNFDDPNLIILPLAFGKRQGREFIWNDLLSLETGSLKLANGRVIEKTLYNRRTRQDEPALFVALTFERREVLDSSNIKPMNLIGVDRGENIPAVIALTDPEGCPLSRFKDSLGNPTHILRIGESYKEKQRTIQAKKEVEQRRAGGYSRKYASKAKNLADDMVRNTARDLLYYAVTQDAMLIFENLSRGFGRQGKRTFMAERQYTRMEDWLTAKLAYEGLPSKTYLSKTLAQYTSKTCSNCGFTITSADYDRVLEKLKKTATGWMTTINGKELKVEGQITYYNRYKRQNVVKDLSVELDRLSEESVNNDISSWTKGRSGEALSLLKKRFSHRPVQEKFVCLNCGFETHADEQAALNIARSWLFLRSQEYKKYQTNKTTGNTDKRAFVETWQSFYRKKLKEVWKPAV

SEQ ID NO: 33208 - protein, 978 aa, synthetic construct
  REGION 1..978: note = engineered CasX variant
QEIKRINGIRRRLVKDSNTKKAGKTGPMKTLLVRVMTPDLRERLENLRKKPENIPQPISNTSRANLNKLLTDYTEMKKAILHVYWEEFQKDPVGLMSRVAQPASKKIDQNKLKPEMDEKGNLTTAGFACSQCGQPLFVYKLEQVSEKGKAYTNYFGRCNVAEHEKLIKLSQLKPEKDSDEAVTYSLGKFGQRALDFYSIHVTKESTHPVKPLAQIAGNRYASGPVGKALSDACMGTIASFLSKYQDIIIEHQKVVKGNQKRLESLRELAGKENLEYPSVTLPPQPHTKEGVDAYNEVIARVRMWVNLNLWQKLKLSRDDAKPLLRLKGFPSFPLVERQANEVDWWDMVCNVKKLINEKKEDGKVFWQNLAGYKRQEALRPYLSSEEDRKKGKKFARYQLGDLLLHLEKKHGEDWGKVYDEAWERIDKKVEGLSKHIKLEEERRSEDAQSKAALTDWLRAKASFVIEGLKEADKDEFCRCELKLQKWYGDLRGKPFAIEAENSILDISGFSKQYNCAFIWQKDGVKKLNLYLIINYFKGGKLRFKKIKPEAFEANRFYTVINKKSGEIVPMEVNFNFDDPNLIILPLAFGKRQGREFIWNDLLSLETGSLKLANGRVIEKTLYNRRTRQDEPALFVALTFERREVLDSSNIKPMNLIGVDRGENIPAVIALTDPEGCPLSRFKDSLGNPTHILRIGESYKEKQRTIQAKKEVEQRRAGGYSRKYASKAKNLADDMVRNTARDLLYYAVTQDAMLIFENLSRGFGRQGKRTFMAERQYTRMEDWLTAKLAYEGLPSKTYLSKTLAQYTSKTCSNCGFTITSADYDRVLEKLKKTATGWMTTINGKELKVEGQITYYNRYKRQNVVKDLSVELDRLSEESVNNDISSWTKGRSGEALSLLKKRFSHRPVQEKFVCLNCGFETHADEQAALNIARSWLFLRSQEYKKYQTNKTTGNTDKRAFVETWQSFYRKKLKEVWKPAV

SEQ ID NO: 33209 - protein, 977 aa, synthetic construct
  REGION 1..977: note = engineered CasX variant
QEIKRINGIRRRLVKDSNTKKAGKTGPMKTLLVRVMTPDLRERLENLRKKPENIPQPISNTSRANLNKLLTDYTEMKKAILHVYWEEFQKDPVGLMSRVAQPASKKIDQNKLKPEMDEKGNLTTAGFACSQCGQPLFVYKLEQVSEKGKAYTNYFGRCNVAEHEKLILLSQLKPEKDSDEAVTYSLGKFGQRALDFYSIHVTKESTHPVKPLAQIAGNRYASPVGKALSDACMGTIASFLSKYQDIIIEHQKVVKGNQKRLESLRELAGKENLEYPSVTLPPQPHTKEGVDAYNEVIARVRMWVNLNLWQKLKLSRDDAKPLLRLKGFPSFPLVERQANEVDWWDMVCNVKKLINEKKEDGKVFWQNLAGYKRQEALRPYLSSEEDRKKGKKFARYQLGDLLLHLEKKHGEDWGKVYDEAWERIDKKVEGLSKHIKLEEERRSEDAQSKAALTDWLRAKASFVIEGLKEADKDEFCRCELKLQKWYGDLRGKPFAIEAENSILDISGFSKQYNCAFIWQKDGVKKLNLYLIINYFKGGKLRFKKIKPEAFEANRFYTVINKKSGEIVPMEVNFNFDDPNLIILPLAFGKRQGREFIWNDLLSLETGSLKLANGRVIEKTLYNRRTRQDEPALFVALTFERREVLDSSNIKPMNLIGVDRGENIPAVIALTDPEGCPLSRFKDSLGNPTHILRIGESYKEKQRTIQAKKEVEQRRAGGYSRKYASKAKNLADDMVRNTARDLLYYAVTQDAMLIFENLSRGFGRQGKRTFMAERQYTRMEDWLTAKLAYEGLPSKTYLSKTLAQYTSKTCSNCGFTITSADYDRVLEKLKKTATGWMTTINGKELKVEGQITYYNRYKRQNVVKDLSVELDRLSEESVNNDISSWTKGRSGEALSLLKKRFSHRPVQEKFVCLNCGFETHADEQAALNIARSWLFLRSQEYKKYQTNKTTGNTDKRAFVETWQSFYRKKLKEVWKPAV

SEQ ID NO: 33210 - protein, 978 aa, synthetic construct
  REGION 1..978: note = engineered CasX variant
QEIKRINGIRRRLVKDSNTKKAGKTGPMKTLLVRVMTPDLRERLENLRKKPENIPQPISNTSRANLNKLLTDYTEMKKAILHVYWEEFQKDPVGLMSRVAQPASKKIDQNKLKPEMDEKGNLTTAGFACSQCGQPLFVYKLEQVSEKGKAYTNYFGRCNVAEHEKLILLAQLKPEKDSDEAVTYSLGKFGQRALDFYSIHVTKESTHPVKPLAQIAGNRYASYPVGKALSDACMGTIASFLSKYQDIIIEHQKVVKGNQKRLESLRELAGKENLEYPSVTLPPQPHTKEGVDAYNEVIARVRMWVNLNLWQKLKLSRDDAKPLLRLKGFPSFPLVERQANEVDWWDMVCNVKKLINEKKEDGKVFWQNLAGYKRQEALRPYLSSEEDRKKGKKFARYQLGDLLLHLEKKHGEDWGKVYDEAWERIDKKVEGLSKHIKLEEERRSEDAQSKAALTDWLRAKASFVIEGLKEADKDEFCRCELKLQKWYGDLRGKPFAIEAENSILDISGFSKQYNCAFIWQKDGVKKLNLYLIINYFKGGKLRFKKIKPEAFEANRFYTVINKKSGEIVPMEVNFNFDDPNLIILPLAFGKRQGREFIWNDLLSLETGSLKLANGRVIEKTLYNRRTRQDEPALFVALTFERREVLDSSNIKPMNLIGVDRGENIPAVIALTDPEGCPLSRFKDSLGNPTHILRIGESYKEKQRTIQAKKEVEQRRAGGYSRKYASKAKNLADDMVRNTARDLLYYAVTQDAMLIFENLSRGFGRQGKRTFMAERQYTRMEDWLTAKLAYEGLPSKTYLSKTLAQYTSKTCSNCGFTITSADYDRVLEKLKKTATGWMTTINGKELKVEGQITYYNRYKRQNVVKDLSVELDRLSEESVNNDISSWTKGRSGEALSLLKKRFSHRPVQEKFVCLNCGFETHADEQAALNIARSWLFLRSQEYKKYQTNKTTGNTDKRAFVETWQSFYRKKLKEVWKPAV

SEQ ID NO: 33211 - protein, 978 aa, synthetic construct
  REGION 1..978: note = engineered CasX variant
QEIKRINGIRRRLVKDSNTKKAGKTGPMKTLLVRVMTPDLRERLENLRKKPENIPQPISNTSRANLNKLLTDYTEMKKAILHVYWEEFQKDPVGLMSRVAQPASKKIDQNKLKPEMDEKGNLTTAGFACSQCGQPLFVYKLEQVSEKGKAYTNYFGRCNVAEHEKLILLAQLKPEKDSDEAVTYSLGKFGQRALDFYSIHVTKESTHPVKPLAQIAGNRYASHPVGKALSDACMGTIASFLSKYQDIIIEHQKVVKGNQKRLESLRELAGKENLEYPSVTLPPQPHTKEGVDAYNEVIARVRMWVNLNLWQKLKLSRDDAKPLLRLKGFPSFPLVERQANEVDWWDMVCNVKKLINEKKEDGKVFWQNLAGYKRQEALRPYLSSEEDRKKGKKFARYQLGDLLLHLEKKHGEDWGKVYDEAWERIDKKVEGLSKHIKLEEERRSEDAQSKAALTDWLRAKASFVIEGLKEADKDEFCRCELKLQKWYGDLRGKPFAIEAENSILDISGFSKQYNCAFIWQKDGVKKLNLYLIINYFKGGKLRFKKIKPEAFEANRFYTVINKKSGEIVPMEVNFNFDDPNLIILPLAFGKRQGREFIWNDLLSLETGSLKLANGRVIEKTLYNRRTRQDEPALFVALTFERREVLDSSNIKPMNLIGVDRGENIPAVIALTDPEGCPLSRFKDSLGNPTHILRIGESYKEKQRTIQAKKEVEQRRAGGYSRKYASKAKNLADDMVRNTARDLLYYAVTQDAMLIFENLSRGFGRQGKRTFMAERQYTRMEDWLTAKLAYEGLPSKTYLSKTLAQYTSKTCSNCGFTITSADYDRVLEKLKKTATGWMTTINGKELKVEGQITYYNRYKRQNVVKDLSVELDRLSEESVNNDISSWTKGRSGEALSLLKKRFSHRPVQEKFVCLNCGFETHADEQAALNIARSWLFLRSQEYKKYQTNKTTGNTDKRAFVETWQSFYRKKLKEVWKPAV

SEQ ID NO: 33212 - protein, 978 aa, synthetic construct
  REGION 1..978: note = engineered CasX variant
QEIKRINGIRRRLVKDSNTKKAGKTGPMKTLLVRVMTPDLRERLENLRKKPENIPQPISNTSRANLNKLLTDYTEMKKAILHVYWEEFQKDPVGLMSRVAQPASKKIDQNKLKPEMDEKGNLTTAGFACSQCGQPLFVYKLEQVSEKGKAYTNYFGRCNVAEHEKLILLAQLKPEKDSDEAVTYSLGKFGQRALDFYSIHVTKESTHPVKPLAQIAGNRYASTPVGKALSDACMGTIASFLSKYQDIIIEHQKVVKGNQKRLESLRELAGKENLEYPSVTLPPQPHTKEGVDAYNEVIARVRMWVNLNLWQKLKLSRDDAKPLLRLKGFPSFPLVERQANEVDWWDMVCNVKKLINEKKEDGKVFWQNLAGYKRQEALRPYLSSEEDRKKGKKFARYQLGDLLLHLEKKHGEDWGKVYDEAWERIDKKVEGLSKHIKLEEERRSEDAQSKAALTDWLRAKASFVIEGLKEADKDEFCRCELKLQKWYGDLRGKPFAIEAENSILDISGFSKQYNCAFIWQKDGVKKLNLYLIINYFKGGKLRFKKIKPEAFEANRFYTVINKKSGEIVPMEVNFNFDDPNLIILPLAFGKRQGREFIWNDLLSLETGSLKLANGRVIEKTLYNRRTRQDEPALFVALTFERREVLDSSNIKPMNLIGVDRGENIPAVIALTDPEGCPLSRFKDSLGNPTHILRIGESYKEKQRTIQAKKEVEQRRAGGYSRKYASKAKNLADDMVRNTARDLLYYAVTQDAMLIFENLSRGFGRQGKRTFMAERQYTRMEDWLTAKLAYEGLPSKTYLSKTLAQYTSKTCSNCGFTITSADYDRVLEKLKKTATGWMTTINGKELKVEGQITYYNRYKRQNVVKDLSVELDRLSEESVNNDISSWTKGRSGEALSLLKKRFSHRPVQEKFVCLNCGFETHADEQAALNIARSWLFLRSQEYKKYQTNKTTGNTDKRAFVETWQSFYRKKLKEVWKPAV

SEQ ID NO: 33213 - protein, 978 aa, synthetic construct
  REGION 1..978: note = engineered CasX variant
QEIKRINGIRRRLVKDSNTKKAGKTGPMKTLLVRVMTPDLRERLENLRKKPENIPQPISNTSRANLNKLLTDYTEMKKAILHVYWEEFQKDPVGLMSRVAQPASKKIDQNKLKPEMDEKGNLTTAGFACSQCGQPLFVYKLEQVSEKGKAYTNYFGRCNVAEHEKLILLAQLKPEKDSDEAVTYSLGKFGQRALDFYSIHVTKESTHPVKPLAQIAGNRYASAPVGKALSDACMGTIASFLSKYQDIIIEHQKVVKGNQKRLESLRELAGKENLEYPSVTLPPQPHTKEGVDAYNEVIARVRMWVNLNLWQKLKLSRDDAKPLLRLKGFPSFPLVERQANEVDWWDMVCNVKKLINEKKEDGKVFWQNLAGYKRQEALRPYLSSEEDRKKGKKFARYQLGDLLLHLEKKHGEDWGKVYDEAWERIDKKVEGLSKHIKLEEERRSEDAQSKAALTDWLRAKASFVIEGLKEADKDEFCRCELKLQKWYGDLRGKPFAIEAENSILDISGFSKQYNCAFIWQKDGVKKLNLYLIINYFKGGKLRFKKIKPEAFEANRFYTVINKKSGEIVPMEVNFNFDDPNLIILPLAFGKRQGREFIWNDLLSLETGSLKLANGRVIEKTLYNRRTRQDEPALFVALTFERREVLDSSNIKPMNLIGVDRGENIPAVIALTDPEGCPLSRFKDSLGNPTHILRIGESYKEKQRTIQAKKEVEQRRAGGYSRKYASKAKNLADDMVRNTARDLLYYAVTQDAMLIFENLSRGFGRQGKRTFMAERQYTRMEDWLTAKLAYEGLPSKTYLSKTLAQYTSKTCSNCGFTITSADYDRVLEKLKKTATGWMTTINGKELKVEGQITYYNRYKRQNVVKDLSVELDRLSEESVNNDISSWTKGRSGEALSLLKKRFSHRPVQEKFVCLNCGFETHADEQAALNIARSWLFLRSQEYKKYQTNKTTGNTDKRAFVETWQSFYRKKLKEVWKPAV

SEQ ID NO: 33214 - protein, 978 aa, synthetic construct
  REGION 1..978: note = engineered CasX variant
QEIKRINGIRRRLVKDSNTKKAGKTGPMKTLLVRVMTPDLRERLENLRKKPENIPQPISNTSRANLNKLLTDYTEMKKAILHVYWEEFQKDPVGLMSRVAQPASKKIDQNKLKPEMDEKGNLTTAGFACSQCGQPLFVYKLEQVSEKGKAYTNYFGRCNVAEHEKLILLAQLKPEKDSDEAVTYSLGKFGQRALDFYSIHVTKESTHPVKPLAQIAGNRYASVPVGKALSDACMGTIASFLSKYQDIIIEHQKVVKGNQKRLESLRELAGKENLEYPSVTLPPQPHTKEGVDAYNEVIARVRMWVNLNLWQKLKLSRDDAKPLLRLKGFPSFPLVERQANEVDWWDMVCNVKKLINEKKEDGKVFWQNLAGYKRQEALRPYLSSEEDRKKGKKFARYQLGDLLLHLEKKHGEDWGKVYDEAWERIDKKVEGLSKHIKLEEERRSEDAQSKAALTDWLRAKASFVIEGLKEADKDEFCRCELKLQKWYGDLRGKPFAIEAENSILDISGFSKQYNCAFIWQKDGVKKLNLYLIINYFKGGKLRFKKIKPEAFEANRFYTVINKKSGEIVPMEVNFNFDDPNLIILPLAFGKRQGREFIWNDLLSLETGSLKLANGRVIEKTLYNRRTRQDEPALFVALTFERREVLDSSNIKPMNLIGVDRGENIPAVIALTDPEGCPLSRFKDSLGNPTHILRIGESYKEKQRTIQAKKEVEQRRAGGYSRKYASKAKNLADDMVRNTARDLLYYAVTQDAMLIFENLSRGFGRQGKRTFMAERQYTRMEDWLTAKLAYEGLPSKTYLSKTLAQYTSKTCSNCGFTITSADYDRVLEKLKKTATGWMTTINGKELKVEGQITYYNRYKRQNVVKDLSVELDRLSEESVNNDISSWTKGRSGEALSLLKKRFSHRPVQEKFVCLNCGFETHADEQAALNIARSWLFLRSQEYKKYQTNKTTGNTDKRAFVETWQSFYRKKLKEVWKPAV

SEQ ID NO: 33215 - protein, 978 aa, synthetic construct
  REGION 1..978: note = engineered CasX variant
QEIKRINGIRRRLVKDSNTKKAGKTGPMKTLLVRVMTPDLRERLENLRKKPENIPQPISNTSRANLNKLLTDYTEMKKAILHVYWEEFQKDPVGLMSRVAQPASKKIDQNKLKPEMDEKGNLTTAGFACSQCGQPLFVYKLEQVSEKGKAYTNYFGRCNVAEHEKLILLAQLKPEKDSDEAVTYSLGKFGQRALDFYSIHVTKESTHPVKPLAQIAGNRYASYPVGKALSDACMGTIASFLSKYQDIIIEHQKVVKGNQKRLESLRELAGKENLEYPSVTLPPQPHTSEGVDAYNEVIARVRMWVNLNLWQKLKLSRDDAKPLLRLKGFPSFPLVERQANEVDWWDMVCNVKKLINEKKEDGKVFWQNLAGYKRQEALRPYLSSEEDRKKGKKFARYQLGDLLLHLEKKHGEDWGKVYDEAWERIDKKVEGLSKHIKLEEERRSEDAQSKAALTDWLRAKASFVIEGLKEADKDEFCRCELKLQKWYGDLRGKPFAIEAENSILDISGFSKQYNCAFIWQKDGVKKLNLYLIINYFKGGKLRFKKIKPEAFEANRFYTVINKKSGEIVPMEVNFNFDDPNLIILPLAFGKRQGREFIWNDLLSLETGSLKLANGRVIEKTLYNRRTRQDEPALFVALTFERREVLDSSNIKPMNLIGVDRGENIPAVIALTDPEGCPLSRFKDSLGNPTHILRIGESYKEKQRTIQAKKEVEQRRAGGYSRKYASKAKNLADDMVRNTARDLLYYAVTQDAMLIFENLSRGFGRQGKRTFMAERQYTRMEDWLTAKLAYEGLPSKTYLSKTLAQYTSKTCSNCGFTITSADYDRVLEKLKKTATGWMTTINGKELKVEGQITYYNRYKRQNVVKDLSVELDRLSEESVNNDISSWTKGRSGEALSLLKKRFSHRPVQEKFVCLNCGFETHADEQAALNIARSWLFLRSQEYKKYQTNKTTGNTDKRAFVETWQSFYRKKLKEVWKPAV

SEQ ID NO: 33216 - protein, 978 aa, synthetic construct
  REGION 1..978: note = engineered CasX variant
QEIKRINGIRRRLVKDSNTKKAGKTGPMKTLLVRVMTPDLRERLENLRKKPENIPQPISNTSRANLNKLLTDYTEMKKAILHVYWEEFQKDPVGLMSRVAQPASKKIDQNKLKPEMDEKGNLTTAGFACSQCGQPLFVYKLEQVSEKGKAYTNYFGRCNVAEHEKLILLAQLKPEKDSDEAVTYSLGKFGQRALDFYSIHVTKESTHPVKPLAQIAGNRYASHPVGKALSDACMGTIASFLSKYQDIIIEHQKVVKGNQKRLESLRELAGKENLEYPSVTLPPQPHTSEGVDAYNEVIARVRMWVNLNLWQKLKLSRDDAKPLLRLKGFPSFPLVERQANEVDWWDMVCNVKKLINEKKEDGKVFWQNLAGYKRQEALRPYLSSEEDRKKGKKFARYQLGDLLLHLEKKHGEDWGKVYDEAWERIDKKVEGLSKHIKLEEERRSEDAQSKAALTDWLRAKASFVIEGLKEADKDEFCRCELKLQKWYGDLRGKPFAIEAENSILDISGFSKQYNCAFIWQKDGVKKLNLYLIINYFKGGKLRFKKIKPEAFEANRFYTVINKKSGEIVPMEVNFNFDDPNLIILPLAFGKRQGREFIWNDLLSLETGSLKLANGRVIEKTLYNRRTRQDEPALFVALTFERREVLDSSNIKPMNLIGVDRGENIPAVIALTDPEGCPLSRFKDSLGNPTHILRIGESYKEKQRTIQAKKEVEQRRAGGYSRKYASKAKNLADDMVRNTARDLLYYAVTQDAMLIFENLSRGFGRQGKRTFMAERQYTRMEDWLTAKLAYEGLPSKTYLSKTLAQYTSKTCSNCGFTITSADYDRVLEKLKKTATGWMTTINGKELKVEGQITYYNRYKRQNVVKDLSVELDRLSEESVNNDISSWTKGRSGEALSLLKKRFSHRPVQEKFVCLNCGFETHADEQAALNIARSWLFLRSQEYKKYQTNKTTGNTDKRAFVETWQSFYRKKLKEVWKPAV

SEQ ID NO: 33217 - protein, 978 aa, synthetic construct
  REGION 1..978: note = engineered CasX variant
QEIKRINGIRRRLVKDSNTKKAGKTGPMKTLLVRVMTPDLRERLENLRKKPENIPQPISNTSRANLNKLLTDYTEMKKAILHVYWEEFQKDPVGLMSRVAQPASKKIDQNKLKPEMDEKGNLTTAGFACSQCGQPLFVYKLEQVSEKGKAYTNYFGRCNVAEHEKLILLAQLKPEKDSDEAVTYSLGKFGQRALDFYSIHVTKESTHPVKPLAQIAGNRYASSPVGKALSDACMGTIASFLSKYQDIIIEHQKVVKGNQKRLESLRELAGKENLEYPSVTLPPQPHTSEGVDAYNEVIARVRMWVNLNLWQKLKLSRDDAKPLLRLKGFPSFPLVERQANEVDWWDMVCNVKKLINEKKEDGKVFWQNLAGYKRQEALRPYLSSEEDRKKGKKFARYQLGDLLLHLEKKHGEDWGKVYDEAWERIDKKVEGLSKHIKLEEERRSEDAQSKAALTDWLRAKASFVIEGLKEADKDEFCRCELKLQKWYGDLRGKPFAIEAENSILDISGFSKQYNCAFIWQKDGVKKLNLYLIINYFKGGKLRFKKIKPEAFEANRFYTVINKKSGEIVPMEVNFNFDDPNLIILPLAFGKRQGREFIWNDLLSLETGSLKLANGRVIEKTLYNRRTRQDEPALFVALTFERREVLDSSNIKPMNLIGVDRGENIPAVIALTDPEGCPLSRFKDSLGNPTHILRIGESYKEKQRTIQAKKEVEQRRAGGYSRKYASKAKNLADDMVRNTARDLLYYAVTQDAMLIFENLSRGFGRQGKRTFMAERQYTRMEDWLTAKLAYEGLPSKTYLSKTLAQYTSKTCSNCGFTITSADYDRVLEKLKKTATGWMTTINGKELKVEGQITYYNRYKRQNVVKDLSVELDRLSEESVNNDISSWTKGRSGEALSLLKKRFSHRPVQEKFVCLNCGFETHADEQAALNIARSWLFLRSQEYKKYQTNKTTGNTDKRAFVETWQSFYRKKLKEVWKPAV

SEQ ID NO: 33218 - protein, 978 aa, synthetic construct
  REGION 1..978: note = engineered CasX variant
QEIKRINGIRRRLVKDSNTKKAGKTGPMKTLLVRVMTPDLRERLENLRKKPENIPQPISNTSRANLNKLLTDYTEMKKAILHVYWEEFQKDPVGLMSRVAQPASKKIDQNKLKPEMDEKGNLTTAGFACSQCGQPLFVYKLEQVSEKGKAYTNYFGRCNVAEHEKLILLAQLKPEKDSDEAVTYSLGKFGQRALDFYSIHVTKESTHPVKPLAQIAGNRYASTPVGKALSDACMGTIASFLSKYQDIIIEHQKVVKGNQKRLESLRELAGKENLEYPSVTLPPQPHTSEGVDAYNEVIARVRMWVNLNLWQKLKLSRDDAKPLLRLKGFPSFPLVERQANEVDWWDMVCNVKKLINEKKEDGKVFWQNLAGYKRQEALRPYLSSEEDRKKGKKFARYQLGDLLLHLEKKHGEDWGKVYDEAWERIDKKVEGLSKHIKLEEERRSEDAQSKAALTDWLRAKASFVIEGLKEADKDEFCRCELKLQKWYGDLRGKPFAIEAENSILDISGFSKQYNCAFIWQKDGVKKLNLYLIINYFKGGKLRFKKIKPEAFEANRFYTVINKKSGEIVPMEVNFNFDDPNLIILPLAFGKRQGREFIWNDLLSLETGSLKLANGRVIEKTLYNRRTRQDEPALFVALTFERREVLDSSNIKPMNLIGVDRGENIPAVIALTDPEGCPLSRFKDSLGNPTHILRIGESYKEKQRTIQAKKEVEQRRAGGYSRKYASKAKNLADDMVRNTARDLLYYAVTQDAMLIFENLSRGFGRQGKRTFMAERQYTRMEDWLTAKLAYEGLPSKTYLSKTLAQYTSKTCSNCGFTITSADYDRVLEKLKKTATGWMTTINGKELKVEGQITYYNRYKRQNVVKDLSVELDRLSEESVNNDISSWTKGRSGEALSLLKKRFSHRPVQEKFVCLNCGFETHADEQAALNIARSWLFLRSQEYKKYQTNKTTGNTDKRAFVETWQSFYRKKLKEVWKPAV

SEQ ID NO: 33219 - protein, 978 aa, synthetic construct
  REGION 1..978: note = engineered CasX variant
QEIKRINGIRRRLVKDSNTKKAGKTGPMKTLLVRVMTPDLRERLENLRKKPENIPQPISNTSRANLNKLLTDYTEMKKAILHVYWEEFQKDPVGLMSRVAQPASKKIDQNKLKPEMDEKGNLTTAGFACSQCGQPLFVYKLEQVSEKGKAYTNYFGRCNVAEHEKLILLAQLKPEKDSDEAVTYSLGKFGQRALDFYSIHVTKESTHPVKPLAQIAGNRYASAPVGKALSDACMGTIASFLSKYQDIIIEHQKVVKGNQKRLESLRELAGKENLEYPSVTLPPQPHTSEGVDAYNEVIARVRMWVNLNLWQKLKLSRDDAKPLLRLKGFPSFPLVERQANEVDWWDMVCNVKKLINEKKEDGKVFWQNLAGYKRQEALRPYLSSEEDRKKGKKFARYQLGDLLLHLEKKHGEDWGKVYDEAWERIDKKVEGLSKHIKLEEERRSEDAQSKAALTDWLRAKASFVIEGLKEADKDEFCRCELKLQKWYGDLRGKPFAIEAENSILDISGFSKQYNCAFIWQKDGVKKLNLYLIINYFKGGKLRFKKIKPEAFEANRFYTVINKKSGEIVPMEVNFNFDDPNLIILPLAFGKRQGREFIWNDLLSLETGSLKLANGRVIEKTLYNRRTRQDEPALFVALTFERREVLDSSNIKPMNLIGVDRGENIPAVIALTDPEGCPLSRFKDSLGNPTHILRIGESYKEKQRTIQAKKEVEQRRAGGYSRKYASKAKNLADDMVRNTARDLLYYAVTQDAMLIFENLSRGFGRQGKRTFMAERQYTRMEDWLTAKLAYEGLPSKTYLSKTLAQYTSKTCSNCGFTITSADYDRVLEKLKKTATGWMTTINGKELKVEGQITYYNRYKRQNVVKDLSVELDRLSEESVNNDISSWTKGRSGEALSLLKKRFSHRPVQEKFVCLNCGFETHADEQAALNIARSWLFLRSQEYKKYQTNKTTGNTDKRAFVETWQSFYRKKLKEVWKPAV

SEQ ID NO: 33220 - protein, 978 aa, synthetic construct
  REGION 1..978: note = engineered CasX variant
QEIKRINGIRRRLVKDSNTKKAGKTGPMKTLLVRVMTPDLRERLENLRKKPENIPQPISNTSRANLNKLLTDYTEMKKAILHVYWEEFQKDPVGLMSRVAQPASKKIDQNKLKPEMDEKGNLTTAGFACSQCGQPLFVYKLEQVSEKGKAYTNYFGRCNVAEHEKLILLAQLKPEKDSDEAVTYSLGKFGQRALDFYSIHVTKESTHPVKPLAQIAGNRYASVPVGKALSDACMGTIASFLSKYQDIIIEHQKVVKGNQKRLESLRELAGKENLEYPSVTLPPQPHTSEGVDAYNEVIARVRMWVNLNLWQKLKLSRDDAKPLLRLKGFPSFPLVERQANEVDWWDMVCNVKKLINEKKEDGKVFWQNLAGYKRQEALRPYLSSEEDRKKGKKFARYQLGDLLLHLEKKHGEDWGKVYDEAWERIDKKVEGLSKHIKLEEERRSEDAQSKAALTDWLRAKASFVIEGLKEADKDEFCRCELKLQKWYGDLRGKPFAIEAENSILDISGFSKQYNCAFIWQKDGVKKLNLYLIINYFKGGKLRFKKIKPEAFEANRFYTVINKKSGEIVPMEVNFNFDDPNLIILPLAFGKRQGREFIWNDLLSLETGSLKLANGRVIEKTLYNRRTRQDEPALFVALTFERREVLDSSNIKPMNLIGVDRGENIPAVIALTDPEGCPLSRFKDSLGNPTHILRIGESYKEKQRTIQAKKEVEQRRAGGYSRKYASKAKNLADDMVRNTARDLLYYAVTQDAMLIFENLSRGFGRQGKRTFMAERQYTRMEDWLTAKLAYEGLPSKTYLSKTLAQYTSKTCSNCGFTITSADYDRVLEKLKKTATGWMTTINGKELKVEGQITYYNRYKRQNVVKDLSVELDRLSEESVNNDISSWTKGRSGEALSLLKKRFSHRPVQEKFVCLNCGFETHADEQAALNIARSWLFLRSQEYKKYQTNKTTGNTDKRAFVETWQSFYRKKLKEVWKPAV

SEQ ID NO: 33221 - protein, 978 aa, synthetic construct
  REGION 1..978: note = engineered CasX variant
QEIKRINGIRRRLVKDSNTKKAGKTGPMKTLLVRVMTPDLRERLENLRKKPENIPQPISNTSRANLNKLLTDYTEMKKAILHVYWEEFQKDPVGLMSRVAQPASKKIDQNKLKPEMDEKGNLTTAGFACSQCGQPLFVYKLEQVSEKGKAYTNYFGRCNVAEHEKLIKLAQLKPEKDSDEAVTYSLGKFGQRALDFYSIHVTKESTHPVKPLAQIAGNRYASGPVGKALSDACMGTIASFLSKYQDIIIEHQKVVKGNQKRLESLRELAGKENLEYPSVTLPPQPHTSEGVDAYNEVIARVRMWVNLNLWQKLKLSRDDAKPLLRLKGFPSFPLVERQANEVDWWDMVCNVKKLINEKKEDGKVFWQNLAGYKRQEALRPYLSSEEDRKKGKKFARYQLGDLLLHLEKKHGEDWGKVYDEAWERIDKKVEGLSKHIKLEEERRSEDAQSKAALTDWLRAKASFVIEGLKEADKDEFCRCELKLQKWYGDLRGKPFAIEAENSILDISGFSKQYNCAFIWQKDGVKKLNLYLIINYFKGGKLRFKKIKPEAFEANRFYTVINKKSGEIVPMEVNFNFDDPNLIILPLAFGKRQGREFIWNDLLSLETGSLKLANGRVIEKTLYNRRTRQDEPALFVALTFERREVLDSSNIKPMNLIGVDRGENIPAVIALTDPEGCPLSRFKDSLGNPTHILRIGESYKEKQRTIQAKKEVEQRRAGGYSRKYASKAKNLADDMVRNTARDLLYYAVTQDAMLIFENLSRGFGRQGKRTFMAERQYTRMEDWLTAKLAYEGLPSKTYLSKTLAQYTSKTCSNCGFTITSADYDRVLEKLKKTATGWMTTINGKELKVEGQITYYNRYKRQNVVKDLSVELDRLSEESVNNDISSWTKGRSGEALSLLKKRFSHRPVQEKFVCLNCGFETHADEQAALNIARSWLFLRSQEYKKYQTNKTTGNTDKRAFVETWQSFYRKKLKEVWKPAV

SEQ ID NO: 33222 - protein, 977 aa, synthetic construct
  REGION 1..977: note = engineered CasX variant
QEIKRINGIRRRLVKDSNTKKAGKTGPMKTLLVRVMTPDLRERLENLRKKPENIPQPISNTSRANLNKLLTDYTEMKKAILHVYWEEFQKDPVGLMSRVAQPASKKIDQNKLKPEMDEKGNLTTAGFACSQCGQPLFVYKLEQVSEKGKAYTNYFGRCNVAEHEKLILLAQLKPEKDSDEAVTYSLGKFGQRALDFYSIHVTKESTHPVKPLAQIAGNRYASPVGKALSDACMGTIASFLSKYQDIIIEHQKVVKGNQKRLESLRELAGKENLEYPSVTLPPQPHTSEGVDAYNEVIARVRMWVNLNLWQKLKLSRDDAKPLLRLKGFPSFPLVERQANEVDWWDMVCNVKKLINEKKEDGKVFWQNLAGYKRQEALRPYLSSEEDRKKGKKFARYQLGDLLLHLEKKHGEDWGKVYDEAWERIDKKVEGLSKHIKLEEERRSEDAQSKAALTDWLRAKASFVIEGLKEADKDEFCRCELKLQKWYGDLRGKPFAIEAENSILDISGFSKQYNCAFIWQKDGVKKLNLYLIINYFKGGKLRFKKIKPEAFEANRFYTVINKKSGEIVPMEVNFNFDDPNLIILPLAFGKRQGREFIWNDLLSLETGSLKLANGRVIEKTLYNRRTRQDEPALFVALTFERREVLDSSNIKPMNLIGVDRGENIPAVIALTDPEGCPLSRFKDSLGNPTHILRIGESYKEKQRTIQAKKEVEQRRAGGYSRKYASKAKNLADDMVRNTARDLLYYAVTQDAMLIFENLSRGFGRQGKRTFMAERQYTRMEDWLTAKLAYEGLPSKTYLSKTLAQYTSKTCSNCGFTITSADYDRVLEKLKKTATGWMTTINGKELKVEGQITYYNRYKRQNVVKDLSVELDRLSEESVNNDISSWTKGRSGEALSLLKKRFSHRPVQEKFVCLNCGFETHADEQAALNIARSWLFLRSQEYKKYQTNKTTGNTDKRAFVETWQSFYRKKLKEVWKPAV

SEQ ID NO: 33223 - protein, 978 aa, synthetic construct
  REGION 1..978: note = engineered CasX variant
QEIKRINGIRRRLVKDSNTKKAGKTGPMKTLLVRVMTPDLRERLENLRKKPENIPQPISNTSRANLNKLLTDYTEMKKAILHVYWEEFQKDPVGLMSRVAQPASKKIDQNKLKPEMDEKGNLTTAGFACSQCGQPLFVYKLEQVSEKGKAYTNYFGRCNVAEHEKLILLAQLKPEKDSDEAVTYSLGKFGQRALDFYSIHVTKESTHPVKPLAQIAGNRYASYPVGKALSDACMGTIASFLSKYQDIIIEHQKVVKGNQKRLESLRELAGKENLEYPSVTLPPQPHTKEGLDAYNEVIARVRMWVNLNLWQKLKLSRDDAKPLLRLKGFPSFPLVERQANEVDWWDMVCNVKKLINEKKEDGKVFWQNLAGYKRQEALRPYLSSEEDRKKGKKFARYQLGDLLLHLEKKHGEDWGKVYDEAWERIDKKVEGLSKHIKLEEERRSEDAQSKAALTDWLRAKASFVIEGLKEADKDEFCRCELKLQKWYGDLRGKPFAIEAENSILDISGFSKQYNCAFIWQKDGVKKLNLYLIINYFKGGKLRFKKIKPEAFEANRFYTVINKKSGEIVPMEVNFNFDDPNLIILPLAFGKRQGREFIWNDLLSLETGSLKLANGRVIEKTLYNRRTRQDEPALFVALTFERREVLDSSNIKPMNLIGVDRGENIPAVIALTDPEGCPLSRFKDSLGNPTHILRIGESYKEKQRTIQAKKEVEQRRAGGYSRKYASKAKNLADDMVRNTARDLLYYAVTQDAMLIFENLSRGFGRQGKRTFMAERQYTRMEDWLTAKLAYEGLPSKTYLSKTLAQYTSKTCSNCGFTITSADYDRVLEKLKKTATGWMTTINGKELKVEGQITYYNRYKRQNVVKDLSVELDRLSEESVNNDISSWTKGRSGEALSLLKKRFSHRPVQEKFVCLNCGFETHADEQAALNIARSWLFLRSQEYKKYQTNKTTGNTDKRAFVETWQSFYRKKLKEVWKPAV

SEQ ID NO: 33224 - protein, 978 aa, synthetic construct
  REGION 1..978: note = engineered CasX variant
QEIKRINGIRRRLVKDSNTKKAGKTGPMKTLLVRVMTPDLRERLENLRKKPENIPQPISNTSRANLNKLLTDYTEMKKAILHVYWEEFQKDPVGLMSRVAQPASKKIDQNKLKPEMDEKGNLTTAGFACSQCGQPLFVYKLEQVSEKGKAYTNYFGRCNVAEHEKLILLAQLKPEKDSDEAVTYSLGKFGQRALDFYSIHVTKESTHPVKPLAQIAGNRYASHPVGKALSDACMGTIASFLSKYQDIIIEHQKVVKGNQKRLESLRELAGKENLEYPSVTLPPQPHTKEGLDAYNEVIARVRMWVNLNLWQKLKLSRDDAKPLLRLKGFPSFPLVERQANEVDWWDMVCNVKKLINEKKEDGKVFWQNLAGYKRQEALRPYLSSEEDRKKGKKFARYQLGDLLLHLEKKHGEDWGKVYDEAWERIDKKVEGLSKHIKLEEERRSEDAQSKAALTDWLRAKASFVIEGLKEADKDEFCRCELKLQKWYGDLRGKPFAIEAENSILDISGFSKQYNCAFIWQKDGVKKLNLYLIINYFKGGKLRFKKIKPEAFEANRFYTVINKKSGEIVPMEVNFNFDDPNLIILPLAFGKRQGREFIWNDLLSLETGSLKLANGRVIEKTLYNRRTRQDEPALFVALTFERREVLDSSNIKPMNLIGVDRGENIPAVIALTDPEGCPLSRFKDSLGNPTHILRIGESYKEKQRTIQAKKEVEQRRAGGYSRKYASKAKNLADDMVRNTARDLLYYAVTQDAMLIFENLSRGFGRQGKRTFMAERQYTRMEDWLTAKLAYEGLPSKTYLSKTLAQYTSKTCSNCGFTITSADYDRVLEKLKKTATGWMTTINGKELKVEGQITYYNRYKRQNVVKDLSVELDRLSEESVNNDISSWTKGRSGEALSLLKKRFSHRPVQEKFVCLNCGFETHADEQAALNIARSWLFLRSQEYKKYQTNKTTGNTDKRAFVETWQSFYRKKLKEVWKPAV

SEQ ID NO: 33225 - protein, 978 aa, synthetic construct
  REGION 1..978: note = engineered CasX variant
QEIKRINGIRRRLVKDSNTKKAGKTGPMKTLLVRVMTPDLRERLENLRKKPENIPQPISNTSRANLNKLLTDYTEMKKAILHVYWEEFQKDPVGLMSRVAQPASKKIDQNKLKPEMDEKGNLTTAGFACSQCGQPLFVYKLEQVSEKGKAYTNYFGRCNVAEHEKLILLAQLKPEKDSDEAVTYSLGKFGQRALDFYSIHVTKESTHPVKPLAQIAGNRYASSPVGKALSDACMGTIASFLSKYQDIIIEHQKVVKGNQKRLESLRELAGKENLEYPSVTLPPQPHTKEGLDAYNEVIARVRMWVNLNLWQKLKLSRDDAKPLLRLKGFPSFPLVERQANEVDWWDMVCNVKKLINEKKEDGKVFWQNLAGYKRQEALRPYLSSEEDRKKGKKFARYQLGDLLLHLEKKHGEDWGKVYDEAWERIDKKVEGLSKHIKLEEERRSEDAQSKAALTDWLRAKASFVIEGLKEADKDEFCRCELKLQKWYGDLRGKPFAIEAENSILDISGFSKQYNCAFIWQKDGVKKLNLYLIINYFKGGKLRFKKIKPEAFEANRFYTVINKKSGEIVPMEVNFNFDDPNLIILPLAFGKRQGREFIWNDLLSLETGSLKLANGRVIEKTLYNRRTRQDEPALFVALTFERREVLDSSNIKPMNLIGVDRGENIPAVIALTDPEGCPLSRFKDSLGNPTHILRIGESYKEKQRTIQAKKEVEQRRAGGYSRKYASKAKNLADDMVRNTARDLLYYAVTQDAMLIFENLSRGFGRQGKRTFMAERQYTRMEDWLTAKLAYEGLPSKTYLSKTLAQYTSKTCSNCGFTITSADYDRVLEKLKKTATGWMTTINGKELKVEGQITYYNRYKRQNVVKDLSVELDRLSEESVNNDISSWTKGRSGEALSLLKKRFSHRPVQEKFVCLNCGFETHADEQAALNIARSWLFLRSQEYKKYQTNKTTGNTDKRAFVETWQSFYRKKLKEVWKPAV

SEQ ID NO: 33226 - protein, 978 aa, synthetic construct
  REGION 1..978: note = engineered CasX variant
QEIKRINGIRRRLVKDSNTKKAGKTGPMKTLLVRVMTPDLRERLENLRKKPENIPQPISNTSRANLNKLLTDYTEMKKAILHVYWEEFQKDPVGLMSRVAQPASKKIDQNKLKPEMDEKGNLTTAGFACSQCGQPLFVYKLEQVSEKGKAYTNYFGRCNVAEHEKLILLAQLKPEKDSDEAVTYSLGKFGQRALDFYSIHVTKESTHPVKPLAQIAGNRYASTPVGKALSDACMGTIASFLSKYQDIIIEHQKVVKGNQKRLESLRELAGKENLEYPSVTLPPQPHTKEGLDAYNEVIARVRMWVNLNLWQKLKLSRDDAKPLLRLKGFPSFPLVERQANEVDWWDMVCNVKKLINEKKEDGKVFWQNLAGYKRQEALRPYLSSEEDRKKGKKFARYQLGDLLLHLEKKHGEDWGKVYDEAWERIDKKVEGLSKHIKLEEERRSEDAQSKAALTDWLRAKASFVIEGLKEADKDEFCRCELKLQKWYGDLRGKPFAIEAENSILDISGFSKQYNCAFIWQKDGVKKLNLYLIINYFKGGKLRFKKIKPEAFEANRFYTVINKKSGEIVPMEVNFNFDDPNLIILPLAFGKRQGREFIWNDLLSLETGSLKLANGRVIEKTLYNRRTRQDEPALFVALTFERREVLDSSNIKPMNLIGVDRGENIPAVIALTDPEGCPLSRFKDSLGNPTHILRIGESYKEKQRTIQAKKEVEQRRAGGYSRKYASKAKNLADDMVRNTARDLLYYAVTQDAMLIFENLSRGFGRQGKRTFMAERQYTRMEDWLTAKLAYEGLPSKTYLSKTLAQYTSKTCSNCGFTITSADYDRVLEKLKKTATGWMTTINGKELKVEGQITYYNRYKRQNVVKDLSVELDRLSEESVNNDISSWTKGRSGEALSLLKKRFSHRPVQEKFVCLNCGFETHADEQAALNIARSWLFLRSQEYKKYQTNKTTGNTDKRAFVETWQSFYRKKLKEVWKPAV

SEQ ID NO: 33227 - protein, 978 aa, synthetic construct
  REGION 1..978: note = engineered CasX variant
QEIKRINGIRRRLVKDSNTKKAGKTGPMKTLLVRVMTPDLRERLENLRKKPENIPQPISNTSRANLNKLLTDYTEMKKAILHVYWEEFQKDPVGLMSRVAQPASKKIDQNKLKPEMDEKGNLTTAGFACSQCGQPLFVYKLEQVSEKGKAYTNYFGRCNVAEHEKLILLAQLKPEKDSDEAVTYSLGKFGQRALDFYSIHVTKESTHPVKPLAQIAGNRYASAPVGKALSDACMGTIASFLSKYQDIIIEHQKVVKGNQKRLESLRELAGKENLEYPSVTLPPQPHTKEGLDAYNEVIARVRMWVNLNLWQKLKLSRDDAKPLLRLKGFPSFPLVERQANEVDWWDMVCNVKKLINEKKEDGKVFWQNLAGYKRQEALRPYLSSEEDRKKGKKFARYQLGDLLLHLEKKHGEDWGKVYDEAWERIDKKVEGLSKHIKLEEERRSEDAQSKAALTDWLRAKASFVIEGLKEADKDEFCRCELKLQKWYGDLRGKPFAIEAENSILDISGFSKQYNCAFIWQKDGVKKLNLYLIINYFKGGKLRFKKIKPEAFEANRFYTVINKKSGEIVPMEVNFNFDDPNLIILPLAFGKRQGREFIWNDLLSLETGSLKLANGRVIEKTLYNRRTRQDEPALFVALTFERREVLDSSNIKPMNLIGVDRGENIPAVIALTDPEGCPLSRFKDSLGNPTHILRIGESYKEKQRTIQAKKEVEQRRAGGYSRKYASKAKNLADDMVRNTARDLLYYAVTQDAMLIFENLSRGFGRQGKRTFMAERQYTRMEDWLTAKLAYEGLPSKTYLSKTLAQYTSKTCSNCGFTITSADYDRVLEKLKKTATGWMTTINGKELKVEGQITYYNRYKRQNVVKDLSVELDRLSEESVNNDISSWTKGRSGEALSLLKKRFSHRPVQEKFVCLNCGFETHADEQAALNIARSWLFLRSQEYKKYQTNKTTGNTDKRAFVETWQSFYRKKLKEVWKPAV

SEQ ID NO: 33228 - protein, 978 aa, synthetic construct
  REGION 1..978: note = engineered CasX variant
QEIKRINGIRRRLVKDSNTKKAGKTGPMKTLLVRVMTPDLRERLENLRKKPENIPQPISNTSRANLNKLLTDYTEMKKAILHVYWEEFQKDPVGLMSRVAQPASKKIDQNKLKPEMDEKGNLTTAGFACSQCGQPLFVYKLEQVSEKGKAYTNYFGRCNVAEHEKLILLAQLKPEKDSDEAVTYSLGKFGQRALDFYSIHVTKESTHPVKPLAQIAGNRYASVPVGKALSDACMGTIASFLSKYQDIIIEHQKVVKGNQKRLESLRELAGKENLEYPSVTLPPQPHTKEGLDAYNEVIARVRMWVNLNLWQKLKLSRDDAKPLLRLKGFPSFPLVERQANEVDWWDMVCNVKKLINEKKEDGKVFWQNLAGYKRQEALRPYLSSEEDRKKGKKFARYQLGDLLLHLEKKHGEDWGKVYDEAWERIDKKVEGLSKHIKLEEERRSEDAQSKAALTDWLRAKASFVIEGLKEADKDEFCRCELKLQKWYGDLRGKPFAIEAENSILDISGFSKQYNCAFIWQKDGVKKLNLYLIINYFKGGKLRFKKIKPEAFEANRFYTVINKKSGEIVPMEVNFNFDDPNLIILPLAFGKRQGREFIWNDLLSLETGSLKLANGRVIEKTLYNRRTRQDEPALFVALTFERREVLDSSNIKPMNLIGVDRGENIPAVIALTDPEGCPLSRFKDSLGNPTHILRIGESYKEKQRTIQAKKEVEQRRAGGYSRKYASKAKNLADDMVRNTARDLLYYAVTQDAMLIFENLSRGFGRQGKRTFMAERQYTRMEDWLTAKLAYEGLPSKTYLSKTLAQYTSKTCSNCGFTITSADYDRVLEKLKKTATGWMTTINGKELKVEGQITYYNRYKRQNVVKDLSVELDRLSEESVNNDISSWTKGRSGEALSLLKKRFSHRPVQEKFVCLNCGFETHADEQAALNIARSWLFLRSQEYKKYQTNKTTGNTDKRAFVETWQSFYRKKLKEVWKPAV

SEQ ID NO: 33229 - protein, 978 aa, synthetic construct
  REGION 1..978: note = engineered CasX variant
QEIKRINGIRRRLVKDSNTKKAGKTGPMKTLLVRVMTPDLRERLENLRKKPENIPQPISNTSRANLNKLLTDYTEMKKAILHVYWEEFQKDPVGLMSRVAQPASKKIDQNKLKPEMDEKGNLTTAGFACSQCGQPLFVYKLEQVSEKGKAYTNYFGRCNVAEHEKLIKLAQLKPEKDSDEAVTYSLGKFGQRALDFYSIHVTKESTHPVKPLAQIAGNRYASGPVGKALSDACMGTIASFLSKYQDIIIEHQKVVKGNQKRLESLRELAGKENLEYPSVTLPPQPHTKEGLDAYNEVIARVRMWVNLNLWQKLKLSRDDAKPLLRLKGFPSFPLVERQANEVDWWDMVCNVKKLINEKKEDGKVFWQNLAGYKRQEALRPYLSSEEDRKKGKKFARYQLGDLLLHLEKKHGEDWGKVYDEAWERIDKKVEGLSKHIKLEEERRSEDAQSKAALTDWLRAKASFVIEGLKEADKDEFCRCELKLQKWYGDLRGKPFAIEAENSILDISGFSKQYNCAFIWQKDGVKKLNLYLIINYFKGGKLRFKKIKPEAFEANRFYTVINKKSGEIVPMEVNFNFDDPNLIILPLAFGKRQGREFIWNDLLSLETGSLKLANGRVIEKTLYNRRTRQDEPALFVALTFERREVLDSSNIKPMNLIGVDRGENIPAVIALTDPEGCPLSRFKDSLGNPTHILRIGESYKEKQRTIQAKKEVEQRRAGGYSRKYASKAKNLADDMVRNTARDLLYYAVTQDAMLIFENLSRGFGRQGKRTFMAERQYTRMEDWLTAKLAYEGLPSKTYLSKTLAQYTSKTCSNCGFTITSADYDRVLEKLKKTATGWMTTINGKELKVEGQITYYNRYKRQNVVKDLSVELDRLSEESVNNDISSWTKGRSGEALSLLKKRFSHRPVQEKFVCLNCGFETHADEQAALNIARSWLFLRSQEYKKYQTNKTTGNTDKRAFVETWQSFYRKKLKEVWKPAV

SEQ ID NO: 33230 - protein, 977 aa, synthetic construct
  REGION 1..977: note = engineered CasX variant
QEIKRINGIRRRLVKDSNTKKAGKTGPMKTLLVRVMTPDLRERLENLRKKPENIPQPISNTSRANLNKLLTDYTEMKKAILHVYWEEFQKDPVGLMSRVAQPASKKIDQNKLKPEMDEKGNLTTAGFACSQCGQPLFVYKLEQVSEKGKAYTNYFGRCNVAEHEKLILLAQLKPEKDSDEAVTYSLGKFGQRALDFYSIHVTKESTHPVKPLAQIAGNRYASPVGKALSDACMGTIASFLSKYQDIIIEHQKVVKGNQKRLESLRELAGKENLEYPSVTLPPQPHTKEGLDAYNEVIARVRMWVNLNLWQKLKLSRDDAKPLLRLKGFPSFPLVERQANEVDWWDMVCNVKKLINEKKEDGKVFWQNLAGYKRQEALRPYLSSEEDRKKGKKFARYQLGDLLLHLEKKHGEDWGKVYDEAWERIDKKVEGLSKHIKLEEERRSEDAQSKAALTDWLRAKASFVIEGLKEADKDEFCRCELKLQKWYGDLRGKPFAIEAENSILDISGFSKQYNCAFIWQKDGVKKLNLYLIINYFKGGKLRFKKIKPEAFEANRFYTVINKKSGEIVPMEVNFNFDDPNLIILPLAFGKRQGREFIWNDLLSLETGSLKLANGRVIEKTLYNRRTRQDEPALFVALTFERREVLDSSNIKPMNLIGVDRGENIPAVIALTDPEGCPLSRFKDSLGNPTHILRIGESYKEKQRTIQAKKEVEQRRAGGYSRKYASKAKNLADDMVRNTARDLLYYAVTQDAMLIFENLSRGFGRQGKRTFMAERQYTRMEDWLTAKLAYEGLPSKTYLSKTLAQYTSKTCSNCGFTITSADYDRVLEKLKKTATGWMTTINGKELKVEGQITYYNRYKRQNVVKDLSVELDRLSEESVNNDISSWTKGRSGEALSLLKKRFSHRPVQEKFVCLNCGFETHADEQAALNIARSWLFLRSQEYKKYQTNKTTGNTDKRAFVETWQSFYRKKLKEVWKPAV

SEQ ID NO: 33231 - protein, 978 aa, synthetic construct
  REGION 1..978: note = engineered CasX variant
QEIKRINGIRRRLVKDSNTKKAGKTGPMKTLLVRVMTPDLRERLENLRKKPENIPQPISNTSRANLNKLLTDYTEMKKAILHVYWEEFQKDPVGLMSRVAQPASKKIDQNKLKPEMDEKGNLTTAGFACSQCGQPLFVYKLEQVSEKGKAYTNYFGRCNVAEHEKLILLAQLKPEKDSDEAVTYSLGKFGQRALDFYSIHVTKESTHPVKPLAQIAGNRYASYPVGKALSDACMGTIASFLSKYQDIIIEHQKVVKGNQKRLESLRELAGKENLEYPSVTLPPQPHTKEGVDAYNEVIARVRTWVNLNLWQKLKLSRDDAKPLLRLKGFPSFPLVERQANEVDWWDMVCNVKKLINEKKEDGKVFWQNLAGYKRQEALRPYLSSEEDRKKGKKFARYQLGDLLLHLEKKHGEDWGKVYDEAWERIDKKVEGLSKHIKLEEERRSEDAQSKAALTDWLRAKASFVIEGLKEADKDEFCRCELKLQKWYGDLRGKPFAIEAENSILDISGFSKQYNCAFIWQKDGVKKLNLYLIINYFKGGKLRFKKIKPEAFEANRFYTVINKKSGEIVPMEVNFNFDDPNLIILPLAFGKRQGREFIWNDLLSLETGSLKLANGRVIEKTLYNRRTRQDEPALFVALTFERREVLDSSNIKPMNLIGVDRGENIPAVIALTDPEGCPLSRFKDSLGNPTHILRIGESYKEKQRTIQAKKEVEQRRAGGYSRKYASKAKNLADDMVRNTARDLLYYAVTQDAMLIFENLSRGFGRQGKRTFMAERQYTRMEDWLTAKLAYEGLPSKTYLSKTLAQYTSKTCSNCGFTITSADYDRVLEKLKKTATGWMTTINGKELKVEGQITYYNRYKRQNVVKDLSVELDRLSEESVNNDISSWTKGRSGEALSLLKKRFSHRPVQEKFVCLNCGFETHADEQAALNIARSWLFLRSQEYKKYQTNKTTGNTDKRAFVETWQSFYRKKLKEVWKPAV

SEQ ID NO: 33232 - protein, 978 aa, synthetic construct
  REGION 1..978: note = engineered CasX variant
QEIKRINGIRRRLVKDSNTKKAGKTGPMKTLLVRVMTPDLRERLENLRKKPENIPQPISNTSRANLNKLLTDYTEMKKAILHVYWEEFQKDPVGLMSRVAQPASKKIDQNKLKPEMDEKGNLTTAGFACSQCGQPLFVYKLEQVSEKGKAYTNYFGRCNVAEHEKLILLAQLKPEKDSDEAVTYSLGKFGQRALDFYSIHVTKESTHPVKPLAQIAGNRYASHPVGKALSDACMGTIASFLSKYQDIIIEHQKVVKGNQKRLESLRELAGKENLEYPSVTLPPQPHTKEGVDAYNEVIARVRTWVNLNLWQKLKLSRDDAKPLLRLKGFPSFPLVERQANEVDWWDMVCNVKKLINEKKEDGKVFWQNLAGYKRQEALRPYLSSEEDRKKGKKFARYQLGDLLLHLEKKHGEDWGKVYDEAWERIDKKVEGLSKHIKLEEERRSEDAQSKAALTDWLRAKASFVIEGLKEADKDEFCRCELKLQKWYGDLRGKPFAIEAENSILDISGFSKQYNCAFIWQKDGVKKLNLYLIINYFKGGKLRFKKIKPEAFEANRFYTVINKKSGEIVPMEVNFNFDDPNLIILPLAFGKRQGREFIWNDLLSLETGSLKLANGRVIEKTLYNRRTRQDEPALFVALTFERREVLDSSNIKPMNLIGVDRGENIPAVIALTDPEGCPLSRFKDSLGNPTHILRIGESYKEKQRTIQAKKEVEQRRAGGYSRKYASKAKNLADDMVRNTARDLLYYAVTQDAMLIFENLSRGFGRQGKRTFMAERQYTRMEDWLTAKLAYEGLPSKTYLSKTLAQYTSKTCSNCGFTITSADYDRVLEKLKKTATGWMTTINGKELKVEGQITYYNRYKRQNVVKDLSVELDRLSEESVNNDISSWTKGRSGEALSLLKKRFSHRPVQEKFVCLNCGFETHADEQAALNIARSWLFLRSQEYKKYQTNKTTGNTDKRAFVETWQSFYRKKLKEVWKPAV

SEQ ID NO: 33233 - protein, 978 aa, synthetic construct
  REGION 1..978: note = engineered CasX variant
QEIKRINGIRRRLVKDSNTKKAGKTGPMKTLLVRVMTPDLRERLENLRKKPENIPQPISNTSRANLNKLLTDYTEMKKAILHVYWEEFQKDPVGLMSRVAQPASKKIDQNKLKPEMDEKGNLTTAGFACSQCGQPLFVYKLEQVSEKGKAYTNYFGRCNVAEHEKLILLAQLKPEKDSDEAVTYSLGKFGQRALDFYSIHVTKESTHPVKPLAQIAGNRYASSPVGKALSDACMGTIASFLSKYQDIIIEHQKVVKGNQKRLESLRELAGKENLEYPSVTLPPQPHTKEGVDAYNEVIARVRTWVNLNLWQKLKLSRDDAKPLLRLKGFPSFPLVERQANEVDWWDMVCNVKKLINEKKEDGKVFWQNLAGYKRQEALRPYLSSEEDRKKGKKFARYQLGDLLLHLEKKHGEDWGKVYDEAWERIDKKVEGLSKHIKLEEERRSEDAQSKAALTDWLRAKASFVIEGLKEADKDEFCRCELKLQKWYGDLRGKPFAIEAENSILDISGFSKQYNCAFIWQKDGVKKLNLYLIINYFKGGKLRFKKIKPEAFEANRFYTVINKKSGEIVPMEVNFNFDDPNLIILPLAFGKRQGREFIWNDLLSLETGSLKLANGRVIEKTLYNRRTRQDEPALFVALTFERREVLDSSNIKPMNLIGVDRGENIPAVIALTDPEGCPLSRFKDSLGNPTHILRIGESYKEKQRTIQAKKEVEQRRAGGYSRKYASKAKNLADDMVRNTARDLLYYAVTQDAMLIFENLSRGFGRQGKRTFMAERQYTRMEDWLTAKLAYEGLPSKTYLSKTLAQYTSKTCSNCGFTITSADYDRVLEKLKKTATGWMTTINGKELKVEGQITYYNRYKRQNVVKDLSVELDRLSEESVNNDISSWTKGRSGEALSLLKKRFSHRPVQEKFVCLNCGFETHADEQAALNIARSWLFLRSQEYKKYQTNKTTGNTDKRAFVETWQSFYRKKLKEVWKPAV

SEQ ID NO: 33234 - protein, 978 aa, synthetic construct
  REGION 1..978: note = engineered CasX variant
QEIKRINGIRRRLVKDSNTKKAGKTGPMKTLLVRVMTPDLRERLENLRKKPENIPQPISNTSRANLNKLLTDYTEMKKAILHVYWEEFQKDPVGLMSRVAQPASKKIDQNKLKPEMDEKGNLTTAGFACSQCGQPLFVYKLEQVSEKGKAYTNYFGRCNVAEHEKLILLAQLKPEKDSDEAVTYSLGKFGQRALDFYSIHVTKESTHPVKPLAQIAGNRYASTPVGKALSDACMGTIASFLSKYQDIIIEHQKVVKGNQKRLESLRELAGKENLEYPSVTLPPQPHTKEGVDAYNEVIARVRTWVNLNLWQKLKLSRDDAKPLLRLKGFPSFPLVERQANEVDWWDMVCNVKKLINEKKEDGKVFWQNLAGYKRQEALRPYLSSEEDRKKGKKFARYQLGDLLLHLEKKHGEDWGKVYDEAWERIDKKVEGLSKHIKLEEERRSEDAQSKAALTDWLRAKASFVIEGLKEADKDEFCRCELKLQKWYGDLRGKPFAIEAENSILDISGFSKQYNCAFIWQKDGVKKLNLYLIINYFKGGKLRFKKIKPEAFEANRFYTVINKKSGEIVPMEVNFNFDDPNLIILPLAFGKRQGREFIWNDLLSLETGSLKLANGRVIEKTLYNRRTRQDEPALFVALTFERREVLDSSNIKPMNLIGVDRGENIPAVIALTDPEGCPLSRFKDSLGNPTHILRIGESYKEKQRTIQAKKEVEQRRAGGYSRKYASKAKNLADDMVRNTARDLLYYAVTQDAMLIFENLSRGFGRQGKRTFMAERQYTRMEDWLTAKLAYEGLPSKTYLSKTLAQYTSKTCSNCGFTITSADYDRVLEKLKKTATGWMTTINGKELKVEGQITYYNRYKRQNVVKDLSVELDRLSEESVNNDISSWTKGRSGEALSLLKKRFSHRPVQEKFVCLNCGFETHADEQAALNIARSWLFLRSQEYKKYQTNKTTGNTDKRAFVETWQSFYRKKLKEVWKPAV

SEQ ID NO: 33235 - protein, 978 aa, synthetic construct
  REGION 1..978: note = engineered CasX variant
QEIKRINGIRRRLVKDSNTKKAGKTGPMKTLLVRVMTPDLRERLENLRKKPENIPQPISNTSRANLNKLLTDYTEMKKAILHVYWEEFQKDPVGLMSRVAQPASKKIDQNKLKPEMDEKGNLTTAGFACSQCGQPLFVYKLEQVSEKGKAYTNYFGRCNVAEHEKLILLAQLKPEKDSDEAVTYSLGKFGQRALDFYSIHVTKESTHPVKPLAQIAGNRYASAPVGKALSDACMGTIASFLSKYQDIIIEHQKVVKGNQKRLESLRELAGKENLEYPSVTLPPQPHTKEGVDAYNEVIARVRTWVNLNLWQKLKLSRDDAKPLLRLKGFPSFPLVERQANEVDWWDMVCNVKKLINEKKEDGKVFWQNLAGYKRQEALRPYLSSEEDRKKGKKFARYQLGDLLLHLEKKHGEDWGKVYDEAWERIDKKVEGLSKHIKLEEERRSEDAQSKAALTDWLRAKASFVIEGLKEADKDEFCRCELKLQKWYGDLRGKPFAIEAENSILDISGFSKQYNCAFIWQKDGVKKLNLYLIINYFKGGKLRFKKIKPEAFEANRFYTVINKKSGEIVPMEVNFNFDDPNLIILPLAFGKRQGREFIWNDLLSLETGSLKLANGRVIEKTLYNRRTRQDEPALFVALTFERREVLDSSNIKPMNLIGVDRGENIPAVIALTDPEGCPLSRFKDSLGNPTHILRIGESYKEKQRTIQAKKEVEQRRAGGYSRKYASKAKNLADDMVRNTARDLLYYAVTQDAMLIFENLSRGFGRQGKRTFMAERQYTRMEDWLTAKLAYEGLPSKTYLSKTLAQYTSKTCSNCGFTITSADYDRVLEKLKKTATGWMTTINGKELKVEGQITYYNRYKRQNVVKDLSVELDRLSEESVNNDISSWTKGRSGEALSLLKKRFSHRPVQEKFVCLNCGFETHADEQAALNIARSWLFLRSQEYKKYQTNKTTGNTDKRAFVETWQSFYRKKLKEVWKPAV

SEQ ID NO: 33236 - protein, 978 aa, synthetic construct
  REGION 1..978: note = engineered CasX variant
QEIKRINGIRRRLVKDSNTKKAGKTGPMKTLLVRVMTPDLRERLENLRKKPENIPQPISNTSRANLNKLLTDYTEMKKAILHVYWEEFQKDPVGLMSRVAQPASKKIDQNKLKPEMDEKGNLTTAGFACSQCGQPLFVYKLEQVSEKGKAYTNYFGRCNVAEHEKLILLAQLKPEKDSDEAVTYSLGKFGQRALDFYSIHVTKESTHPVKPLAQIAGNRYASVPVGKALSDACMGTIASFLSKYQDIIIEHQKVVKGNQKRLESLRELAGKENLEYPSVTLPPQPHTKEGVDAYNEVIARVRTWVNLNLWQKLKLSRDDAKPLLRLKGFPSFPLVERQANEVDWWDMVCNVKKLINEKKEDGKVFWQNLAGYKRQEALRPYLSSEEDRKKGKKFARYQLGDLLLHLEKKHGEDWGKVYDEAWERIDKKVEGLSKHIKLEEERRSEDAQSKAALTDWLRAKASFVIEGLKEADKDEFCRCELKLQKWYGDLRGKPFAIEAENSILDISGFSKQYNCAFIWQKDGVKKLNLYLIINYFKGGKLRFKKIKPEAFEANRFYTVINKKSGEIVPMEVNFNFDDPNLIILPLAFGKRQGREFIWNDLLSLETGSLKLANGRVIEKTLYNRRTRQDEPALFVALTFERREVLDSSNIKPMNLIGVDRGENIPAVIALTDPEGCPLSRFKDSLGNPTHILRIGESYKEKQRTIQAKKEVEQRRAGGYSRKYASKAKNLADDMVRNTARDLLYYAVTQDAMLIFENLSRGFGRQGKRTFMAERQYTRMEDWLTAKLAYEGLPSKTYLSKTLAQYTSKTCSNCGFTITSADYDRVLEKLKKTATGWMTTINGKELKVEGQITYYNRYKRQNVVKDLSVELDRLSEESVNNDISSWTKGRSGEALSLLKKRFSHRPVQEKFVCLNCGFETHADEQAALNIARSWLFLRSQEYKKYQTNKTTGNTDKRAFVETWQSFYRKKLKEVWKPAV

SEQ ID NO: 33237 - protein, 978 aa, synthetic construct
  REGION 1..978: note = engineered CasX variant
QEIKRINGIRRRLVKDSNTKKAGKTGPMKTLLVRVMTPDLRERLENLRKKPENIPQPISNTSRANLNKLLTDYTEMKKAILHVYWEEFQKDPVGLMSRVAQPASKKIDQNKLKPEMDEKGNLTTAGFACSQCGQPLFVYKLEQVSEKGKAYTNYFGRCNVAEHEKLIKLAQLKPEKDSDEAVTYSLGKFGQRALDFYSIHVTKESTHPVKPLAQIAGNRYASGPVGKALSDACMGTIASFLSKYQDIIIEHQKVVKGNQKRLESLRELAGKENLEYPSVTLPPQPHTKEGVDAYNEVIARVRTWVNLNLWQKLKLSRDDAKPLLRLKGFPSFPLVERQANEVDWWDMVCNVKKLINEKKEDGKVFWQNLAGYKRQEALRPYLSSEEDRKKGKKFARYQLGDLLLHLEKKHGEDWGKVYDEAWERIDKKVEGLSKHIKLEEERRSEDAQSKAALTDWLRAKASFVIEGLKEADKDEFCRCELKLQKWYGDLRGKPFAIEAENSILDISGFSKQYNCAFIWQKDGVKKLNLYLIINYFKGGKLRFKKIKPEAFEANRFYTVINKKSGEIVPMEVNFNFDDPNLIILPLAFGKRQGREFIWNDLLSLETGSLKLANGRVIEKTLYNRRTRQDEPALFVALTFERREVLDSSNIKPMNLIGVDRGENIPAVIALTDPEGCPLSRFKDSLGNPTHILRIGESYKEKQRTIQAKKEVEQRRAGGYSRKYASKAKNLADDMVRNTARDLLYYAVTQDAMLIFENLSRGFGRQGKRTFMAERQYTRMEDWLTAKLAYEGLPSKTYLSKTLAQYTSKTCSNCGFTITSADYDRVLEKLKKTATGWMTTINGKELKVEGQITYYNRYKRQNVVKDLSVELDRLSEESVNNDISSWTKGRSGEALSLLKKRFSHRPVQEKFVCLNCGFETHADEQAALNIARSWLFLRSQEYKKYQTNKTTGNTDKRAFVETWQSFYRKKLKEVWKPAV

SEQ ID NO: 33238 - protein, 977 aa, synthetic construct
  REGION 1..977: note = engineered CasX variant
QEIKRINGIRRRLVKDSNTKKAGKTGPMKTLLVRVMTPDLRERLENLRKKPENIPQPISNTSRANLNKLLTDYTEMKKAILHVYWEEFQKDPVGLMSRVAQPASKKIDQNKLKPEMDEKGNLTTAGFACSQCGQPLFVYKLEQVSEKGKAYTNYFGRCNVAEHEKLILLAQLKPEKDSDEAVTYSLGKFGQRALDFYSIHVTKESTHPVKPLAQIAGNRYASPVGKALSDACMGTIASFLSKYQDIIIEHQKVVKGNQKRLESLRELAGKENLEYPSVTLPPQPHTKEGVDAYNEVIARVRTWVNLNLWQKLKLSRDDAKPLLRLKGFPSFPLVERQANEVDWWDMVCNVKKLINEKKEDGKVFWQNLAGYKRQEALRPYLSSEEDRKKGKKFARYQLGDLLLHLEKKHGEDWGKVYDEAWERIDKKVEGLSKHIKLEEERRSEDAQSKAALTDWLRAKASFVIEGLKEADKDEFCRCELKLQKWYGDLRGKPFAIEAENSILDISGFSKQYNCAFIWQKDGVKKLNLYLIINYFKGGKLRFKKIKPEAFEANRFYTVINKKSGEIVPMEVNFNFDDPNLIILPLAFGKRQGREFIWNDLLSLETGSLKLANGRVIEKTLYNRRTRQDEPALFVALTFERREVLDSSNIKPMNLIGVDRGENIPAVIALTDPEGCPLSRFKDSLGNPTHILRIGESYKEKQRTIQAKKEVEQRRAGGYSRKYASKAKNLADDMVRNTARDLLYYAVTQDAMLIFENLSRGFGRQGKRTFMAERQYTRMEDWLTAKLAYEGLPSKTYLSKTLAQYTSKTCSNCGFTITSADYDRVLEKLKKTATGWMTTINGKELKVEGQITYYNRYKRQNVVKDLSVELDRLSEESVNNDISSWTKGRSGEALSLLKKRFSHRPVQEKFVCLNCGFETHADEQAALNIARSWLFLRSQEYKKYQTNKTTGNTDKRAFVETWQSFYRKKLKEVWKPAV

SEQ ID NO: 33239 - protein, 978 aa, synthetic construct
  REGION 1..978: note = engineered CasX variant
QEIKRINGIRRRLVKDSNTKKAGKTGPMKTLLVRVMTPDLRERLENLRKKPENIPQPISNTSRANLNKLLTDYTEMKKAILHVYWEEFQKDPVGLMSRVAQPASKKIDQNKLKPEMDEKGNLTTAGFACSQCGQPLFVYKLEQVSEKGKAYTNYFGRCNVAEHEKLILLAQLKPEKDSDEAVTYSLGKFGQRALDFYSIHVTKESTHPVKPLAQIAGNRYASYPVGKALSDACMGTIASFLSKYQDIIIEHQKVVKGNQKRLESLRELAGKENLEYPSVTLPPQPHTKEGVDAYNEVIARVRWWVNLNLWQKLKLSRDDAKPLLRLKGFPSFPLVERQANEVDWWDMVCNVKKLINEKKEDGKVFWQNLAGYKRQEALRPYLSSEEDRKKGKKFARYQLGDLLLHLEKKHGEDWGKVYDEAWERIDKKVEGLSKHIKLEEERRSEDAQSKAALTDWLRAKASFVIEGLKEADKDEFCRCELKLQKWYGDLRGKPFAIEAENSILDISGFSKQYNCAFIWQKDGVKKLNLYLIINYFKGGKLRFKKIKPEAFEANRFYTVINKKSGEIVPMEVNFNFDDPNLIILPLAFGKRQGREFIWNDLLSLETGSLKLANGRVIEKTLYNRRTRQDEPALFVALTFERREVLDSSNIKPMNLIGVDRGENIPAVIALTDPEGCPLSRFKDSLGNPTHILRIGESYKEKQRTIQAKKEVEQRRAGGYSRKYASKAKNLADDMVRNTARDLLYYAVTQDAMLIFENLSRGFGRQGKRTFMAERQYTRMEDWLTAKLAYEGLPSKTYLSKTLAQYTSKTCSNCGFTITSADYDRVLEKLKKTATGWMTTINGKELKVEGQITYYNRYKRQNVVKDLSVELDRLSEESVNNDISSWTKGRSGEALSLLKKRFSHRPVQEKFVCLNCGFETHADEQAALNIARSWLFLRSQEYKKYQTNKTTGNTDKRAFVETWQSFYRKKLKEVWKPAV

SEQ ID NO: 33240 - protein, 978 aa, synthetic construct
  REGION 1..978: note = engineered CasX variant
QEIKRINGIRRRLVKDSNTKKAGKTGPMKTLLVRVMTPDLRERLENLRKKPENIPQPISNTSRANLNKLLTDYTEMKKAILHVYWEEFQKDPVGLMSRVAQPASKKIDQNKLKPEMDEKGNLTTAGFACSQCGQPLFVYKLEQVSEKGKAYTNYFGRCNVAEHEKLILLAQLKPEKDSDEAVTYSLGKFGQRALDFYSIHVTKESTHPVKPLAQIAGNRYASHPVGKALSDACMGTIASFLSKYQDIIIEHQKVVKGNQKRLESLRELAGKENLEYPSVTLPPQPHTKEGVDAYNEVIARVRWWVNLNLWQKLKLSRDDAKPLLRLKGFPSFPLVERQANEVDWWDMVCNVKKLINEKKEDGKVFWQNLAGYKRQEALRPYLSSEEDRKKGKKFARYQLGDLLLHLEKKHGEDWGKVYDEAWERIDKKVEGLSKHIKLEEERRSEDAQSKAALTDWLRAKASFVIEGLKEADKDEFCRCELKLQKWYGDLRGKPFAIEAENSILDISGFSKQYNCAFIWQKDGVKKLNLYLIINYFKGGKLRFKKIKPEAFEANRFYTVINKKSGEIVPMEVNFNFDDPNLIILPLAFGKRQGREFIWNDLLSLETGSLKLANGRVIEKTLYNRRTRQDEPALFVALTFERREVLDSSNIKPMNLIGVDRGENIPAVIALTDPEGCPLSRFKDSLGNPTHILRIGESYKEKQRTIQAKKEVEQRRAGGYSRKYASKAKNLADDMVRNTARDLLYYAVTQDAMLIFENLSRGFGRQGKRTFMAERQYTRMEDWLTAKLAYEGLPSKTYLSKTLAQYTSKTCSNCGFTITSADYDRVLEKLKKTATGWMTTINGKELKVEGQITYYNRYKRQNVVKDLSVELDRLSEESVNNDISSWTKGRSGEALSLLKKRFSHRPVQEKFVCLNCGFETHADEQAALNIARSWLFLRSQEYKKYQTNKTTGNTDKRAFVETWQSFYRKKLKEVWKPAV

SEQ ID NO: 33241 - protein, 978 aa, synthetic construct
  REGION 1..978: note = engineered CasX variant
QEIKRINGIRRRLVKDSNTKKAGKTGPMKTLLVRVMTPDLRERLENLRKKPENIPQPISNTSRANLNKLLTDYTEMKKAILHVYWEEFQKDPVGLMSRVAQPASKKIDQNKLKPEMDEKGNLTTAGFACSQCGQPLFVYKLEQVSEKGKAYTNYFGRCNVAEHEKLILLAQLKPEKDSDEAVTYSLGKFGQRALDFYSIHVTKESTHPVKPLAQIAGNRYASSPVGKALSDACMGTIASFLSKYQDIIIEHQKVVKGNQKRLESLRELAGKENLEYPSVTLPPQPHTKEGVDAYNEVIARVRWWVNLNLWQKLKLSRDDAKPLLRLKGFPSFPLVERQANEVDWWDMVCNVKKLINEKKEDGKVFWQNLAGYKRQEALRPYLSSEEDRKKGKKFARYQLGDLLLHLEKKHGEDWGKVYDEAWERIDKKVEGLSKHIKLEEERRSEDAQSKAALTDWLRAKASFVIEGLKEADKDEFCRCELKLQKWYGDLRGKPFAIEAENSILDISGFSKQYNCAFIWQKDGVKKLNLYLIINYFKGGKLRFKKIKPEAFEANRFYTVINKKSGEIVPMEVNFNFDDPNLIILPLAFGKRQGREFIWNDLLSLETGSLKLANGRVIEKTLYNRRTRQDEPALFVALTFERREVLDSSNIKPMNLIGVDRGENIPAVIALTDPEGCPLSRFKDSLGNPTHILRIGESYKEKQRTIQAKKEVEQRRAGGYSRKYASKAKNLADDMVRNTARDLLYYAVTQDAMLIFENLSRGFGRQGKRTFMAERQYTRMEDWLTAKLAYEGLPSKTYLSKTLAQYTSKTCSNCGFTITSADYDRVLEKLKKTATGWMTTINGKELKVEGQITYYNRYKRQNVVKDLSVELDRLSEESVNNDISSWTKGRSGEALSLLKKRFSHRPVQEKFVCLNCGFETHADEQAALNIARSWLFLRSQEYKKYQTNKTTGNTDKRAFVETWQSFYRKKLKEVWKPAV

SEQ ID NO: 33242 - protein, 978 aa, synthetic construct
  REGION 1..978: note = engineered CasX variant
QEIKRINGIRRRLVKDSNTKKAGKTGPMKTLLVRVMTPDLRERLENLRKKPENIPQPISNTSRANLNKLLTDYTEMKKAILHVYWEEFQKDPVGLMSRVAQPASKKIDQNKLKPEMDEKGNLTTAGFACSQCGQPLFVYKLEQVSEKGKAYTNYFGRCNVAEHEKLILLAQLKPEKDSDEAVTYSLGKFGQRALDFYSIHVTKESTHPVKPLAQIAGNRYASTPVGKALSDACMGTIASFLSKYQDIIIEHQKVVKGNQKRLESLRELAGKENLEYPSVTLPPQPHTKEGVDAYNEVIARVRWWVNLNLWQKLKLSRDDAKPLLRLKGFPSFPLVERQANEVDWWDMVCNVKKLINEKKEDGKVFWQNLAGYKRQEALRPYLSSEEDRKKGKKFARYQLGDLLLHLEKKHGEDWGKVYDEAWERIDKKVEGLSKHIKLEEERRSEDAQSKAALTDWLRAKASFVIEGLKEADKDEFCRCELKLQKWYGDLRGKPFAIEAENSILDISGFSKQYNCAFIWQKDGVKKLNLYLIINYFKGGKLRFKKIKPEAFEANRFYTVINKKSGEIVPMEVNFNFDDPNLIILPLAFGKRQGREFIWNDLLSLETGSLKLANGRVIEKTLYNRRTRQDEPALFVALTFERREVLDSSNIKPMNLIGVDRGENIPAVIALTDPEGCPLSRFKDSLGNPTHILRIGESYKEKQRTIQAKKEVEQRRAGGYSRKYASKAKNLADDMVRNTARDLLYYAVTQDAMLIFENLSRGFGRQGKRTFMAERQYTRMEDWLTAKLAYEGLPSKTYLSKTLAQYTSKTCSNCGFTITSADYDRVLEKLKKTATGWMTTINGKELKVEGQITYYNRYKRQNVVKDLSVELDRLSEESVNNDISSWTKGRSGEALSLLKKRFSHRPVQEKFVCLNCGFETHADEQAALNIARSWLFLRSQEYKKYQTNKTTGNTDKRAFVETWQSFYRKKLKEVWKPAV

SEQ ID NO: 33243 - protein, 978 aa, synthetic construct
  REGION 1..978: note = engineered CasX variant
QEIKRINGIRRRLVKDSNTKKAGKTGPMKTLLVRVMTPDLRERLENLRKKPENIPQPISNTSRANLNKLLTDYTEMKKAILHVYWEEFQKDPVGLMSRVAQPASKKIDQNKLKPEMDEKGNLTTAGFACSQCGQPLFVYKLEQVSEKGKAYTNYFGRCNVAEHEKLILLAQLKPEKDSDEAVTYSLGKFGQRALDFYSIHVTKESTHPVKPLAQIAGNRYASAPVGKALSDACMGTIASFLSKYQDIIIEHQKVVKGNQKRLESLRELAGKENLEYPSVTLPPQPHTKEGVDAYNEVIARVRWWVNLNLWQKLKLSRDDAKPLLRLKGFPSFPLVERQANEVDWWDMVCNVKKLINEKKEDGKVFWQNLAGYKRQEALRPYLSSEEDRKKGKKFARYQLGDLLLHLEKKHGEDWGKVYDEAWERIDKKVEGLSKHIKLEEERRSEDAQSKAALTDWLRAKASFVIEGLKEADKDEFCRCELKLQKWYGDLRGKPFAIEAENSILDISGFSKQYNCAFIWQKDGVKKLNLYLIINYFKGGKLRFKKIKPEAFEANRFYTVINKKSGEIVPMEVNFNFDDPNLIILPLAFGKRQGREFIWNDLLSLETGSLKLANGRVIEKTLYNRRTRQDEPALFVALTFERREVLDSSNIKPMNLIGVDRGENIPAVIALTDPEGCPLSRFKDSLGNPTHILRIGESYKEKQRTIQAKKEVEQRRAGGYSRKYASKAKNLADDMVRNTARDLLYYAVTQDAMLIFENLSRGFGRQGKRTFMAERQYTRMEDWLTAKLAYEGLPSKTYLSKTLAQYTSKTCSNCGFTITSADYDRVLEKLKKTATGWMTTINGKELKVEGQITYYNRYKRQNVVKDLSVELDRLSEESVNNDISSWTKGRSGEALSLLKKRFSHRPVQEKFVCLNCGFETHADEQAALNIARSWLFLRSQEYKKYQTNKTTGNTDKRAFVETWQSFYRKKLKEVWKPAV

SEQ ID NO: 33244 - protein, 978 aa, synthetic construct
  REGION 1..978: note = engineered CasX variant
QEIKRINGIRRRLVKDSNTKKAGKTGPMKTLLVRVMTPDLRERLENLRKKPENIPQPISNTSRANLNKLLTDYTEMKKAILHVYWEEFQKDPVGLMSRVAQPASKKIDQNKLKPEMDEKGNLTTAGFACSQCGQPLFVYKLEQVSEKGKAYTNYFGRCNVAEHEKLILLAQLKPEKDSDEAVTYSLGKFGQRALDFYSIHVTKESTHPVKPLAQIAGNRYASVPVGKALSDACMGTIASFLSKYQDIIIEHQKVVKGNQKRLESLRELAGKENLEYPSVTLPPQPHTKEGVDAYNEVIARVRWWVNLNLWQKLKLSRDDAKPLLRLKGFPSFPLVERQANEVDWWDMVCNVKKLINEKKEDGKVFWQNLAGYKRQEALRPYLSSEEDRKKGKKFARYQLGDLLLHLEKKHGEDWGKVYDEAWERIDKKVEGLSKHIKLEEERRSEDAQSKAALTDWLRAKASFVIEGLKEADKDEFCRCELKLQKWYGDLRGKPFAIEAENSILDISGFSKQYNCAFIWQKDGVKKLNLYLIINYFKGGKLRFKKIKPEAFEANRFYTVINKKSGEIVPMEVNFNFDDPNLIILPLAFGKRQGREFIWNDLLSLETGSLKLANGRVIEKTLYNRRTRQDEPALFVALTFERREVLDSSNIKPMNLIGVDRGENIPAVIALTDPEGCPLSRFKDSLGNPTHILRIGESYKEKQRTIQAKKEVEQRRAGGYSRKYASKAKNLADDMVRNTARDLLYYAVTQDAMLIFENLSRGFGRQGKRTFMAERQYTRMEDWLTAKLAYEGLPSKTYLSKTLAQYTSKTCSNCGFTITSADYDRVLEKLKKTATGWMTTINGKELKVEGQITYYNRYKRQNVVKDLSVELDRLSEESVNNDISSWTKGRSGEALSLLKKRFSHRPVQEKFVCLNCGFETHADEQAALNIARSWLFLRSQEYKKYQTNKTTGNTDKRAFVETWQSFYRKKLKEVWKPAV

SEQ ID NO: 33245 - protein, 978 aa, synthetic construct
  REGION 1..978: note = engineered CasX variant
QEIKRINGIRRRLVKDSNTKKAGKTGPMKTLLVRVMTPDLRERLENLRKKPENIPQPISNTSRANLNKLLTDYTEMKKAILHVYWEEFQKDPVGLMSRVAQPASKKIDQNKLKPEMDEKGNLTTAGFACSQCGQPLFVYKLEQVSEKGKAYTNYFGRCNVAEHEKLIKLAQLKPEKDSDEAVTYSLGKFGQRALDFYSIHVTKESTHPVKPLAQIAGNRYASGPVGKALSDACMGTIASFLSKYQDIIIEHQKVVKGNQKRLESLRELAGKENLEYPSVTLPPQPHTKEGVDAYNEVIARVRWWVNLNLWQKLKLSRDDAKPLLRLKGFPSFPLVERQANEVDWWDMVCNVKKLINEKKEDGKVFWQNLAGYKRQEALRPYLSSEEDRKKGKKFARYQLGDLLLHLEKKHGEDWGKVYDEAWERIDKKVEGLSKHIKLEEERRSEDAQSKAALTDWLRAKASFVIEGLKEADKDEFCRCELKLQKWYGDLRGKPFAIEAENSILDISGFSKQYNCAFIWQKDGVKKLNLYLIINYFKGGKLRFKKIKPEAFEANRFYTVINKKSGEIVPMEVNFNFDDPNLIILPLAFGKRQGREFIWNDLLSLETGSLKLANGRVIEKTLYNRRTRQDEPALFVALTFERREVLDSSNIKPMNLIGVDRGENIPAVIALTDPEGCPLSRFKDSLGNPTHILRIGESYKEKQRTIQAKKEVEQRRAGGYSRKYASKAKNLADDMVRNTARDLLYYAVTQDAMLIFENLSRGFGRQGKRTFMAERQYTRMEDWLTAKLAYEGLPSKTYLSKTLAQYTSKTCSNCGFTITSADYDRVLEKLKKTATGWMTTINGKELKVEGQITYYNRYKRQNVVKDLSVELDRLSEESVNNDISSWTKGRSGEALSLLKKRFSHRPVQEKFVCLNCGFETHADEQAALNIARSWLFLRSQEYKKYQTNKTTGNTDKRAFVETWQSFYRKKLKEVWKPAV

SEQ ID NO: 33246 - protein, 977 aa, synthetic construct
  REGION 1..977: note = engineered CasX variant
QEIKRINGIRRRLVKDSNTKKAGKTGPMKTLLVRVMTPDLRERLENLRKKPENIPQPISNTSRANLNKLLTDYTEMKKAILHVYWEEFQKDPVGLMSRVAQPASKKIDQNKLKPEMDEKGNLTTAGFACSQCGQPLFVYKLEQVSEKGKAYTNYFGRCNVAEHEKLILLAQLKPEKDSDEAVTYSLGKFGQRALDFYSIHVTKESTHPVKPLAQIAGNRYASPVGKALSDACMGTIASFLSKYQDIIIEHQKVVKGNQKRLESLRELAGKENLEYPSVTLPPQPHTKEGVDAYNEVIARVRWWVNLNLWQKLKLSRDDAKPLLRLKGFPSFPLVERQANEVDWWDMVCNVKKLINEKKEDGKVFWQNLAGYKRQEALRPYLSSEEDRKKGKKFARYQLGDLLLHLEKKHGEDWGKVYDEAWERIDKKVEGLSKHIKLEEERRSEDAQSKAALTDWLRAKASFVIEGLKEADKDEFCRCELKLQKWYGDLRGKPFAIEAENSILDISGFSKQYNCAFIWQKDGVKKLNLYLIINYFKGGKLRFKKIKPEAFEANRFYTVINKKSGEIVPMEVNFNFDDPNLIILPLAFGKRQGREFIWNDLLSLETGSLKLANGRVIEKTLYNRRTRQDEPALFVALTFERREVLDSSNIKPMNLIGVDRGENIPAVIALTDPEGCPLSRFKDSLGNPTHILRIGESYKEKQRTIQAKKEVEQRRAGGYSRKYASKAKNLADDMVRNTARDLLYYAVTQDAMLIFENLSRGFGRQGKRTFMAERQYTRMEDWLTAKLAYEGLPSKTYLSKTLAQYTSKTCSNCGFTITSADYDRVLEKLKKTATGWMTTINGKELKVEGQITYYNRYKRQNVVKDLSVELDRLSEESVNNDISSWTKGRSGEALSLLKKRFSHRPVQEKFVCLNCGFETHADEQAALNIARSWLFLRSQEYKKYQTNKTTGNTDKRAFVETWQSFYRKKLKEVWKPAV

SEQ ID NO: 33247 - protein, 979 aa, synthetic construct
  REGION 1..979: note = engineered CasX variant
QEIKRINGIRRRLVKDSNTKKAGKTGPMKTLLVRVMTPDLRERLENLRKKPENIPQPISNTSRANLNKLLTDYTEMKKAILHVYWEEFQKDPVGLMSRVAQPASKKIDQNKLKPEMDEKGNLTTAGFACSQCGQPLFVYKLEQVSEKGKAYTNYFGRCNVAEHEKLILLAQLKPEKDSDEAVTYSLGKFGQRALDFYSIHVTKESTHPVKPLAQIAGNRYASYPVGKALSDACMGTIASFLSKYQDIIIEHQKVVKGNQKRLESLRELAGKENLEYPSVTLPPQPHTKEGVDAYNEVIARVRMWVNLNLWQKLKLSRDDAKPLLRLKGFPSFPLVERQQANEVDWWDMVCNVKKLINEKKEDGKVFWQNLAGYKRQEALRPYLSSEEDRKKGKKFARYQLGDLLLHLEKKHGEDWGKVYDEAWERIDKKVEGLSKHIKLEEERRSEDAQSKAALTDWLRAKASFVIEGLKEADKDEFCRCELKLQKWYGDLRGKPFAIEAENSILDISGFSKQYNCAFIWQKDGVKKLNLYLIINYFKGGKLRFKKIKPEAFEANRFYTVINKKSGEIVPMEVNFNFDDPNLIILPLAFGKRQGREFIWNDLLSLETGSLKLANGRVIEKTLYNRRTRQDEPALFVALTFERREVLDSSNIKPMNLIGVDRGENIPAVIALTDPEGCPLSRFKDSLGNPTHILRIGESYKEKQRTIQAKKEVEQRRAGGYSRKYASKAKNLADDMVRNTARDLLYYAVTQDAMLIFENLSRGFGRQGKRTFMAERQYTRMEDWLTAKLAYEGLPSKTYLSKTLAQYTSKTCSNCGFTITSADYDRVLEKLKKTATGWMTTINGKELKVEGQITYYNRYKRQNVVKDLSVELDRLSEESVNNDISSWTKGRSGEALSLLKKRFSHRPVQEKFVCLNCGFETHADEQAALNIARSWLFLRSQEYKKYQTNKTTGNTDKRAFVETWQSFYRKKLKEVWKPAV

SEQ ID NO: 33248 - protein, 979 aa, synthetic construct
  REGION 1..979: note = engineered CasX variant
QEIKRINGIRRRLVKDSNTKKAGKTGPMKTLLVRVMTPDLRERLENLRKKPENIPQPISNTSRANLNKLLTDYTEMKKAILHVYWEEFQKDPVGLMSRVAQPASKKIDQNKLKPEMDEKGNLTTAGFACSQCGQPLFVYKLEQVSEKGKAYTNYFGRCNVAEHEKLILLAQLKPEKDSDEAVTYSLGKFGQRALDFYSIHVTKESTHPVKPLAQIAGNRYASHPVGKALSDACMGTIASFLSKYQDIIIEHQKVVKGNQKRLESLRELAGKENLEYPSVTLPPQPHTKEGVDAYNEVIARVRMWVNLNLWQKLKLSRDDAKPLLRLKGFPSFPLVERQQANEVDWWDMVCNVKKLINEKKEDGKVFWQNLAGYKRQEALRPYLSSEEDRKKGKKFARYQLGDLLLHLEKKHGEDWGKVYDEAWERIDKKVEGLSKHIKLEEERRSEDAQSKAALTDWLRAKASFVIEGLKEADKDEFCRCELKLQKWYGDLRGKPFAIEAENSILDISGFSKQYNCAFIWQKDGVKKLNLYLIINYFKGGKLRFKKIKPEAFEANRFYTVINKKSGEIVPMEVNFNFDDPNLIILPLAFGKRQGREFIWNDLLSLETGSLKLANGRVIEKTLYNRRTRQDEPALFVALTFERREVLDSSNIKPMNLIGVDRGENIPAVIALTDPEGCPLSRFKDSLGNPTHILRIGESYKEKQRTIQAKKEVEQRRAGGYSRKYASKAKNLADDMVRNTARDLLYYAVTQDAMLIFENLSRGFGRQGKRTFMAERQYTRMEDWLTAKLAYEGLPSKTYLSKTLAQYTSKTCSNCGFTITSADYDRVLEKLKKTATGWMTTINGKELKVEGQITYYNRYKRQNVVKDLSVELDRLSEESVNNDISSWTKGRSGEALSLLKKRFSHRPVQEKFVCLNCGFETHADEQAALNIARSWLFLRSQEYKKYQTNKTTGNTDKRAFVETWQSFYRKKLKEVWKPAV

SEQ ID NO: 33249 - protein, 979 aa, synthetic construct
  REGION 1..979: note = engineered CasX variant
QEIKRINGIRRRLVKDSNTKKAGKTGPMKTLLVRVMTPDLRERLENLRKKPENIPQPISNTSRANLNKLLTDYTEMKKAILHVYWEEFQKDPVGLMSRVAQPASKKIDQNKLKPEMDEKGNLTTAGFACSQCGQPLFVYKLEQVSEKGKAYTNYFGRCNVAEHEKLILLAQLKPEKDSDEAVTYSLGKFGQRALDFYSIHVTKESTHPVKPLAQIAGNRYASSPVGKALSDACMGTIASFLSKYQDIIIEHQKVVKGNQKRLESLRELAGKENLEYPSVTLPPQPHTKEGVDAYNEVIARVRMWVNLNLWQKLKLSRDDAKPLLRLKGFPSFPLVERQQANEVDWWDMVCNVKKLINEKKEDGKVFWQNLAGYKRQEALRPYLSSEEDRKKGKKFARYQLGDLLLHLEKKHGEDWGKVYDEAWERIDKKVEGLSKHIKLEEERRSEDAQSKAALTDWLRAKASFVIEGLKEADKDEFCRCELKLQKWYGDLRGKPFAIEAENSILDISGFSKQYNCAFIWQKDGVKKLNLYLIINYFKGGKLRFKKIKPEAFEANRFYTVINKKSGEIVPMEVNFNFDDPNLIILPLAFGKRQGREFIWNDLLSLETGSLKLANGRVIEKTLYNRRTRQDEPALFVALTFERREVLDSSNIKPMNLIGVDRGENIPAVIALTDPEGCPLSRFKDSLGNPTHILRIGESYKEKQRTIQAKKEVEQRRAGGYSRKYASKAKNLADDMVRNTARDLLYYAVTQDAMLIFENLSRGFGRQGKRTFMAERQYTRMEDWLTAKLAYEGLPSKTYLSKTLAQYTSKTCSNCGFTITSADYDRVLEKLKKTATGWMTTINGKELKVEGQITYYNRYKRQNVVKDLSVELDRLSEESVNNDISSWTKGRSGEALSLLKKRFSHRPVQEKFVCLNCGFETHADEQAALNIARSWLFLRSQEYKKYQTNKTTGNTDKRAFVETWQSFYRKKLKEVWKPAV

SEQ ID NO: 33250 - protein, 979 aa, synthetic construct
  REGION 1..979: note = engineered CasX variant
QEIKRINGIRRRLVKDSNTKKAGKTGPMKTLLVRVMTPDLRERLENLRKKPENIPQPISNTSRANLNKLLTDYTEMKKAILHVYWEEFQKDPVGLMSRVAQPASKKIDQNKLKPEMDEKGNLTTAGFACSQCGQPLFVYKLEQVSEKGKAYTNYFGRCNVAEHEKLILLAQLKPEKDSDEAVTYSLGKFGQRALDFYSIHVTKESTHPVKPLAQIAGNRYASTPVGKALSDACMGTIASFLSKYQDIIIEHQKVVKGNQKRLESLRELAGKENLEYPSVTLPPQPHTKEGVDAYNEVIARVRMWVNLNLWQKLKLSRDDAKPLLRLKGFPSFPLVERQQANEVDWWDMVCNVKKLINEKKEDGKVFWQNLAGYKRQEALRPYLSSEEDRKKGKKFARYQLGDLLLHLEKKHGEDWGKVYDEAWERIDKKVEGLSKHIKLEEERRSEDAQSKAALTDWLRAKASFVIEGLKEADKDEFCRCELKLQKWYGDLRGKPFAIEAENSILDISGFSKQYNCAFIWQKDGVKKLNLYLIINYFKGGKLRFKKIKPEAFEANRFYTVINKKSGEIVPMEVNFNFDDPNLIILPLAFGKRQGREFIWNDLLSLETGSLKLANGRVIEKTLYNRRTRQDEPALFVALTFERREVLDSSNIKPMNLIGVDRGENIPAVIALTDPEGCPLSRFKDSLGNPTHILRIGESYKEKQRTIQAKKEVEQRRAGGYSRKYASKAKNLADDMVRNTARDLLYYAVTQDAMLIFENLSRGFGRQGKRTFMAERQYTRMEDWLTAKLAYEGLPSKTYLSKTLAQYTSKTCSNCGFTITSADYDRVLEKLKKTATGWMTTINGKELKVEGQITYYNRYKRQNVVKDLSVELDRLSEESVNNDISSWTKGRSGEALSLLKKRFSHRPVQEKFVCLNCGFETHADEQAALNIARSWLFLRSQEYKKYQTNKTTGNTDKRAFVETWQSFYRKKLKEVWKPAV

SEQ ID NO: 33251 - protein, 979 aa, synthetic construct
  REGION 1..979: note = engineered CasX variant
QEIKRINGIRRRLVKDSNTKKAGKTGPMKTLLVRVMTPDLRERLENLRKKPENIPQPISNTSRANLNKLLTDYTEMKKAILHVYWEEFQKDPVGLMSRVAQPASKKIDQNKLKPEMDEKGNLTTAGFACSQCGQPLFVYKLEQVSEKGKAYTNYFGRCNVAEHEKLILLAQLKPEKDSDEAVTYSLGKFGQRALDFYSIHVTKESTHPVKPLAQIAGNRYASAPVGKALSDACMGTIASFLSKYQDIIIEHQKVVKGNQKRLESLRELAGKENLEYPSVTLPPQPHTKEGVDAYNEVIARVRMWVNLNLWQKLKLSRDDAKPLLRLKGFPSFPLVERQQANEVDWWDMVCNVKKLINEKKEDGKVFWQNLAGYKRQEALRPYLSSEEDRKKGKKFARYQLGDLLLHLEKKHGEDWGKVYDEAWERIDKKVEGLSKHIKLEEERRSEDAQSKAALTDWLRAKASFVIEGLKEADKDEFCRCELKLQKWYGDLRGKPFAIEAENSILDISGFSKQYNCAFIWQKDGVKKLNLYLIINYFKGGKLRFKKIKPEAFEANRFYTVINKKSGEIVPMEVNFNFDDPNLIILPLAFGKRQGREFIWNDLLSLETGSLKLANGRVIEKTLYNRRTRQDEPALFVALTFERREVLDSSNIKPMNLIGVDRGENIPAVIALTDPEGCPLSRFKDSLGNPTHILRIGESYKEKQRTIQAKKEVEQRRAGGYSRKYASKAKNLADDMVRNTARDLLYYAVTQDAMLIFENLSRGFGRQGKRTFMAERQYTRMEDWLTAKLAYEGLPSKTYLSKTLAQYTSKTCSNCGFTITSADYDRVLEKLKKTATGWMTTINGKELKVEGQITYYNRYKRQNVVKDLSVELDRLSEESVNNDISSWTKGRSGEALSLLKKRFSHRPVQEKFVCLNCGFETHADEQAALNIARSWLFLRSQEYKKYQTNKTTGNTDKRAFVETWQSFYRKKLKEVWKPAV

SEQ ID NO: 33252 - protein, 979 aa, synthetic construct
  REGION 1..979: note = engineered CasX variant
QEIKRINGIRRRLVKDSNTKKAGKTGPMKTLLVRVMTPDLRERLENLRKKPENIPQPISNTSRANLNKLLTDYTEMKKAILHVYWEEFQKDPVGLMSRVAQPASKKIDQNKLKPEMDEKGNLTTAGFACSQCGQPLFVYKLEQVSEKGKAYTNYFGRCNVAEHEKLILLAQLKPEKDSDEAVTYSLGKFGQRALDFYSIHVTKESTHPVKPLAQIAGNRYASVPVGKALSDACMGTIASFLSKYQDIIIEHQKVVKGNQKRLESLRELAGKENLEYPSVTLPPQPHTKEGVDAYNEVIARVRMWVNLNLWQKLKLSRDDAKPLLRLKGFPSFPLVERQQANEVDWWDMVCNVKKLINEKKEDGKVFWQNLAGYKRQEALRPYLSSEEDRKKGKKFARYQLGDLLLHLEKKHGEDWGKVYDEAWERIDKKVEGLSKHIKLEEERRSEDAQSKAALTDWLRAKASFVIEGLKEADKDEFCRCELKLQKWYGDLRGKPFAIEAENSILDISGFSKQYNCAFIWQKDGVKKLNLYLIINYFKGGKLRFKKIKPEAFEANRFYTVINKKSGEIVPMEVNFNFDDPNLIILPLAFGKRQGREFIWNDLLSLETGSLKLANGRVIEKTLYNRRTRQDEPALFVALTFERREVLDSSNIKPMNLIGVDRGENIPAVIALTDPEGCPLSRFKDSLGNPTHILRIGESYKEKQRTIQAKKEVEQRRAGGYSRKYASKAKNLADDMVRNTARDLLYYAVTQDAMLIFENLSRGFGRQGKRTFMAERQYTRMEDWLTAKLAYEGLPSKTYLSKTLAQYTSKTCSNCGFTITSADYDRVLEKLKKTATGWMTTINGKELKVEGQITYYNRYKRQNVVKDLSVELDRLSEESVNNDISSWTKGRSGEALSLLKKRFSHRPVQEKFVCLNCGFETHADEQAALNIARSWLFLRSQEYKKYQTNKTTGNTDKRAFVETWQSFYRKKLKEVWKPAV

SEQ ID NO: 33253 - protein, 979 aa, synthetic construct
  REGION 1..979: note = engineered CasX variant
QEIKRINGIRRRLVKDSNTKKAGKTGPMKTLLVRVMTPDLRERLENLRKKPENIPQPISNTSRANLNKLLTDYTEMKKAILHVYWEEFQKDPVGLMSRVAQPASKKIDQNKLKPEMDEKGNLTTAGFACSQCGQPLFVYKLEQVSEKGKAYTNYFGRCNVAEHEKLIKLAQLKPEKDSDEAVTYSLGKFGQRALDFYSIHVTKESTHPVKPLAQIAGNRYASGPVGKALSDACMGTIASFLSKYQDIIIEHQKVVKGNQKRLESLRELAGKENLEYPSVTLPPQPHTKEGVDAYNEVIARVRMWVNLNLWQKLKLSRDDAKPLLRLKGFPSFPLVERQQANEVDWWDMVCNVKKLINEKKEDGKVFWQNLAGYKRQEALRPYLSSEEDRKKGKKFARYQLGDLLLHLEKKHGEDWGKVYDEAWERIDKKVEGLSKHIKLEEERRSEDAQSKAALTDWLRAKASFVIEGLKEADKDEFCRCELKLQKWYGDLRGKPFAIEAENSILDISGFSKQYNCAFIWQKDGVKKLNLYLIINYFKGGKLRFKKIKPEAFEANRFYTVINKKSGEIVPMEVNFNFDDPNLIILPLAFGKRQGREFIWNDLLSLETGSLKLANGRVIEKTLYNRRTRQDEPALFVALTFERREVLDSSNIKPMNLIGVDRGENIPAVIALTDPEGCPLSRFKDSLGNPTHILRIGESYKEKQRTIQAKKEVEQRRAGGYSRKYASKAKNLADDMVRNTARDLLYYAVTQDAMLIFENLSRGFGRQGKRTFMAERQYTRMEDWLTAKLAYEGLPSKTYLSKTLAQYTSKTCSNCGFTITSADYDRVLEKLKKTATGWMTTINGKELKVEGQITYYNRYKRQNVVKDLSVELDRLSEESVNNDISSWTKGRSGEALSLLKKRFSHRPVQEKFVCLNCGFETHADEQAALNIARSWLFLRSQEYKKYQTNKTTGNTDKRAFVETWQSFYRKKLKEVWKPAV

SEQ ID NO: 33254 - protein, 978 aa, synthetic construct
  REGION 1..978: note = engineered CasX variant
QEIKRINGIRRRLVKDSNTKKAGKTGPMKTLLVRVMTPDLRERLENLRKKPENIPQPISNTSRANLNKLLTDYTEMKKAILHVYWEEFQKDPVGLMSRVAQPASKKIDQNKLKPEMDEKGNLTTAGFACSQCGQPLFVYKLEQVSEKGKAYTNYFGRCNVAEHEKLILLAQLKPEKDSDEAVTYSLGKFGQRALDFYSIHVTKESTHPVKPLAQIAGNRYASPVGKALSDACMGTIASFLSKYQDIIIEHQKVVKGNQKRLESLRELAGKENLEYPSVTLPPQPHTKEGVDAYNEVIARVRMWVNLNLWQKLKLSRDDAKPLLRLKGFPSFPLVERQQANEVDWWDMVCNVKKLINEKKEDGKVFWQNLAGYKRQEALRPYLSSEEDRKKGKKFARYQLGDLLLHLEKKHGEDWGKVYDEAWERIDKKVEGLSKHIKLEEERRSEDAQSKAALTDWLRAKASFVIEGLKEADKDEFCRCELKLQKWYGDLRGKPFAIEAENSILDISGFSKQYNCAFIWQKDGVKKLNLYLIINYFKGGKLRFKKIKPEAFEANRFYTVINKKSGEIVPMEVNFNFDDPNLIILPLAFGKRQGREFIWNDLLSLETGSLKLANGRVIEKTLYNRRTRQDEPALFVALTFERREVLDSSNIKPMNLIGVDRGENIPAVIALTDPEGCPLSRFKDSLGNPTHILRIGESYKEKQRTIQAKKEVEQRRAGGYSRKYASKAKNLADDMVRNTARDLLYYAVTQDAMLIFENLSRGFGRQGKRTFMAERQYTRMEDWLTAKLAYEGLPSKTYLSKTLAQYTSKTCSNCGFTITSADYDRVLEKLKKTATGWMTTINGKELKVEGQITYYNRYKRQNVVKDLSVELDRLSEESVNNDISSWTKGRSGEALSLLKKRFSHRPVQEKFVCLNCGFETHADEQAALNIARSWLFLRSQEYKKYQTNKTTGNTDKRAFVETWQSFYRKKLKEVWKPAV

SEQ ID NO: 33255 - protein, 979 aa, synthetic construct
  REGION 1..979: note = engineered CasX variant
QEIKRINGIRRRLVKDSNTKKAGKTGPMKTLLVRVMTPDLRERLENLRKKPENIPQPISNTSRANLNKLLTDYTEMKKAILHVYWEEFQKDPVGLMSRVAQPASKKIDQNKLKPEMDEKGNLTTAGFACSQCGQPLFVYKLEQVSEKGKAYTNYFGRCNVAEHEKLILLAQLKPEKDSDEAVTYSLGKFGQRALDFYSIHVTKESTHPVKPLAQIAGNRYASYPVGKALSDACMGTIASFLSKYQDIIIEHQKVVKGNQKRLESLRELAGKENLEYPSVTLPPQPHTKEGVDAYNEVIARVRMWVNLNLWQKLKLSRDDAKPLLRLKGFPSFPLVERQANAEVDWWDMVCNVKKLINEKKEDGKVFWQNLAGYKRQEALRPYLSSEEDRKKGKKFARYQLGDLLLHLEKKHGEDWGKVYDEAWERIDKKVEGLSKHIKLEEERRSEDAQSKAALTDWLRAKASFVIEGLKEADKDEFCRCELKLQKWYGDLRGKPFAIEAENSILDISGFSKQYNCAFIWQKDGVKKLNLYLIINYFKGGKLRFKKIKPEAFEANRFYTVINKKSGEIVPMEVNFNFDDPNLIILPLAFGKRQGREFIWNDLLSLETGSLKLANGRVIEKTLYNRRTRQDEPALFVALTFERREVLDSSNIKPMNLIGVDRGENIPAVIALTDPEGCPLSRFKDSLGNPTHILRIGESYKEKQRTIQAKKEVEQRRAGGYSRKYASKAKNLADDMVRNTARDLLYYAVTQDAMLIFENLSRGFGRQGKRTFMAERQYTRMEDWLTAKLAYEGLPSKTYLSKTLAQYTSKTCSNCGFTITSADYDRVLEKLKKTATGWMTTINGKELKVEGQITYYNRYKRQNVVKDLSVELDRLSEESVNNDISSWTKGRSGEALSLLKKRFSHRPVQEKFVCLNCGFETHADEQAALNIARSWLFLRSQEYKKYQTNKTTGNTDKRAFVETWQSFYRKKLKEVWKPAV

SEQ ID NO: 33256 - protein, 979 aa, synthetic construct
  REGION 1..979: note = engineered CasX variant
QEIKRINGIRRRLVKDSNTKKAGKTGPMKTLLVRVMTPDLRERLENLRKKPENIPQPISNTSRANLNKLLTDYTEMKKAILHVYWEEFQKDPVGLMSRVAQPASKKIDQNKLKPEMDEKGNLTTAGFACSQCGQPLFVYKLEQVSEKGKAYTNYFGRCNVAEHEKLILLAQLKPEKDSDEAVTYSLGKFGQRALDFYSIHVTKESTHPVKPLAQIAGNRYASHPVGKALSDACMGTIASFLSKYQDIIIEHQKVVKGNQKRLESLRELAGKENLEYPSVTLPPQPHTKEGVDAYNEVIARVRMWVNLNLWQKLKLSRDDAKPLLRLKGFPSFPLVERQANAEVDWWDMVCNVKKLINEKKEDGKVFWQNLAGYKRQEALRPYLSSEEDRKKGKKFARYQLGDLLLHLEKKHGEDWGKVYDEAWERIDKKVEGLSKHIKLEEERRSEDAQSKAALTDWLRAKASFVIEGLKEADKDEFCRCELKLQKWYGDLRGKPFAIEAENSILDISGFSKQYNCAFIWQKDGVKKLNLYLIINYFKGGKLRFKKIKPEAFEANRFYTVINKKSGEIVPMEVNFNFDDPNLIILPLAFGKRQGREFIWNDLLSLETGSLKLANGRVIEKTLYNRRTRQDEPALFVALTFERREVLDSSNIKPMNLIGVDRGENIPAVIALTDPEGCPLSRFKDSLGNPTHILRIGESYKEKQRTIQAKKEVEQRRAGGYSRKYASKAKNLADDMVRNTARDLLYYAVTQDAMLIFENLSRGFGRQGKRTFMAERQYTRMEDWLTAKLAYEGLPSKTYLSKTLAQYTSKTCSNCGFTITSADYDRVLEKLKKTATGWMTTINGKELKVEGQITYYNRYKRQNVVKDLSVELDRLSEESVNNDISSWTKGRSGEALSLLKKRFSHRPVQEKFVCLNCGFETHADEQAALNIARSWLFLRSQEYKKYQTNKTTGNTDKRAFVETWQSFYRKKLKEVWKPAV

SEQ ID NO: 33257 - protein, 979 aa, synthetic construct
  REGION 1..979: note = engineered CasX variant
QEIKRINGIRRRLVKDSNTKKAGKTGPMKTLLVRVMTPDLRERLENLRKKPENIPQPISNTSRANLNKLLTDYTEMKKAILHVYWEEFQKDPVGLMSRVAQPASKKIDQNKLKPEMDEKGNLTTAGFACSQCGQPLFVYKLEQVSEKGKAYTNYFGRCNVAEHEKLILLAQLKPEKDSDEAVTYSLGKFGQRALDFYSIHVTKESTHPVKPLAQIAGNRYASSPVGKALSDACMGTIASFLSKYQDIIIEHQKVVKGNQKRLESLRELAGKENLEYPSVTLPPQPHTKEGVDAYNEVIARVRMWVNLNLWQKLKLSRDDAKPLLRLKGFPSFPLVERQANAEVDWWDMVCNVKKLINEKKEDGKVFWQNLAGYKRQEALRPYLSSEEDRKKGKKFARYQLGDLLLHLEKKHGEDWGKVYDEAWERIDKKVEGLSKHIKLEEERRSEDAQSKAALTDWLRAKASFVIEGLKEADKDEFCRCELKLQKWYGDLRGKPFAIEAENSILDISGFSKQYNCAFIWQKDGVKKLNLYLIINYFKGGKLRFKKIKPEAFEANRFYTVINKKSGEIVPMEVNFNFDDPNLIILPLAFGKRQGREFIWNDLLSLETGSLKLANGRVIEKTLYNRRTRQDEPALFVALTFERREVLDSSNIKPMNLIGVDRGENIPAVIALTDPEGCPLSRFKDSLGNPTHILRIGESYKEKQRTIQAKKEVEQRRAGGYSRKYASKAKNLADDMVRNTARDLLYYAVTQDAMLIFENLSRGFGRQGKRTFMAERQYTRMEDWLTAKLAYEGLPSKTYLSKTLAQYTSKTCSNCGFTITSADYDRVLEKLKKTATGWMTTINGKELKVEGQITYYNRYKRQNVVKDLSVELDRLSEESVNNDISSWTKGRSGEALSLLKKRFSHRPVQEKFVCLNCGFETHADEQAALNIARSWLFLRSQEYKKYQTNKTTGNTDKRAFVETWQSFYRKKLKEVWKPAV

SEQ ID NO: 33258 - protein, 979 aa, synthetic construct
  REGION 1..979: note = engineered CasX variant
QEIKRINGIRRRLVKDSNTKKAGKTGPMKTLLVRVMTPDLRERLENLRKKPENIPQPISNTSRANLNKLLTDYTEMKKAILHVYWEEFQKDPVGLMSRVAQPASKKIDQNKLKPEMDEKGNLTTAGFACSQCGQPLFVYKLEQVSEKGKAYTNYFGRCNVAEHEKLILLAQLKPEKDSDEAVTYSLGKFGQRALDFYSIHVTKESTHPVKPLAQIAGNRYASTPVGKALSDACMGTIASFLSKYQDIIIEHQKVVKGNQKRLESLRELAGKENLEYPSVTLPPQPHTKEGVDAYNEVIARVRMWVNLNLWQKLKLSRDDAKPLLRLKGFPSFPLVERQANAEVDWWDMVCNVKKLINEKKEDGKVFWQNLAGYKRQEALRPYLSSEEDRKKGKKFARYQLGDLLLHLEKKHGEDWGKVYDEAWERIDKKVEGLSKHIKLEEERRSEDAQSKAALTDWLRAKASFVIEGLKEADKDEFCRCELKLQKWYGDLRGKPFAIEAENSILDISGFSKQYNCAFIWQKDGVKKLNLYLIINYFKGGKLRFKKIKPEAFEANRFYTVINKKSGEIVPMEVNFNFDDPNLIILPLAFGKRQGREFIWNDLLSLETGSLKLANGRVIEKTLYNRRTRQDEPALFVALTFERREVLDSSNIKPMNLIGVDRGENIPAVIALTDPEGCPLSRFKDSLGNPTHILRIGESYKEKQRTIQAKKEVEQRRAGGYSRKYASKAKNLADDMVRNTARDLLYYAVTQDAMLIFENLSRGFGRQGKRTFMAERQYTRMEDWLTAKLAYEGLPSKTYLSKTLAQYTSKTCSNCGFTITSADYDRVLEKLKKTATGWMTTINGKELKVEGQITYYNRYKRQNVVKDLSVELDRLSEESVNNDISSWTKGRSGEALSLLKKRFSHRPVQEKFVCLNCGFETHADEQAALNIARSWLFLRSQEYKKYQTNKTTGNTDKRAFVETWQSFYRKKLKEVWKPAV

SEQ ID NO: 33259 - protein, 979 aa, synthetic construct
  REGION 1..979: note = engineered CasX variant
QEIKRINGIRRRLVKDSNTKKAGKTGPMKTLLVRVMTPDLRERLENLRKKPENIPQPISNTSRANLNKLLTDYTEMKKAILHVYWEEFQKDPVGLMSRVAQPASKKIDQNKLKPEMDEKGNLTTAGFACSQCGQPLFVYKLEQVSEKGKAYTNYFGRCNVAEHEKLILLAQLKPEKDSDEAVTYSLGKFGQRALDFYSIHVTKESTHPVKPLAQIAGNRYASAPVGKALSDACMGTIASFLSKYQDIIIEHQKVVKGNQKRLESLRELAGKENLEYPSVTLPPQPHTKEGVDAYNEVIARVRMWVNLNLWQKLKLSRDDAKPLLRLKGFPSFPLVERQANAEVDWWDMVCNVKKLINEKKEDGKVFWQNLAGYKRQEALRPYLSSEEDRKKGKKFARYQLGDLLLHLEKKHGEDWGKVYDEAWERIDKKVEGLSKHIKLEEERRSEDAQSKAALTDWLRAKASFVIEGLKEADKDEFCRCELKLQKWYGDLRGKPFAIEAENSILDISGFSKQYNCAFIWQKDGVKKLNLYLIINYFKGGKLRFKKIKPEAFEANRFYTVINKKSGEIVPMEVNFNFDDPNLIILPLAFGKRQGREFIWNDLLSLETGSLKLANGRVIEKTLYNRRTRQDEPALFVALTFERREVLDSSNIKPMNLIGVDRGENIPAVIALTDPEGCPLSRFKDSLGNPTHILRIGESYKEKQRTIQAKKEVEQRRAGGYSRKYASKAKNLADDMVRNTARDLLYYAVTQDAMLIFENLSRGFGRQGKRTFMAERQYTRMEDWLTAKLAYEGLPSKTYLSKTLAQYTSKTCSNCGFTITSADYDRVLEKLKKTATGWMTTINGKELKVEGQITYYNRYKRQNVVKDLSVELDRLSEESVNNDISSWTKGRSGEALSLLKKRFSHRPVQEKFVCLNCGFETHADEQAALNIARSWLFLRSQEYKKYQTNKTTGNTDKRAFVETWQSFYRKKLKEVWKPAV

SEQ ID NO: 33260 - protein, 979 aa, synthetic construct
  REGION 1..979: note = engineered CasX variant
QEIKRINGIRRRLVKDSNTKKAGKTGPMKTLLVRVMTPDLRERLENLRKKPENIPQPISNTSRANLNKLLTDYTEMKKAILHVYWEEFQKDPVGLMSRVAQPASKKIDQNKLKPEMDEKGNLTTAGFACSQCGQPLFVYKLEQVSEKGKAYTNYFGRCNVAEHEKLILLAQLKPEKDSDEAVTYSLGKFGQRALDFYSIHVTKESTHPVKPLAQIAGNRYASVPVGKALSDACMGTIASFLSKYQDIIIEHQKVVKGNQKRLESLRELAGKENLEYPSVTLPPQPHTKEGVDAYNEVIARVRMWVNLNLWQKLKLSRDDAKPLLRLKGFPSFPLVERQANAEVDWWDMVCNVKKLINEKKEDGKVFWQNLAGYKRQEALRPYLSSEEDRKKGKKFARYQLGDLLLHLEKKHGEDWGKVYDEAWERIDKKVEGLSKHIKLEEERRSEDAQSKAALTDWLRAKASFVIEGLKEADKDEFCRCELKLQKWYGDLRGKPFAIEAENSILDISGFSKQYNCAFIWQKDGVKKLNLYLIINYFKGGKLRFKKIKPEAFEANRFYTVINKKSGEIVPMEVNFNFDDPNLIILPLAFGKRQGREFIWNDLLSLETGSLKLANGRVIEKTLYNRRTRQDEPALFVALTFERREVLDSSNIKPMNLIGVDRGENIPAVIALTDPEGCPLSRFKDSLGNPTHILRIGESYKEKQRTIQAKKEVEQRRAGGYSRKYASKAKNLADDMVRNTARDLLYYAVTQDAMLIFENLSRGFGRQGKRTFMAERQYTRMEDWLTAKLAYEGLPSKTYLSKTLAQYTSKTCSNCGFTITSADYDRVLEKLKKTATGWMTTINGKELKVEGQITYYNRYKRQNVVKDLSVELDRLSEESVNNDISSWTKGRSGEALSLLKKRFSHRPVQEKFVCLNCGFETHADEQAALNIARSWLFLRSQEYKKYQTNKTTGNTDKRAFVETWQSFYRKKLKEVWKPAV

SEQ ID NO: 33261 - protein, 979 aa, synthetic construct
  REGION 1..979: note = engineered CasX variant
QEIKRINGIRRRLVKDSNTKKAGKTGPMKTLLVRVMTPDLRERLENLRKKPENIPQPISNTSRANLNKLLTDYTEMKKAILHVYWEEFQKDPVGLMSRVAQPASKKIDQNKLKPEMDEKGNLTTAGFACSQCGQPLFVYKLEQVSEKGKAYTNYFGRCNVAEHEKLIKLAQLKPEKDSDEAVTYSLGKFGQRALDFYSIHVTKESTHPVKPLAQIAGNRYASGPVGKALSDACMGTIASFLSKYQDIIIEHQKVVKGNQKRLESLRELAGKENLEYPSVTLPPQPHTKEGVDAYNEVIARVRMWVNLNLWQKLKLSRDDAKPLLRLKGFPSFPLVERQANAEVDWWDMVCNVKKLINEKKEDGKVFWQNLAGYKRQEALRPYLSSEEDRKKGKKFARYQLGDLLLHLEKKHGEDWGKVYDEAWERIDKKVEGLSKHIKLEEERRSEDAQSKAALTDWLRAKASFVIEGLKEADKDEFCRCELKLQKWYGDLRGKPFAIEAENSILDISGFSKQYNCAFIWQKDGVKKLNLYLIINYFKGGKLRFKKIKPEAFEANRFYTVINKKSGEIVPMEVNFNFDDPNLIILPLAFGKRQGREFIWNDLLSLETGSLKLANGRVIEKTLYNRRTRQDEPALFVALTFERREVLDSSNIKPMNLIGVDRGENIPAVIALTDPEGCPLSRFKDSLGNPTHILRIGESYKEKQRTIQAKKEVEQRRAGGYSRKYASKAKNLADDMVRNTARDLLYYAVTQDAMLIFENLSRGFGRQGKRTFMAERQYTRMEDWLTAKLAYEGLPSKTYLSKTLAQYTSKTCSNCGFTITSADYDRVLEKLKKTATGWMTTINGKELKVEGQITYYNRYKRQNVVKDLSVELDRLSEESVNNDISSWTKGRSGEALSLLKKRFSHRPVQEKFVCLNCGFETHADEQAALNIARSWLFLRSQEYKKYQTNKTTGNTDKRAFVETWQSFYRKKLKEVWKPAV

SEQ ID NO: 33262 - protein, 978 aa, synthetic construct
  REGION 1..978: note = engineered CasX variant
QEIKRINGIRRRLVKDSNTKKAGKTGPMKTLLVRVMTPDLRERLENLRKKPENIPQPISNTSRANLNKLLTDYTEMKKAILHVYWEEFQKDPVGLMSRVAQPASKKIDQNKLKPEMDEKGNLTTAGFACSQCGQPLFVYKLEQVSEKGKAYTNYFGRCNVAEHEKLILLAQLKPEKDSDEAVTYSLGKFGQRALDFYSIHVTKESTHPVKPLAQIAGNRYASPVGKALSDACMGTIASFLSKYQDIIIEHQKVVKGNQKRLESLRELAGKENLEYPSVTLPPQPHTKEGVDAYNEVIARVRMWVNLNLWQKLKLSRDDAKPLLRLKGFPSFPLVERQANAEVDWWDMVCNVKKLINEKKEDGKVFWQNLAGYKRQEALRPYLSSEEDRKKGKKFARYQLGDLLLHLEKKHGEDWGKVYDEAWERIDKKVEGLSKHIKLEEERRSEDAQSKAALTDWLRAKASFVIEGLKEADKDEFCRCELKLQKWYGDLRGKPFAIEAENSILDISGFSKQYNCAFIWQKDGVKKLNLYLIINYFKGGKLRFKKIKPEAFEANRFYTVINKKSGEIVPMEVNFNFDDPNLIILPLAFGKRQGREFIWNDLLSLETGSLKLANGRVIEKTLYNRRTRQDEPALFVALTFERREVLDSSNIKPMNLIGVDRGENIPAVIALTDPEGCPLSRFKDSLGNPTHILRIGESYKEKQRTIQAKKEVEQRRAGGYSRKYASKAKNLADDMVRNTARDLLYYAVTQDAMLIFENLSRGFGRQGKRTFMAERQYTRMEDWLTAKLAYEGLPSKTYLSKTLAQYTSKTCSNCGFTITSADYDRVLEKLKKTATGWMTTINGKELKVEGQITYYNRYKRQNVVKDLSVELDRLSEESVNNDISSWTKGRSGEALSLLKKRFSHRPVQEKFVCLNCGFETHADEQAALNIARSWLFLRSQEYKKYQTNKTTGNTDKRAFVETWQSFYRKKLKEVWKPAV

SEQ ID NO: 33263 - protein, 978 aa, synthetic construct
  REGION 1..978: note = engineered CasX variant
QEIKRINGIRRRLVKDSNTKKAGKTGPMKTLLVRVMTPDLRERLENLRKKPENIPQPISNTSRANLNKLLTDYTEMKKAILHVYWEEFQKDPVGLMSRVAQPASKKIDQNKLKPEMDEKGNLTTAGFACSQCGQPLFVYKLEQVSEKGKAYTNYFGRCNVAEHEKLILLAQLKPEKDSDEAVTYSLGKFGQRALDFYSIHVTKESTHPVKPLAQIAGNRYASYPVGKALSDACMGTIASFLSKYQDIIIEHQKVVKGNQKRLESLRELAGKENLEYPSVTLPPQPHTKEGVDAYNEVIARVRMWVNLNLWQKLKLSRDDAKPLLRLKGFPSFPLVERQANEVDWWDMVCNVKKLINEKKEDGKVFWQNLAGYKRQEALRPYLSSEEDRKKGKKFARTQLGDLLLHLEKKHGEDWGKVYDEAWERIDKKVEGLSKHIKLEEERRSEDAQSKAALTDWLRAKASFVIEGLKEADKDEFCRCELKLQKWYGDLRGKPFAIEAENSILDISGFSKQYNCAFIWQKDGVKKLNLYLIINYFKGGKLRFKKIKPEAFEANRFYTVINKKSGEIVPMEVNFNFDDPNLIILPLAFGKRQGREFIWNDLLSLETGSLKLANGRVIEKTLYNRRTRQDEPALFVALTFERREVLDSSNIKPMNLIGVDRGENIPAVIALTDPEGCPLSRFKDSLGNPTHILRIGESYKEKQRTIQAKKEVEQRRAGGYSRKYASKAKNLADDMVRNTARDLLYYAVTQDAMLIFENLSRGFGRQGKRTFMAERQYTRMEDWLTAKLAYEGLPSKTYLSKTLAQYTSKTCSNCGFTITSADYDRVLEKLKKTATGWMTTINGKELKVEGQITYYNRYKRQNVVKDLSVELDRLSEESVNNDISSWTKGRSGEALSLLKKRFSHRPVQEKFVCLNCGFETHADEQAALNIARSWLFLRSQEYKKYQTNKTTGNTDKRAFVETWQSFYRKKLKEVWKPAV

SEQ ID NO: 33264 - protein, 978 aa, synthetic construct
  REGION 1..978: note = engineered CasX variant
QEIKRINGIRRRLVKDSNTKKAGKTGPMKTLLVRVMTPDLRERLENLRKKPENIPQPISNTSRANLNKLLTDYTEMKKAILHVYWEEFQKDPVGLMSRVAQPASKKIDQNKLKPEMDEKGNLTTAGFACSQCGQPLFVYKLEQVSEKGKAYTNYFGRCNVAEHEKLILLAQLKPEKDSDEAVTYSLGKFGQRALDFYSIHVTKESTHPVKPLAQIAGNRYASHPVGKALSDACMGTIASFLSKYQDIIIEHQKVVKGNQKRLESLRELAGKENLEYPSVTLPPQPHTKEGVDAYNEVIARVRMWVNLNLWQKLKLSRDDAKPLLRLKGFPSFPLVERQANEVDWWDMVCNVKKLINEKKEDGKVFWQNLAGYKRQEALRPYLSSEEDRKKGKKFARTQLGDLLLHLEKKHGEDWGKVYDEAWERIDKKVEGLSKHIKLEEERRSEDAQSKAALTDWLRAKASFVIEGLKEADKDEFCRCELKLQKWYGDLRGKPFAIEAENSILDISGFSKQYNCAFIWQKDGVKKLNLYLIINYFKGGKLRFKKIKPEAFEANRFYTVINKKSGEIVPMEVNFNFDDPNLIILPLAFGKRQGREFIWNDLLSLETGSLKLANGRVIEKTLYNRRTRQDEPALFVALTFERREVLDSSNIKPMNLIGVDRGENIPAVIALTDPEGCPLSRFKDSLGNPTHILRIGESYKEKQRTIQAKKEVEQRRAGGYSRKYASKAKNLADDMVRNTARDLLYYAVTQDAMLIFENLSRGFGRQGKRTFMAERQYTRMEDWLTAKLAYEGLPSKTYLSKTLAQYTSKTCSNCGFTITSADYDRVLEKLKKTATGWMTTINGKELKVEGQITYYNRYKRQNVVKDLSVELDRLSEESVNNDISSWTKGRSGEALSLLKKRFSHRPVQEKFVCLNCGFETHADEQAALNIARSWLFLRSQEYKKYQTNKTTGNTDKRAFVETWQSFYRKKLKEVWKPAV

SEQ ID NO: 33265 - protein, 978 aa, synthetic construct
  REGION 1..978: note = engineered CasX variant
QEIKRINGIRRRLVKDSNTKKAGKTGPMKTLLVRVMTPDLRERLENLRKKPENIPQPISNTSRANLNKLLTDYTEMKKAILHVYWEEFQKDPVGLMSRVAQPASKKIDQNKLKPEMDEKGNLTTAGFACSQCGQPLFVYKLEQVSEKGKAYTNYFGRCNVAEHEKLILLAQLKPEKDSDEAVTYSLGKFGQRALDFYSIHVTKESTHPVKPLAQIAGNRYASSPVGKALSDACMGTIASFLSKYQDIIIEHQKVVKGNQKRLESLRELAGKENLEYPSVTLPPQPHTKEGVDAYNEVIARVRMWVNLNLWQKLKLSRDDAKPLLRLKGFPSFPLVERQANEVDWWDMVCNVKKLINEKKEDGKVFWQNLAGYKRQEALRPYLSSEEDRKKGKKFARTQLGDLLLHLEKKHGEDWGKVYDEAWERIDKKVEGLSKHIKLEEERRSEDAQSKAALTDWLRAKASFVIEGLKEADKDEFCRCELKLQKWYGDLRGKPFAIEAENSILDISGFSKQYNCAFIWQKDGVKKLNLYLIINYFKGGKLRFKKIKPEAFEANRFYTVINKKSGEIVPMEVNFNFDDPNLIILPLAFGKRQGREFIWNDLLSLETGSLKLANGRVIEKTLYNRRTRQDEPALFVALTFERREVLDSSNIKPMNLIGVDRGENIPAVIALTDPEGCPLSRFKDSLGNPTHILRIGESYKEKQRTIQAKKEVEQRRAGGYSRKYASKAKNLADDMVRNTARDLLYYAVTQDAMLIFENLSRGFGRQGKRTFMAERQYTRMEDWLTAKLAYEGLPSKTYLSKTLAQYTSKTCSNCGFTITSADYDRVLEKLKKTATGWMTTINGKELKVEGQITYYNRYKRQNVVKDLSVELDRLSEESVNNDISSWTKGRSGEALSLLKKRFSHRPVQEKFVCLNCGFETHADEQAALNIARSWLFLRSQEYKKYQTNKTTGNTDKRAFVETWQSFYRKKLKEVWKPAV

SEQ ID NO: 33266 - protein, 978 aa, synthetic construct
  REGION 1..978: note = engineered CasX variant
QEIKRINGIRRRLVKDSNTKKAGKTGPMKTLLVRVMTPDLRERLENLRKKPENIPQPISNTSRANLNKLLTDYTEMKKAILHVYWEEFQKDPVGLMSRVAQPASKKIDQNKLKPEMDEKGNLTTAGFACSQCGQPLFVYKLEQVSEKGKAYTNYFGRCNVAEHEKLILLAQLKPEKDSDEAVTYSLGKFGQRALDFYSIHVTKESTHPVKPLAQIAGNRYASTPVGKALSDACMGTIASFLSKYQDIIIEHQKVVKGNQKRLESLRELAGKENLEYPSVTLPPQPHTKEGVDAYNEVIARVRMWVNLNLWQKLKLSRDDAKPLLRLKGFPSFPLVERQANEVDWWDMVCNVKKLINEKKEDGKVFWQNLAGYKRQEALRPYLSSEEDRKKGKKFARTQLGDLLLHLEKKHGEDWGKVYDEAWERIDKKVEGLSKHIKLEEERRSEDAQSKAALTDWLRAKASFVIEGLKEADKDEFCRCELKLQKWYGDLRGKPFAIEAENSILDISGFSKQYNCAFIWQKDGVKKLNLYLIINYFKGGKLRFKKIKPEAFEANRFYTVINKKSGEIVPMEVNFNFDDPNLIILPLAFGKRQGREFIWNDLLSLETGSLKLANGRVIEKTLYNRRTRQDEPALFVALTFERREVLDSSNIKPMNLIGVDRGENIPAVIALTDPEGCPLSRFKDSLGNPTHILRIGESYKEKQRTIQAKKEVEQRRAGGYSRKYASKAKNLADDMVRNTARDLLYYAVTQDAMLIFENLSRGFGRQGKRTFMAERQYTRMEDWLTAKLAYEGLPSKTYLSKTLAQYTSKTCSNCGFTITSADYDRVLEKLKKTATGWMTTINGKELKVEGQITYYNRYKRQNVVKDLSVELDRLSEESVNNDISSWTKGRSGEALSLLKKRFSHRPVQEKFVCLNCGFETHADEQAALNIARSWLFLRSQEYKKYQTNKTTGNTDKRAFVETWQSFYRKKLKEVWKPAV

SEQ ID NO: 33267 - protein, 978 aa, synthetic construct
  REGION 1..978: note = engineered CasX variant
QEIKRINGIRRRLVKDSNTKKAGKTGPMKTLLVRVMTPDLRERLENLRKKPENIPQPISNTSRANLNKLLTDYTEMKKAILHVYWEEFQKDPVGLMSRVAQPASKKIDQNKLKPEMDEKGNLTTAGFACSQCGQPLFVYKLEQVSEKGKAYTNYFGRCNVAEHEKLILLAQLKPEKDSDEAVTYSLGKFGQRALDFYSIHVTKESTHPVKPLAQIAGNRYASAPVGKALSDACMGTIASFLSKYQDIIIEHQKVVKGNQKRLESLRELAGKENLEYPSVTLPPQPHTKEGVDAYNEVIARVRMWVNLNLWQKLKLSRDDAKPLLRLKGFPSFPLVERQANEVDWWDMVCNVKKLINEKKEDGKVFWQNLAGYKRQEALRPYLSSEEDRKKGKKFARTQLGDLLLHLEKKHGEDWGKVYDEAWERIDKKVEGLSKHIKLEEERRSEDAQSKAALTDWLRAKASFVIEGLKEADKDEFCRCELKLQKWYGDLRGKPFAIEAENSILDISGFSKQYNCAFIWQKDGVKKLNLYLIINYFKGGKLRFKKIKPEAFEANRFYTVINKKSGEIVPMEVNFNFDDPNLIILPLAFGKRQGREFIWNDLLSLETGSLKLANGRVIEKTLYNRRTRQDEPALFVALTFERREVLDSSNIKPMNLIGVDRGENIPAVIALTDPEGCPLSRFKDSLGNPTHILRIGESYKEKQRTIQAKKEVEQRRAGGYSRKYASKAKNLADDMVRNTARDLLYYAVTQDAMLIFENLSRGFGRQGKRTFMAERQYTRMEDWLTAKLAYEGLPSKTYLSKTLAQYTSKTCSNCGFTITSADYDRVLEKLKKTATGWMTTINGKELKVEGQITYYNRYKRQNVVKDLSVELDRLSEESVNNDISSWTKGRSGEALSLLKKRFSHRPVQEKFVCLNCGFETHADEQAALNIARSWLFLRSQEYKKYQTNKTTGNTDKRAFVETWQSFYRKKLKEVWKPAV

SEQ ID NO: 33268 - protein, 978 aa, synthetic construct
  REGION 1..978: note = engineered CasX variant
QEIKRINGIRRRLVKDSNTKKAGKTGPMKTLLVRVMTPDLRERLENLRKKPENIPQPISNTSRANLNKLLTDYTEMKKAILHVYWEEFQKDPVGLMSRVAQPASKKIDQNKLKPEMDEKGNLTTAGFACSQCGQPLFVYKLEQVSEKGKAYTNYFGRCNVAEHEKLILLAQLKPEKDSDEAVTYSLGKFGQRALDFYSIHVTKESTHPVKPLAQIAGNRYASVPVGKALSDACMGTIASFLSKYQDIIIEHQKVVKGNQKRLESLRELAGKENLEYPSVTLPPQPHTKEGVDAYNEVIARVRMWVNLNLWQKLKLSRDDAKPLLRLKGFPSFPLVERQANEVDWWDMVCNVKKLINEKKEDGKVFWQNLAGYKRQEALRPYLSSEEDRKKGKKFARTQLGDLLLHLEKKHGEDWGKVYDEAWERIDKKVEGLSKHIKLEEERRSEDAQSKAALTDWLRAKASFVIEGLKEADKDEFCRCELKLQKWYGDLRGKPFAIEAENSILDISGFSKQYNCAFIWQKDGVKKLNLYLIINYFKGGKLRFKKIKPEAFEANRFYTVINKKSGEIVPMEVNFNFDDPNLIILPLAFGKRQGREFIWNDLLSLETGSLKLANGRVIEKTLYNRRTRQDEPALFVALTFERREVLDSSNIKPMNLIGVDRGENIPAVIALTDPEGCPLSRFKDSLGNPTHILRIGESYKEKQRTIQAKKEVEQRRAGGYSRKYASKAKNLADDMVRNTARDLLYYAVTQDAMLIFENLSRGFGRQGKRTFMAERQYTRMEDWLTAKLAYEGLPSKTYLSKTLAQYTSKTCSNCGFTITSADYDRVLEKLKKTATGWMTTINGKELKVEGQITYYNRYKRQNVVKDLSVELDRLSEESVNNDISSWTKGRSGEALSLLKKRFSHRPVQEKFVCLNCGFETHADEQAALNIARSWLFLRSQEYKKYQTNKTTGNTDKRAFVETWQSFYRKKLKEVWKPAV

SEQ ID NO: 33269 - protein, 978 aa, synthetic construct
  REGION 1..978: note = engineered CasX variant
QEIKRINGIRRRLVKDSNTKKAGKTGPMKTLLVRVMTPDLRERLENLRKKPENIPQPISNTSRANLNKLLTDYTEMKKAILHVYWEEFQKDPVGLMSRVAQPASKKIDQNKLKPEMDEKGNLTTAGFACSQCGQPLFVYKLEQVSEKGKAYTNYFGRCNVAEHEKLIKLAQLKPEKDSDEAVTYSLGKFGQRALDFYSIHVTKESTHPVKPLAQIAGNRYASGPVGKALSDACMGTIASFLSKYQDIIIEHQKVVKGNQKRLESLRELAGKENLEYPSVTLPPQPHTKEGVDAYNEVIARVRMWVNLNLWQKLKLSRDDAKPLLRLKGFPSFPLVERQANEVDWWDMVCNVKKLINEKKEDGKVFWQNLAGYKRQEALRPYLSSEEDRKKGKKFARTQLGDLLLHLEKKHGEDWGKVYDEAWERIDKKVEGLSKHIKLEEERRSEDAQSKAALTDWLRAKASFVIEGLKEADKDEFCRCELKLQKWYGDLRGKPFAIEAENSILDISGFSKQYNCAFIWQKDGVKKLNLYLIINYFKGGKLRFKKIKPEAFEANRFYTVINKKSGEIVPMEVNFNFDDPNLIILPLAFGKRQGREFIWNDLLSLETGSLKLANGRVIEKTLYNRRTRQDEPALFVALTFERREVLDSSNIKPMNLIGVDRGENIPAVIALTDPEGCPLSRFKDSLGNPTHILRIGESYKEKQRTIQAKKEVEQRRAGGYSRKYASKAKNLADDMVRNTARDLLYYAVTQDAMLIFENLSRGFGRQGKRTFMAERQYTRMEDWLTAKLAYEGLPSKTYLSKTLAQYTSKTCSNCGFTITSADYDRVLEKLKKTATGWMTTINGKELKVEGQITYYNRYKRQNVVKDLSVELDRLSEESVNNDISSWTKGRSGEALSLLKKRFSHRPVQEKFVCLNCGFETHADEQAALNIARSWLFLRSQEYKKYQTNKTTGNTDKRAFVETWQSFYRKKLKEVWKPAV

SEQ ID NO: 33270 - protein, 977 aa, synthetic construct
  REGION 1..977: note = engineered CasX variant
QEIKRINGIRRRLVKDSNTKKAGKTGPMKTLLVRVMTPDLRERLENLRKKPENIPQPISNTSRANLNKLLTDYTEMKKAILHVYWEEFQKDPVGLMSRVAQPASKKIDQNKLKPEMDEKGNLTTAGFACSQCGQPLFVYKLEQVSEKGKAYTNYFGRCNVAEHEKLILLAQLKPEKDSDEAVTYSLGKFGQRALDFYSIHVTKESTHPVKPLAQIAGNRYASPVGKALSDACMGTIASFLSKYQDIIIEHQKVVKGNQKRLESLRELAGKENLEYPSVTLPPQPHTKEGVDAYNEVIARVRMWVNLNLWQKLKLSRDDAKPLLRLKGFPSFPLVERQANEVDWWDMVCNVKKLINEKKEDGKVFWQNLAGYKRQEALRPYLSSEEDRKKGKKFARTQLGDLLLHLEKKHGEDWGKVYDEAWERIDKKVEGLSKHIKLEEERRSEDAQSKAALTDWLRAKASFVIEGLKEADKDEFCRCELKLQKWYGDLRGKPFAIEAENSILDISGFSKQYNCAFIWQKDGVKKLNLYLIINYFKGGKLRFKKIKPEAFEANRFYTVINKKSGEIVPMEVNFNFDDPNLIILPLAFGKRQGREFIWNDLLSLETGSLKLANGRVIEKTLYNRRTRQDEPALFVALTFERREVLDSSNIKPMNLIGVDRGENIPAVIALTDPEGCPLSRFKDSLGNPTHILRIGESYKEKQRTIQAKKEVEQRRAGGYSRKYASKAKNLADDMVRNTARDLLYYAVTQDAMLIFENLSRGFGRQGKRTFMAERQYTRMEDWLTAKLAYEGLPSKTYLSKTLAQYTSKTCSNCGFTITSADYDRVLEKLKKTATGWMTTINGKELKVEGQITYYNRYKRQNVVKDLSVELDRLSEESVNNDISSWTKGRSGEALSLLKKRFSHRPVQEKFVCLNCGFETHADEQAALNIARSWLFLRSQEYKKYQTNKTTGNTDKRAFVETWQSFYRKKLKEVWKPAV

SEQ ID NO: 33271 - protein, 979 aa, synthetic construct
  REGION 1..979: note = engineered CasX variant
QEIKRINGIRRRLVKDSNTKKAGKTGPMKTLLVRVMTPDLRERLENLRKKPENIPQPISNTSRANLNKLLTDYTEMKKAILHVYWEEFQKDPVGLMSRVAQPASKKIDQNKLKPEMDEKGNLTTAGFACSQCGQPLFVYKLEQVSEKGKAYTNYFGRCNVAEHEKLILLAQLKPEKDSDEAVTYSLGKFGQRALDFYSIHVTKESTHPVKPLAQIAGNRYASYPVGKALSDACMGTIASFLSKYQDIIIEHQKVVKGNQKRLESLRELAGKENLEYPSVTLPPQPHTKEGVDAYNEVIARVRMWVNLNLWQKLKLSRDDAKPLLRLKGFPSFPLVERQANEVDWWDMVCNVKKLINEKKEDGKVFWQNLAGYKRQEALRPYLSSEEDRKKGKKFARYQLGDLLLHLEKKHEGEDWGKVYDEAWERIDKKVEGLSKHIKLEEERRSEDAQSKAALTDWLRAKASFVIEGLKEADKDEFCRCELKLQKWYGDLRGKPFAIEAENSILDISGFSKQYNCAFIWQKDGVKKLNLYLIINYFKGGKLRFKKIKPEAFEANRFYTVINKKSGEIVPMEVNFNFDDPNLIILPLAFGKRQGREFIWNDLLSLETGSLKLANGRVIEKTLYNRRTRQDEPALFVALTFERREVLDSSNIKPMNLIGVDRGENIPAVIALTDPEGCPLSRFKDSLGNPTHILRIGESYKEKQRTIQAKKEVEQRRAGGYSRKYASKAKNLADDMVRNTARDLLYYAVTQDAMLIFENLSRGFGRQGKRTFMAERQYTRMEDWLTAKLAYEGLPSKTYLSKTLAQYTSKTCSNCGFTITSADYDRVLEKLKKTATGWMTTINGKELKVEGQITYYNRYKRQNVVKDLSVELDRLSEESVNNDISSWTKGRSGEALSLLKKRFSHRPVQEKFVCLNCGFETHADEQAALNIARSWLFLRSQEYKKYQTNKTTGNTDKRAFVETWQSFYRKKLKEVWKPAV

SEQ ID NO: 33272 - protein, 979 aa, synthetic construct
  REGION 1..979: note = engineered CasX variant
QEIKRINGIRRRLVKDSNTKKAGKTGPMKTLLVRVMTPDLRERLENLRKKPENIPQPISNTSRANLNKLLTDYTEMKKAILHVYWEEFQKDPVGLMSRVAQPASKKIDQNKLKPEMDEKGNLTTAGFACSQCGQPLFVYKLEQVSEKGKAYTNYFGRCNVAEHEKLILLAQLKPEKDSDEAVTYSLGKFGQRALDFYSIHVTKESTHPVKPLAQIAGNRYASHPVGKALSDACMGTIASFLSKYQDIIIEHQKVVKGNQKRLESLRELAGKENLEYPSVTLPPQPHTKEGVDAYNEVIARVRMWVNLNLWQKLKLSRDDAKPLLRLKGFPSFPLVERQANEVDWWDMVCNVKKLINEKKEDGKVFWQNLAGYKRQEALRPYLSSEEDRKKGKKFARYQLGDLLLHLEKKHEGEDWGKVYDEAWERIDKKVEGLSKHIKLEEERRSEDAQSKAALTDWLRAKASFVIEGLKEADKDEFCRCELKLQKWYGDLRGKPFAIEAENSILDISGFSKQYNCAFIWQKDGVKKLNLYLIINYFKGGKLRFKKIKPEAFEANRFYTVINKKSGEIVPMEVNFNFDDPNLIILPLAFGKRQGREFIWNDLLSLETGSLKLANGRVIEKTLYNRRTRQDEPALFVALTFERREVLDSSNIKPMNLIGVDRGENIPAVIALTDPEGCPLSRFKDSLGNPTHILRIGESYKEKQRTIQAKKEVEQRRAGGYSRKYASKAKNLADDMVRNTARDLLYYAVTQDAMLIFENLSRGFGRQGKRTFMAERQYTRMEDWLTAKLAYEGLPSKTYLSKTLAQYTSKTCSNCGFTITSADYDRVLEKLKKTATGWMTTINGKELKVEGQITYYNRYKRQNVVKDLSVELDRLSEESVNNDISSWTKGRSGEALSLLKKRFSHRPVQEKFVCLNCGFETHADEQAALNIARSWLFLRSQEYKKYQTNKTTGNTDKRAFVETWQSFYRKKLKEVWKPAV

SEQ ID NO: 33273 - protein, 979 aa, synthetic construct
  REGION 1..979: note = engineered CasX variant
QEIKRINGIRRRLVKDSNTKKAGKTGPMKTLLVRVMTPDLRERLENLRKKPENIPQPISNTSRANLNKLLTDYTEMKKAILHVYWEEFQKDPVGLMSRVAQPASKKIDQNKLKPEMDEKGNLTTAGFACSQCGQPLFVYKLEQVSEKGKAYTNYFGRCNVAEHEKLILLAQLKPEKDSDEAVTYSLGKFGQRALDFYSIHVTKESTHPVKPLAQIAGNRYASSPVGKALSDACMGTIASFLSKYQDIIIEHQKVVKGNQKRLESLRELAGKENLEYPSVTLPPQPHTKEGVDAYNEVIARVRMWVNLNLWQKLKLSRDDAKPLLRLKGFPSFPLVERQANEVDWWDMVCNVKKLINEKKEDGKVFWQNLAGYKRQEALRPYLSSEEDRKKGKKFARYQLGDLLLHLEKKHEGEDWGKVYDEAWERIDKKVEGLSKHIKLEEERRSEDAQSKAALTDWLRAKASFVIEGLKEADKDEFCRCELKLQKWYGDLRGKPFAIEAENSILDISGFSKQYNCAFIWQKDGVKKLNLYLIINYFKGGKLRFKKIKPEAFEANRFYTVINKKSGEIVPMEVNFNFDDPNLIILPLAFGKRQGREFIWNDLLSLETGSLKLANGRVIEKTLYNRRTRQDEPALFVALTFERREVLDSSNIKPMNLIGVDRGENIPAVIALTDPEGCPLSRFKDSLGNPTHILRIGESYKEKQRTIQAKKEVEQRRAGGYSRKYASKAKNLADDMVRNTARDLLYYAVTQDAMLIFENLSRGFGRQGKRTFMAERQYTRMEDWLTAKLAYEGLPSKTYLSKTLAQYTSKTCSNCGFTITSADYDRVLEKLKKTATGWMTTINGKELKVEGQITYYNRYKRQNVVKDLSVELDRLSEESVNNDISSWTKGRSGEALSLLKKRFSHRPVQEKFVCLNCGFETHADEQAALNIARSWLFLRSQEYKKYQTNKTTGNTDKRAFVETWQSFYRKKLKEVWKPAV

SEQ ID NO: 33274 - protein, 979 aa, synthetic construct
  REGION 1..979: note = engineered CasX variant
QEIKRINGIRRRLVKDSNTKKAGKTGPMKTLLVRVMTPDLRERLENLRKKPENIPQPISNTSRANLNKLLTDYTEMKKAILHVYWEEFQKDPVGLMSRVAQPASKKIDQNKLKPEMDEKGNLTTAGFACSQCGQPLFVYKLEQVSEKGKAYTNYFGRCNVAEHEKLILLAQLKPEKDSDEAVTYSLGKFGQRALDFYSIHVTKESTHPVKPLAQIAGNRYASTPVGKALSDACMGTIASFLSKYQDIIIEHQKVVKGNQKRLESLRELAGKENLEYPSVTLPPQPHTKEGVDAYNEVIARVRMWVNLNLWQKLKLSRDDAKPLLRLKGFPSFPLVERQANEVDWWDMVCNVKKLINEKKEDGKVFWQNLAGYKRQEALRPYLSSEEDRKKGKKFARYQLGDLLLHLEKKHEGEDWGKVYDEAWERIDKKVEGLSKHIKLEEERRSEDAQSKAALTDWLRAKASFVIEGLKEADKDEFCRCELKLQKWYGDLRGKPFAIEAENSILDISGFSKQYNCAFIWQKDGVKKLNLYLIINYFKGGKLRFKKIKPEAFEANRFYTVINKKSGEIVPMEVNFNFDDPNLIILPLAFGKRQGREFIWNDLLSLETGSLKLANGRVIEKTLYNRRTRQDEPALFVALTFERREVLDSSNIKPMNLIGVDRGENIPAVIALTDPEGCPLSRFKDSLGNPTHILRIGESYKEKQRTIQAKKEVEQRRAGGYSRKYASKAKNLADDMVRNTARDLLYYAVTQDAMLIFENLSRGFGRQGKRTFMAERQYTRMEDWLTAKLAYEGLPSKTYLSKTLAQYTSKTCSNCGFTITSADYDRVLEKLKKTATGWMTTINGKELKVEGQITYYNRYKRQNVVKDLSVELDRLSEESVNNDISSWTKGRSGEALSLLKKRFSHRPVQEKFVCLNCGFETHADEQAALNIARSWLFLRSQEYKKYQTNKTTGNTDKRAFVETWQSFYRKKLKEVWKPAV

SEQ ID NO: 33275 - protein, 979 aa, synthetic construct
  REGION 1..979: note = engineered CasX variant
QEIKRINGIRRRLVKDSNTKKAGKTGPMKTLLVRVMTPDLRERLENLRKKPENIPQPISNTSRANLNKLLTDYTEMKKAILHVYWEEFQKDPVGLMSRVAQPASKKIDQNKLKPEMDEKGNLTTAGFACSQCGQPLFVYKLEQVSEKGKAYTNYFGRCNVAEHEKLILLAQLKPEKDSDEAVTYSLGKFGQRALDFYSIHVTKESTHPVKPLAQIAGNRYASAPVGKALSDACMGTIASFLSKYQDIIIEHQKVVKGNQKRLESLRELAGKENLEYPSVTLPPQPHTKEGVDAYNEVIARVRMWVNLNLWQKLKLSRDDAKPLLRLKGFPSFPLVERQANEVDWWDMVCNVKKLINEKKEDGKVFWQNLAGYKRQEALRPYLSSEEDRKKGKKFARYQLGDLLLHLEKKHEGEDWGKVYDEAWERIDKKVEGLSKHIKLEEERRSEDAQSKAALTDWLRAKASFVIEGLKEADKDEFCRCELKLQKWYGDLRGKPFAIEAENSILDISGFSKQYNCAFIWQKDGVKKLNLYLIINYFKGGKLRFKKIKPEAFEANRFYTVINKKSGEIVPMEVNFNFDDPNLIILPLAFGKRQGREFIWNDLLSLETGSLKLANGRVIEKTLYNRRTRQDEPALFVALTFERREVLDSSNIKPMNLIGVDRGENIPAVIALTDPEGCPLSRFKDSLGNPTHILRIGESYKEKQRTIQAKKEVEQRRAGGYSRKYASKAKNLADDMVRNTARDLLYYAVTQDAMLIFENLSRGFGRQGKRTFMAERQYTRMEDWLTAKLAYEGLPSKTYLSKTLAQYTSKTCSNCGFTITSADYDRVLEKLKKTATGWMTTINGKELKVEGQITYYNRYKRQNVVKDLSVELDRLSEESVNNDISSWTKGRSGEALSLLKKRFSHRPVQEKFVCLNCGFETHADEQAALNIARSWLFLRSQEYKKYQTNKTTGNTDKRAFVETWQSFYRKKLKEVWKPAV

SEQ ID NO: 33276 - protein, 979 aa, synthetic construct
  REGION 1..979: note = engineered CasX variant
QEIKRINGIRRRLVKDSNTKKAGKTGPMKTLLVRVMTPDLRERLENLRKKPENIPQPISNTSRANLNKLLTDYTEMKKAILHVYWEEFQKDPVGLMSRVAQPASKKIDQNKLKPEMDEKGNLTTAGFACSQCGQPLFVYKLEQVSEKGKAYTNYFGRCNVAEHEKLILLAQLKPEKDSDEAVTYSLGKFGQRALDFYSIHVTKESTHPVKPLAQIAGNRYASVPVGKALSDACMGTIASFLSKYQDIIIEHQKVVKGNQKRLESLRELAGKENLEYPSVTLPPQPHTKEGVDAYNEVIARVRMWVNLNLWQKLKLSRDDAKPLLRLKGFPSFPLVERQANEVDWWDMVCNVKKLINEKKEDGKVFWQNLAGYKRQEALRPYLSSEEDRKKGKKFARYQLGDLLLHLEKKHEGEDWGKVYDEAWERIDKKVEGLSKHIKLEEERRSEDAQSKAALTDWLRAKASFVIEGLKEADKDEFCRCELKLQKWYGDLRGKPFAIEAENSILDISGFSKQYNCAFIWQKDGVKKLNLYLIINYFKGGKLRFKKIKPEAFEANRFYTVINKKSGEIVPMEVNFNFDDPNLIILPLAFGKRQGREFIWNDLLSLETGSLKLANGRVIEKTLYNRRTRQDEPALFVALTFERREVLDSSNIKPMNLIGVDRGENIPAVIALTDPEGCPLSRFKDSLGNPTHILRIGESYKEKQRTIQAKKEVEQRRAGGYSRKYASKAKNLADDMVRNTARDLLYYAVTQDAMLIFENLSRGFGRQGKRTFMAERQYTRMEDWLTAKLAYEGLPSKTYLSKTLAQYTSKTCSNCGFTITSADYDRVLEKLKKTATGWMTTINGKELKVEGQITYYNRYKRQNVVKDLSVELDRLSEESVNNDISSWTKGRSGEALSLLKKRFSHRPVQEKFVCLNCGFETHADEQAALNIARSWLFLRSQEYKKYQTNKTTGNTDKRAFVETWQSFYRKKLKEVWKPAV

SEQ ID NO: 33277 - protein, 979 aa, synthetic construct
  REGION 1..979: note = engineered CasX variant
QEIKRINGIRRRLVKDSNTKKAGKTGPMKTLLVRVMTPDLRERLENLRKKPENIPQPISNTSRANLNKLLTDYTEMKKAILHVYWEEFQKDPVGLMSRVAQPASKKIDQNKLKPEMDEKGNLTTAGFACSQCGQPLFVYKLEQVSEKGKAYTNYFGRCNVAEHEKLIKLAQLKPEKDSDEAVTYSLGKFGQRALDFYSIHVTKESTHPVKPLAQIAGNRYASGPVGKALSDACMGTIASFLSKYQDIIIEHQKVVKGNQKRLESLRELAGKENLEYPSVTLPPQPHTKEGVDAYNEVIARVRMWVNLNLWQKLKLSRDDAKPLLRLKGFPSFPLVERQANEVDWWDMVCNVKKLINEKKEDGKVFWQNLAGYKRQEALRPYLSSEEDRKKGKKFARYQLGDLLLHLEKKHEGEDWGKVYDEAWERIDKKVEGLSKHIKLEEERRSEDAQSKAALTDWLRAKASFVIEGLKEADKDEFCRCELKLQKWYGDLRGKPFAIEAENSILDISGFSKQYNCAFIWQKDGVKKLNLYLIINYFKGGKLRFKKIKPEAFEANRFYTVINKKSGEIVPMEVNFNFDDPNLIILPLAFGKRQGREFIWNDLLSLETGSLKLANGRVIEKTLYNRRTRQDEPALFVALTFERREVLDSSNIKPMNLIGVDRGENIPAVIALTDPEGCPLSRFKDSLGNPTHILRIGESYKEKQRTIQAKKEVEQRRAGGYSRKYASKAKNLADDMVRNTARDLLYYAVTQDAMLIFENLSRGFGRQGKRTFMAERQYTRMEDWLTAKLAYEGLPSKTYLSKTLAQYTSKTCSNCGFTITSADYDRVLEKLKKTATGWMTTINGKELKVEGQITYYNRYKRQNVVKDLSVELDRLSEESVNNDISSWTKGRSGEALSLLKKRFSHRPVQEKFVCLNCGFETHADEQAALNIARSWLFLRSQEYKKYQTNKTTGNTDKRAFVETWQSFYRKKLKEVWKPAV

SEQ ID NO: 33278 - protein, 978 aa, synthetic construct
  REGION 1..978: note = engineered CasX variant
QEIKRINGIRRRLVKDSNTKKAGKTGPMKTLLVRVMTPDLRERLENLRKKPENIPQPISNTSRANLNKLLTDYTEMKKAILHVYWEEFQKDPVGLMSRVAQPASKKIDQNKLKPEMDEKGNLTTAGFACSQCGQPLFVYKLEQVSEKGKAYTNYFGRCNVAEHEKLILLAQLKPEKDSDEAVTYSLGKFGQRALDFYSIHVTKESTHPVKPLAQIAGNRYASPVGKALSDACMGTIASFLSKYQDIIIEHQKVVKGNQKRLESLRELAGKENLEYPSVTLPPQPHTKEGVDAYNEVIARVRMWVNLNLWQKLKLSRDDAKPLLRLKGFPSFPLVERQANEVDWWDMVCNVKKLINEKKEDGKVFWQNLAGYKRQEALRPYLSSEEDRKKGKKFARYQLGDLLLHLEKKHEGEDWGKVYDEAWERIDKKVEGLSKHIKLEEERRSEDAQSKAALTDWLRAKASFVIEGLKEADKDEFCRCELKLQKWYGDLRGKPFAIEAENSILDISGFSKQYNCAFIWQKDGVKKLNLYLIINYFKGGKLRFKKIKPEAFEANRFYTVINKKSGEIVPMEVNFNFDDPNLIILPLAFGKRQGREFIWNDLLSLETGSLKLANGRVIEKTLYNRRTRQDEPALFVALTFERREVLDSSNIKPMNLIGVDRGENIPAVIALTDPEGCPLSRFKDSLGNPTHILRIGESYKEKQRTIQAKKEVEQRRAGGYSRKYASKAKNLADDMVRNTARDLLYYAVTQDAMLIFENLSRGFGRQGKRTFMAERQYTRMEDWLTAKLAYEGLPSKTYLSKTLAQYTSKTCSNCGFTITSADYDRVLEKLKKTATGWMTTINGKELKVEGQITYYNRYKRQNVVKDLSVELDRLSEESVNNDISSWTKGRSGEALSLLKKRFSHRPVQEKFVCLNCGFETHADEQAALNIARSWLFLRSQEYKKYQTNKTTGNTDKRAFVETWQSFYRKKLKEVWKPAV

SEQ ID NO: 33279 - protein, 978 aa, synthetic construct
  REGION 1..978: note = engineered CasX variant
QEIKRINGIRRRLVKDSNTKKAGKTGPMKTLLVRVMTPDLRERLENLRKKPENIPQPISNTSRANLNKLLTDYTEMKKAILHVYWEEFQKDPVGLMSRVAQPASKKIDQNKLKPEMDEKGNLTTAGFACSQCGQPLFVYKLEQVSEKGKAYTNYFGRCNVAEHEKLILLAQLKPEKDSDEAVTYSLGKFGQRALDFYSIHVTKESTHPVKPLAQIAGNRYASYPVGKALSDACMGTIASFLSKYQDIIIEHQKVVKGNQKRLESLRELAGKENLEYPSVTLPPQPHTKEGVDAYNEVIARVRMWVNLNLWQKLKLSRDDAKPLLRLKGFPSFPLVERQANEVDWWDMVCNVKKLINEKKEDGKVFWQNLAGYKRQEALRPYLSSEEDRKKGKKFARYQLGDLLLHLEKKHGEDWGKVYDEAWERIDKKVEGLSKHIKLEEERRSEDAQSKAALTDWLRAKASFVIEGLKEADKDEFCRCDLKLQKWYGDLRGKPFAIEAENSILDISGFSKQYNCAFIWQKDGVKKLNLYLIINYFKGGKLRFKKIKPEAFEANRFYTVINKKSGEIVPMEVNFNFDDPNLIILPLAFGKRQGREFIWNDLLSLETGSLKLANGRVIEKTLYNRRTRQDEPALFVALTFERREVLDSSNIKPMNLIGVDRGENIPAVIALTDPEGCPLSRFKDSLGNPTHILRIGESYKEKQRTIQAKKEVEQRRAGGYSRKYASKAKNLADDMVRNTARDLLYYAVTQDAMLIFENLSRGFGRQGKRTFMAERQYTRMEDWLTAKLAYEGLPSKTYLSKTLAQYTSKTCSNCGFTITSADYDRVLEKLKKTATGWMTTINGKELKVEGQITYYNRYKRQNVVKDLSVELDRLSEESVNNDISSWTKGRSGEALSLLKKRFSHRPVQEKFVCLNCGFETHADEQAALNIARSWLFLRSQEYKKYQTNKTTGNTDKRAFVETWQSFYRKKLKEVWKPAV

SEQ ID NO: 33280 - protein, 978 aa, synthetic construct
  REGION 1..978: note = engineered CasX variant
QEIKRINGIRRRLVKDSNTKKAGKTGPMKTLLVRVMTPDLRERLENLRKKPENIPQPISNTSRANLNKLLTDYTEMKKAILHVYWEEFQKDPVGLMSRVAQPASKKIDQNKLKPEMDEKGNLTTAGFACSQCGQPLFVYKLEQVSEKGKAYTNYFGRCNVAEHEKLILLAQLKPEKDSDEAVTYSLGKFGQRALDFYSIHVTKESTHPVKPLAQIAGNRYASHPVGKALSDACMGTIASFLSKYQDIIIEHQKVVKGNQKRLESLRELAGKENLEYPSVTLPPQPHTKEGVDAYNEVIARVRMWVNLNLWQKLKLSRDDAKPLLRLKGFPSFPLVERQANEVDWWDMVCNVKKLINEKKEDGKVFWQNLAGYKRQEALRPYLSSEEDRKKGKKFARYQLGDLLLHLEKKHGEDWGKVYDEAWERIDKKVEGLSKHIKLEEERRSEDAQSKAALTDWLRAKASFVIEGLKEADKDEFCRCDLKLQKWYGDLRGKPFAIEAENSILDISGFSKQYNCAFIWQKDGVKKLNLYLIINYFKGGKLRFKKIKPEAFEANRFYTVINKKSGEIVPMEVNFNFDDPNLIILPLAFGKRQGREFIWNDLLSLETGSLKLANGRVIEKTLYNRRTRQDEPALFVALTFERREVLDSSNIKPMNLIGVDRGENIPAVIALTDPEGCPLSRFKDSLGNPTHILRIGESYKEKQRTIQAKKEVEQRRAGGYSRKYASKAKNLADDMVRNTARDLLYYAVTQDAMLIFENLSRGFGRQGKRTFMAERQYTRMEDWLTAKLAYEGLPSKTYLSKTLAQYTSKTCSNCGFTITSADYDRVLEKLKKTATGWMTTINGKELKVEGQITYYNRYKRQNVVKDLSVELDRLSEESVNNDISSWTKGRSGEALSLLKKRFSHRPVQEKFVCLNCGFETHADEQAALNIARSWLFLRSQEYKKYQTNKTTGNTDKRAFVETWQSFYRKKLKEVWKPAV

SEQ ID NO: 33281 - protein, 978 aa, synthetic construct
  REGION 1..978: note = engineered CasX variant
QEIKRINGIRRRLVKDSNTKKAGKTGPMKTLLVRVMTPDLRERLENLRKKPENIPQPISNTSRANLNKLLTDYTEMKKAILHVYWEEFQKDPVGLMSRVAQPASKKIDQNKLKPEMDEKGNLTTAGFACSQCGQPLFVYKLEQVSEKGKAYTNYFGRCNVAEHEKLILLAQLKPEKDSDEAVTYSLGKFGQRALDFYSIHVTKESTHPVKPLAQIAGNRYASSPVGKALSDACMGTIASFLSKYQDIIIEHQKVVKGNQKRLESLRELAGKENLEYPSVTLPPQPHTKEGVDAYNEVIARVRMWVNLNLWQKLKLSRDDAKPLLRLKGFPSFPLVERQANEVDWWDMVCNVKKLINEKKEDGKVFWQNLAGYKRQEALRPYLSSEEDRKKGKKFARYQLGDLLLHLEKKHGEDWGKVYDEAWERIDKKVEGLSKHIKLEEERRSEDAQSKAALTDWLRAKASFVIEGLKEADKDEFCRCDLKLQKWYGDLRGKPFAIEAENSILDISGFSKQYNCAFIWQKDGVKKLNLYLIINYFKGGKLRFKKIKPEAFEANRFYTVINKKSGEIVPMEVNFNFDDPNLIILPLAFGKRQGREFIWNDLLSLETGSLKLANGRVIEKTLYNRRTRQDEPALFVALTFERREVLDSSNIKPMNLIGVDRGENIPAVIALTDPEGCPLSRFKDSLGNPTHILRIGESYKEKQRTIQAKKEVEQRRAGGYSRKYASKAKNLADDMVRNTARDLLYYAVTQDAMLIFENLSRGFGRQGKRTFMAERQYTRMEDWLTAKLAYEGLPSKTYLSKTLAQYTSKTCSNCGFTITSADYDRVLEKLKKTATGWMTTINGKELKVEGQITYYNRYKRQNVVKDLSVELDRLSEESVNNDISSWTKGRSGEALSLLKKRFSHRPVQEKFVCLNCGFETHADEQAALNIARSWLFLRSQEYKKYQTNKTTGNTDKRAFVETWQSFYRKKLKEVWKPAV

SEQ ID NO: 33282 - protein, 978 aa, synthetic construct
  REGION 1..978: note = engineered CasX variant
QEIKRINGIRRRLVKDSNTKKAGKTGPMKTLLVRVMTPDLRERLENLRKKPENIPQPISNTSRANLNKLLTDYTEMKKAILHVYWEEFQKDPVGLMSRVAQPASKKIDQNKLKPEMDEKGNLTTAGFACSQCGQPLFVYKLEQVSEKGKAYTNYFGRCNVAEHEKLILLAQLKPEKDSDEAVTYSLGKFGQRALDFYSIHVTKESTHPVKPLAQIAGNRYASTPVGKALSDACMGTIASFLSKYQDIIIEHQKVVKGNQKRLESLRELAGKENLEYPSVTLPPQPHTKEGVDAYNEVIARVRMWVNLNLWQKLKLSRDDAKPLLRLKGFPSFPLVERQANEVDWWDMVCNVKKLINEKKEDGKVFWQNLAGYKRQEALRPYLSSEEDRKKGKKFARYQLGDLLLHLEKKHGEDWGKVYDEAWERIDKKVEGLSKHIKLEEERRSEDAQSKAALTDWLRAKASFVIEGLKEADKDEFCRCDLKLQKWYGDLRGKPFAIEAENSILDISGFSKQYNCAFIWQKDGVKKLNLYLIINYFKGGKLRFKKIKPEAFEANRFYTVINKKSGEIVPMEVNFNFDDPNLIILPLAFGKRQGREFIWNDLLSLETGSLKLANGRVIEKTLYNRRTRQDEPALFVALTFERREVLDSSNIKPMNLIGVDRGENIPAVIALTDPEGCPLSRFKDSLGNPTHILRIGESYKEKQRTIQAKKEVEQRRAGGYSRKYASKAKNLADDMVRNTARDLLYYAVTQDAMLIFENLSRGFGRQGKRTFMAERQYTRMEDWLTAKLAYEGLPSKTYLSKTLAQYTSKTCSNCGFTITSADYDRVLEKLKKTATGWMTTINGKELKVEGQITYYNRYKRQNVVKDLSVELDRLSEESVNNDISSWTKGRSGEALSLLKKRFSHRPVQEKFVCLNCGFETHADEQAALNIARSWLFLRSQEYKKYQTNKTTGNTDKRAFVETWQSFYRKKLKEVWKPAV

SEQ ID NO: 33283 - protein, 978 aa, synthetic construct
  REGION 1..978: note = engineered CasX variant
QEIKRINGIRRRLVKDSNTKKAGKTGPMKTLLVRVMTPDLRERLENLRKKPENIPQPISNTSRANLNKLLTDYTEMKKAILHVYWEEFQKDPVGLMSRVAQPASKKIDQNKLKPEMDEKGNLTTAGFACSQCGQPLFVYKLEQVSEKGKAYTNYFGRCNVAEHEKLILLAQLKPEKDSDEAVTYSLGKFGQRALDFYSIHVTKESTHPVKPLAQIAGNRYASAPVGKALSDACMGTIASFLSKYQDIIIEHQKVVKGNQKRLESLRELAGKENLEYPSVTLPPQPHTKEGVDAYNEVIARVRMWVNLNLWQKLKLSRDDAKPLLRLKGFPSFPLVERQANEVDWWDMVCNVKKLINEKKEDGKVFWQNLAGYKRQEALRPYLSSEEDRKKGKKFARYQLGDLLLHLEKKHGEDWGKVYDEAWERIDKKVEGLSKHIKLEEERRSEDAQSKAALTDWLRAKASFVIEGLKEADKDEFCRCDLKLQKWYGDLRGKPFAIEAENSILDISGFSKQYNCAFIWQKDGVKKLNLYLIINYFKGGKLRFKKIKPEAFEANRFYTVINKKSGEIVPMEVNFNFDDPNLIILPLAFGKRQGREFIWNDLLSLETGSLKLANGRVIEKTLYNRRTRQDEPALFVALTFERREVLDSSNIKPMNLIGVDRGENIPAVIALTDPEGCPLSRFKDSLGNPTHILRIGESYKEKQRTIQAKKEVEQRRAGGYSRKYASKAKNLADDMVRNTARDLLYYAVTQDAMLIFENLSRGFGRQGKRTFMAERQYTRMEDWLTAKLAYEGLPSKTYLSKTLAQYTSKTCSNCGFTITSADYDRVLEKLKKTATGWMTTINGKELKVEGQITYYNRYKRQNVVKDLSVELDRLSEESVNNDISSWTKGRSGEALSLLKKRFSHRPVQEKFVCLNCGFETHADEQAALNIARSWLFLRSQEYKKYQTNKTTGNTDKRAFVETWQSFYRKKLKEVWKPAV

SEQ ID NO: 33284 - protein, 978 aa, synthetic construct
  REGION 1..978: note = engineered CasX variant
QEIKRINGIRRRLVKDSNTKKAGKTGPMKTLLVRVMTPDLRERLENLRKKPENIPQPISNTSRANLNKLLTDYTEMKKAILHVYWEEFQKDPVGLMSRVAQPASKKIDQNKLKPEMDEKGNLTTAGFACSQCGQPLFVYKLEQVSEKGKAYTNYFGRCNVAEHEKLILLAQLKPEKDSDEAVTYSLGKFGQRALDFYSIHVTKESTHPVKPLAQIAGNRYASVPVGKALSDACMGTIASFLSKYQDIIIEHQKVVKGNQKRLESLRELAGKENLEYPSVTLPPQPHTKEGVDAYNEVIARVRMWVNLNLWQKLKLSRDDAKPLLRLKGFPSFPLVERQANEVDWWDMVCNVKKLINEKKEDGKVFWQNLAGYKRQEALRPYLSSEEDRKKGKKFARYQLGDLLLHLEKKHGEDWGKVYDEAWERIDKKVEGLSKHIKLEEERRSEDAQSKAALTDWLRAKASFVIEGLKEADKDEFCRCDLKLQKWYGDLRGKPFAIEAENSILDISGFSKQYNCAFIWQKDGVKKLNLYLIINYFKGGKLRFKKIKPEAFEANRFYTVINKKSGEIVPMEVNFNFDDPNLIILPLAFGKRQGREFIWNDLLSLETGSLKLANGRVIEKTLYNRRTRQDEPALFVALTFERREVLDSSNIKPMNLIGVDRGENIPAVIALTDPEGCPLSRFKDSLGNPTHILRIGESYKEKQRTIQAKKEVEQRRAGGYSRKYASKAKNLADDMVRNTARDLLYYAVTQDAMLIFENLSRGFGRQGKRTFMAERQYTRMEDWLTAKLAYEGLPSKTYLSKTLAQYTSKTCSNCGFTITSADYDRVLEKLKKTATGWMTTINGKELKVEGQITYYNRYKRQNVVKDLSVELDRLSEESVNNDISSWTKGRSGEALSLLKKRFSHRPVQEKFVCLNCGFETHADEQAALNIARSWLFLRSQEYKKYQTNKTTGNTDKRAFVETWQSFYRKKLKEVWKPAV

SEQ ID NO: 33285 - protein, 978 aa, synthetic construct
  REGION 1..978: note = engineered CasX variant
QEIKRINGIRRRLVKDSNTKKAGKTGPMKTLLVRVMTPDLRERLENLRKKPENIPQPISNTSRANLNKLLTDYTEMKKAILHVYWEEFQKDPVGLMSRVAQPASKKIDQNKLKPEMDEKGNLTTAGFACSQCGQPLFVYKLEQVSEKGKAYTNYFGRCNVAEHEKLIKLAQLKPEKDSDEAVTYSLGKFGQRALDFYSIHVTKESTHPVKPLAQIAGNRYASGPVGKALSDACMGTIASFLSKYQDIIIEHQKVVKGNQKRLESLRELAGKENLEYPSVTLPPQPHTKEGVDAYNEVIARVRMWVNLNLWQKLKLSRDDAKPLLRLKGFPSFPLVERQANEVDWWDMVCNVKKLINEKKEDGKVFWQNLAGYKRQEALRPYLSSEEDRKKGKKFARYQLGDLLLHLEKKHGEDWGKVYDEAWERIDKKVEGLSKHIKLEEERRSEDAQSKAALTDWLRAKASFVIEGLKEADKDEFCRCDLKLQKWYGDLRGKPFAIEAENSILDISGFSKQYNCAFIWQKDGVKKLNLYLIINYFKGGKLRFKKIKPEAFEANRFYTVINKKSGEIVPMEVNFNFDDPNLIILPLAFGKRQGREFIWNDLLSLETGSLKLANGRVIEKTLYNRRTRQDEPALFVALTFERREVLDSSNIKPMNLIGVDRGENIPAVIALTDPEGCPLSRFKDSLGNPTHILRIGESYKEKQRTIQAKKEVEQRRAGGYSRKYASKAKNLADDMVRNTARDLLYYAVTQDAMLIFENLSRGFGRQGKRTFMAERQYTRMEDWLTAKLAYEGLPSKTYLSKTLAQYTSKTCSNCGFTITSADYDRVLEKLKKTATGWMTTINGKELKVEGQITYYNRYKRQNVVKDLSVELDRLSEESVNNDISSWTKGRSGEALSLLKKRFSHRPVQEKFVCLNCGFETHADEQAALNIARSWLFLRSQEYKKYQTNKTTGNTDKRAFVETWQSFYRKKLKEVWKPAV

SEQ ID NO: 33286 - protein, 977 aa, synthetic construct
  REGION 1..977: note = engineered CasX variant
QEIKRINGIRRRLVKDSNTKKAGKTGPMKTLLVRVMTPDLRERLENLRKKPENIPQPISNTSRANLNKLLTDYTEMKKAILHVYWEEFQKDPVGLMSRVAQPASKKIDQNKLKPEMDEKGNLTTAGFACSQCGQPLFVYKLEQVSEKGKAYTNYFGRCNVAEHEKLILLAQLKPEKDSDEAVTYSLGKFGQRALDFYSIHVTKESTHPVKPLAQIAGNRYASPVGKALSDACMGTIASFLSKYQDIIIEHQKVVKGNQKRLESLRELAGKENLEYPSVTLPPQPHTKEGVDAYNEVIARVRMWVNLNLWQKLKLSRDDAKPLLRLKGFPSFPLVERQANEVDWWDMVCNVKKLINEKKEDGKVFWQNLAGYKRQEALRPYLSSEEDRKKGKKFARYQLGDLLLHLEKKHGEDWGKVYDEAWERIDKKVEGLSKHIKLEEERRSEDAQSKAALTDWLRAKASFVIEGLKEADKDEFCRCDLKLQKWYGDLRGKPFAIEAENSILDISGFSKQYNCAFIWQKDGVKKLNLYLIINYFKGGKLRFKKIKPEAFEANRFYTVINKKSGEIVPMEVNFNFDDPNLIILPLAFGKRQGREFIWNDLLSLETGSLKLANGRVIEKTLYNRRTRQDEPALFVALTFERREVLDSSNIKPMNLIGVDRGENIPAVIALTDPEGCPLSRFKDSLGNPTHILRIGESYKEKQRTIQAKKEVEQRRAGGYSRKYASKAKNLADDMVRNTARDLLYYAVTQDAMLIFENLSRGFGRQGKRTFMAERQYTRMEDWLTAKLAYEGLPSKTYLSKTLAQYTSKTCSNCGFTITSADYDRVLEKLKKTATGWMTTINGKELKVEGQITYYNRYKRQNVVKDLSVELDRLSEESVNNDISSWTKGRSGEALSLLKKRFSHRPVQEKFVCLNCGFETHADEQAALNIARSWLFLRSQEYKKYQTNKTTGNTDKRAFVETWQSFYRKKLKEVWKPAV

SEQ ID NO: 33287 - protein, 978 aa, synthetic construct
  REGION 1..978: note = engineered CasX variant
QEIKRINGIRRRLVKDSNTKKAGKTGPMKTLLVRVMTPDLRERLENLRKKPENIPQPISNTSRANLNKLLTDYTEMKKAILHVYWEEFQKDPVGLMSRVAQPASKKIDQNKLKPEMDEKGNLTTAGFACSQCGQPLFVYKLEQVSEKGKAYTNYFGRCNVAEHEKLILLAQLKPEKDSDEAVTYSLGKFGQRALDFYSIHVTKESTHPVKPLAQIAGNRYASYPVGKALSDACMGTIASFLSKYQDIIIEHQKVVKGNQKRLESLRELAGKENLEYPSVTLPPQPHTKEGVDAYNEVIARVRMWVNLNLWQKLKLSRDDAKPLLRLKGFPSFPLVERQANEVDWWDMVCNVKKLINEKKEDGKVFWQNLAGYKRQEALRPYLSSEEDRKKGKKFARYQLGDLLLHLEKKHGEDWGKVYDEAWERIDKKVEGLSKHIKLEEERRSEDAQSKAALTDWLRAKASFVIEGLKEADKDEFCRCELKLQKWYGDLRGKPFAIEAENSILDISGFSKQYNCAFIWQKDGVKKLNLYLIINYFKGGKLRFKKIKPEAFEANRFYTVINKKSGEIVPMEVNFNFDDPNLIILPLAFGKRFGREFIWNDLLSLETGSLKLANGRVIEKTLYNRRTRQDEPALFVALTFERREVLDSSNIKPMNLIGVDRGENIPAVIALTDPEGCPLSRFKDSLGNPTHILRIGESYKEKQRTIQAKKEVEQRRAGGYSRKYASKAKNLADDMVRNTARDLLYYAVTQDAMLIFENLSRGFGRQGKRTFMAERQYTRMEDWLTAKLAYEGLPSKTYLSKTLAQYTSKTCSNCGFTITSADYDRVLEKLKKTATGWMTTINGKELKVEGQITYYNRYKRQNVVKDLSVELDRLSEESVNNDISSWTKGRSGEALSLLKKRFSHRPVQEKFVCLNCGFETHADEQAALNIARSWLFLRSQEYKKYQTNKTTGNTDKRAFVETWQSFYRKKLKEVWKPAV

SEQ ID NO: 33288 - protein, 978 aa, synthetic construct
  REGION 1..978: note = engineered CasX variant
QEIKRINGIRRRLVKDSNTKKAGKTGPMKTLLVRVMTPDLRERLENLRKKPENIPQPISNTSRANLNKLLTDYTEMKKAILHVYWEEFQKDPVGLMSRVAQPASKKIDQNKLKPEMDEKGNLTTAGFACSQCGQPLFVYKLEQVSEKGKAYTNYFGRCNVAEHEKLILLAQLKPEKDSDEAVTYSLGKFGQRALDFYSIHVTKESTHPVKPLAQIAGNRYASHPVGKALSDACMGTIASFLSKYQDIIIEHQKVVKGNQKRLESLRELAGKENLEYPSVTLPPQPHTKEGVDAYNEVIARVRMWVNLNLWQKLKLSRDDAKPLLRLKGFPSFPLVERQANEVDWWDMVCNVKKLINEKKEDGKVFWQNLAGYKRQEALRPYLSSEEDRKKGKKFARYQLGDLLLHLEKKHGEDWGKVYDEAWERIDKKVEGLSKHIKLEEERRSEDAQSKAALTDWLRAKASFVIEGLKEADKDEFCRCELKLQKWYGDLRGKPFAIEAENSILDISGFSKQYNCAFIWQKDGVKKLNLYLIINYFKGGKLRFKKIKPEAFEANRFYTVINKKSGEIVPMEVNFNFDDPNLIILPLAFGKRFGREFIWNDLLSLETGSLKLANGRVIEKTLYNRRTRQDEPALFVALTFERREVLDSSNIKPMNLIGVDRGENIPAVIALTDPEGCPLSRFKDSLGNPTHILRIGESYKEKQRTIQAKKEVEQRRAGGYSRKYASKAKNLADDMVRNTARDLLYYAVTQDAMLIFENLSRGFGRQGKRTFMAERQYTRMEDWLTAKLAYEGLPSKTYLSKTLAQYTSKTCSNCGFTITSADYDRVLEKLKKTATGWMTTINGKELKVEGQITYYNRYKRQNVVKDLSVELDRLSEESVNNDISSWTKGRSGEALSLLKKRFSHRPVQEKFVCLNCGFETHADEQAALNIARSWLFLRSQEYKKYQTNKTTGNTDKRAFVETWQSFYRKKLKEVWKPAV

SEQ ID NO: 33289 - protein, 978 aa, synthetic construct
  REGION 1..978: note = engineered CasX variant
QEIKRINGIRRRLVKDSNTKKAGKTGPMKTLLVRVMTPDLRERLENLRKKPENIPQPISNTSRANLNKLLTDYTEMKKAILHVYWEEFQKDPVGLMSRVAQPASKKIDQNKLKPEMDEKGNLTTAGFACSQCGQPLFVYKLEQVSEKGKAYTNYFGRCNVAEHEKLILLAQLKPEKDSDEAVTYSLGKFGQRALDFYSIHVTKESTHPVKPLAQIAGNRYASSPVGKALSDACMGTIASFLSKYQDIIIEHQKVVKGNQKRLESLRELAGKENLEYPSVTLPPQPHTKEGVDAYNEVIARVRMWVNLNLWQKLKLSRDDAKPLLRLKGFPSFPLVERQANEVDWWDMVCNVKKLINEKKEDGKVFWQNLAGYKRQEALRPYLSSEEDRKKGKKFARYQLGDLLLHLEKKHGEDWGKVYDEAWERIDKKVEGLSKHIKLEEERRSEDAQSKAALTDWLRAKASFVIEGLKEADKDEFCRCELKLQKWYGDLRGKPFAIEAENSILDISGFSKQYNCAFIWQKDGVKKLNLYLIINYFKGGKLRFKKIKPEAFEANRFYTVINKKSGEIVPMEVNFNFDDPNLIILPLAFGKRFGREFIWNDLLSLETGSLKLANGRVIEKTLYNRRTRQDEPALFVALTFERREVLDSSNIKPMNLIGVDRGENIPAVIALTDPEGCPLSRFKDSLGNPTHILRIGESYKEKQRTIQAKKEVEQRRAGGYSRKYASKAKNLADDMVRNTARDLLYYAVTQDAMLIFENLSRGFGRQGKRTFMAERQYTRMEDWLTAKLAYEGLPSKTYLSKTLAQYTSKTCSNCGFTITSADYDRVLEKLKKTATGWMTTINGKELKVEGQITYYNRYKRQNVVKDLSVELDRLSEESVNNDISSWTKGRSGEALSLLKKRFSHRPVQEKFVCLNCGFETHADEQAALNIARSWLFLRSQEYKKYQTNKTTGNTDKRAFVETWQSFYRKKLKEVWKPAV

SEQ ID NO: 33290 - protein, 978 aa, synthetic construct
  REGION 1..978: note = engineered CasX variant
QEIKRINGIRRRLVKDSNTKKAGKTGPMKTLLVRVMTPDLRERLENLRKKPENIPQPISNTSRANLNKLLTDYTEMKKAILHVYWEEFQKDPVGLMSRVAQPASKKIDQNKLKPEMDEKGNLTTAGFACSQCGQPLFVYKLEQVSEKGKAYTNYFGRCNVAEHEKLILLAQLKPEKDSDEAVTYSLGKFGQRALDFYSIHVTKESTHPVKPLAQIAGNRYASTPVGKALSDACMGTIASFLSKYQDIIIEHQKVVKGNQKRLESLRELAGKENLEYPSVTLPPQPHTKEGVDAYNEVIARVRMWVNLNLWQKLKLSRDDAKPLLRLKGFPSFPLVERQANEVDWWDMVCNVKKLINEKKEDGKVFWQNLAGYKRQEALRPYLSSEEDRKKGKKFARYQLGDLLLHLEKKHGEDWGKVYDEAWERIDKKVEGLSKHIKLEEERRSEDAQSKAALTDWLRAKASFVIEGLKEADKDEFCRCELKLQKWYGDLRGKPFAIEAENSILDISGFSKQYNCAFIWQKDGVKKLNLYLIINYFKGGKLRFKKIKPEAFEANRFYTVINKKSGEIVPMEVNFNFDDPNLIILPLAFGKRFGREFIWNDLLSLETGSLKLANGRVIEKTLYNRRTRQDEPALFVALTFERREVLDSSNIKPMNLIGVDRGENIPAVIALTDPEGCPLSRFKDSLGNPTHILRIGESYKEKQRTIQAKKEVEQRRAGGYSRKYASKAKNLADDMVRNTARDLLYYAVTQDAMLIFENLSRGFGRQGKRTFMAERQYTRMEDWLTAKLAYEGLPSKTYLSKTLAQYTSKTCSNCGFTITSADYDRVLEKLKKTATGWMTTINGKELKVEGQITYYNRYKRQNVVKDLSVELDRLSEESVNNDISSWTKGRSGEALSLLKKRFSHRPVQEKFVCLNCGFETHADEQAALNIARSWLFLRSQEYKKYQTNKTTGNTDKRAFVETWQSFYRKKLKEVWKPAV

SEQ ID NO: 33291 - protein, 978 aa, synthetic construct
  REGION 1..978: note = engineered CasX variant
QEIKRINGIRRRLVKDSNTKKAGKTGPMKTLLVRVMTPDLRERLENLRKKPENIPQPISNTSRANLNKLLTDYTEMKKAILHVYWEEFQKDPVGLMSRVAQPASKKIDQNKLKPEMDEKGNLTTAGFACSQCGQPLFVYKLEQVSEKGKAYTNYFGRCNVAEHEKLILLAQLKPEKDSDEAVTYSLGKFGQRALDFYSIHVTKESTHPVKPLAQIAGNRYASAPVGKALSDACMGTIASFLSKYQDIIIEHQKVVKGNQKRLESLRELAGKENLEYPSVTLPPQPHTKEGVDAYNEVIARVRMWVNLNLWQKLKLSRDDAKPLLRLKGFPSFPLVERQANEVDWWDMVCNVKKLINEKKEDGKVFWQNLAGYKRQEALRPYLSSEEDRKKGKKFARYQLGDLLLHLEKKHGEDWGKVYDEAWERIDKKVEGLSKHIKLEEERRSEDAQSKAALTDWLRAKASFVIEGLKEADKDEFCRCELKLQKWYGDLRGKPFAIEAENSILDISGFSKQYNCAFIWQKDGVKKLNLYLIINYFKGGKLRFKKIKPEAFEANRFYTVINKKSGEIVPMEVNFNFDDPNLIILPLAFGKRFGREFIWNDLLSLETGSLKLANGRVIEKTLYNRRTRQDEPALFVALTFERREVLDSSNIKPMNLIGVDRGENIPAVIALTDPEGCPLSRFKDSLGNPTHILRIGESYKEKQRTIQAKKEVEQRRAGGYSRKYASKAKNLADDMVRNTARDLLYYAVTQDAMLIFENLSRGFGRQGKRTFMAERQYTRMEDWLTAKLAYEGLPSKTYLSKTLAQYTSKTCSNCGFTITSADYDRVLEKLKKTATGWMTTINGKELKVEGQITYYNRYKRQNVVKDLSVELDRLSEESVNNDISSWTKGRSGEALSLLKKRFSHRPVQEKFVCLNCGFETHADEQAALNIARSWLFLRSQEYKKYQTNKTTGNTDKRAFVETWQSFYRKKLKEVWKPAV

SEQ ID NO: 33292 - protein, 978 aa, synthetic construct
  REGION 1..978: note = engineered CasX variant
QEIKRINGIRRRLVKDSNTKKAGKTGPMKTLLVRVMTPDLRERLENLRKKPENIPQPISNTSRANLNKLLTDYTEMKKAILHVYWEEFQKDPVGLMSRVAQPASKKIDQNKLKPEMDEKGNLTTAGFACSQCGQPLFVYKLEQVSEKGKAYTNYFGRCNVAEHEKLILLAQLKPEKDSDEAVTYSLGKFGQRALDFYSIHVTKESTHPVKPLAQIAGNRYASVPVGKALSDACMGTIASFLSKYQDIIIEHQKVVKGNQKRLESLRELAGKENLEYPSVTLPPQPHTKEGVDAYNEVIARVRMWVNLNLWQKLKLSRDDAKPLLRLKGFPSFPLVERQANEVDWWDMVCNVKKLINEKKEDGKVFWQNLAGYKRQEALRPYLSSEEDRKKGKKFARYQLGDLLLHLEKKHGEDWGKVYDEAWERIDKKVEGLSKHIKLEEERRSEDAQSKAALTDWLRAKASFVIEGLKEADKDEFCRCELKLQKWYGDLRGKPFAIEAENSILDISGFSKQYNCAFIWQKDGVKKLNLYLIINYFKGGKLRFKKIKPEAFEANRFYTVINKKSGEIVPMEVNFNFDDPNLIILPLAFGKRFGREFIWNDLLSLETGSLKLANGRVIEKTLYNRRTRQDEPALFVALTFERREVLDSSNIKPMNLIGVDRGENIPAVIALTDPEGCPLSRFKDSLGNPTHILRIGESYKEKQRTIQAKKEVEQRRAGGYSRKYASKAKNLADDMVRNTARDLLYYAVTQDAMLIFENLSRGFGRQGKRTFMAERQYTRMEDWLTAKLAYEGLPSKTYLSKTLAQYTSKTCSNCGFTITSADYDRVLEKLKKTATGWMTTINGKELKVEGQITYYNRYKRQNVVKDLSVELDRLSEESVNNDISSWTKGRSGEALSLLKKRFSHRPVQEKFVCLNCGFETHADEQAALNIARSWLFLRSQEYKKYQTNKTTGNTDKRAFVETWQSFYRKKLKEVWKPAV

SEQ ID NO: 33293 - protein, 978 aa, synthetic construct
  REGION 1..978: note = engineered CasX variant
QEIKRINGIRRRLVKDSNTKKAGKTGPMKTLLVRVMTPDLRERLENLRKKPENIPQPISNTSRANLNKLLTDYTEMKKAILHVYWEEFQKDPVGLMSRVAQPASKKIDQNKLKPEMDEKGNLTTAGFACSQCGQPLFVYKLEQVSEKGKAYTNYFGRCNVAEHEKLIKLAQLKPEKDSDEAVTYSLGKFGQRALDFYSIHVTKESTHPVKPLAQIAGNRYASGPVGKALSDACMGTIASFLSKYQDIIIEHQKVVKGNQKRLESLRELAGKENLEYPSVTLPPQPHTKEGVDAYNEVIARVRMWVNLNLWQKLKLSRDDAKPLLRLKGFPSFPLVERQANEVDWWDMVCNVKKLINEKKEDGKVFWQNLAGYKRQEALRPYLSSEEDRKKGKKFARYQLGDLLLHLEKKHGEDWGKVYDEAWERIDKKVEGLSKHIKLEEERRSEDAQSKAALTDWLRAKASFVIEGLKEADKDEFCRCELKLQKWYGDLRGKPFAIEAENSILDISGFSKQYNCAFIWQKDGVKKLNLYLIINYFKGGKLRFKKIKPEAFEANRFYTVINKKSGEIVPMEVNFNFDDPNLIILPLAFGKRFGREFIWNDLLSLETGSLKLANGRVIEKTLYNRRTRQDEPALFVALTFERREVLDSSNIKPMNLIGVDRGENIPAVIALTDPEGCPLSRFKDSLGNPTHILRIGESYKEKQRTIQAKKEVEQRRAGGYSRKYASKAKNLADDMVRNTARDLLYYAVTQDAMLIFENLSRGFGRQGKRTFMAERQYTRMEDWLTAKLAYEGLPSKTYLSKTLAQYTSKTCSNCGFTITSADYDRVLEKLKKTATGWMTTINGKELKVEGQITYYNRYKRQNVVKDLSVELDRLSEESVNNDISSWTKGRSGEALSLLKKRFSHRPVQEKFVCLNCGFETHADEQAALNIARSWLFLRSQEYKKYQTNKTTGNTDKRAFVETWQSFYRKKLKEVWKPAV

SEQ ID NO: 33294 - protein, 977 aa, synthetic construct
  REGION 1..977: note = engineered CasX variant
QEIKRINGIRRRLVKDSNTKKAGKTGPMKTLLVRVMTPDLRERLENLRKKPENIPQPISNTSRANLNKLLTDYTEMKKAILHVYWEEFQKDPVGLMSRVAQPASKKIDQNKLKPEMDEKGNLTTAGFACSQCGQPLFVYKLEQVSEKGKAYTNYFGRCNVAEHEKLILLAQLKPEKDSDEAVTYSLGKFGQRALDFYSIHVTKESTHPVKPLAQIAGNRYASPVGKALSDACMGTIASFLSKYQDIIIEHQKVVKGNQKRLESLRELAGKENLEYPSVTLPPQPHTKEGVDAYNEVIARVRMWVNLNLWQKLKLSRDDAKPLLRLKGFPSFPLVERQANEVDWWDMVCNVKKLINEKKEDGKVFWQNLAGYKRQEALRPYLSSEEDRKKGKKFARYQLGDLLLHLEKKHGEDWGKVYDEAWERIDKKVEGLSKHIKLEEERRSEDAQSKAALTDWLRAKASFVIEGLKEADKDEFCRCELKLQKWYGDLRGKPFAIEAENSILDISGFSKQYNCAFIWQKDGVKKLNLYLIINYFKGGKLRFKKIKPEAFEANRFYTVINKKSGEIVPMEVNFNFDDPNLIILPLAFGKRFGREFIWNDLLSLETGSLKLANGRVIEKTLYNRRTRQDEPALFVALTFERREVLDSSNIKPMNLIGVDRGENIPAVIALTDPEGCPLSRFKDSLGNPTHILRIGESYKEKQRTIQAKKEVEQRRAGGYSRKYASKAKNLADDMVRNTARDLLYYAVTQDAMLIFENLSRGFGRQGKRTFMAERQYTRMEDWLTAKLAYEGLPSKTYLSKTLAQYTSKTCSNCGFTITSADYDRVLEKLKKTATGWMTTINGKELKVEGQITYYNRYKRQNVVKDLSVELDRLSEESVNNDISSWTKGRSGEALSLLKKRFSHRPVQEKFVCLNCGFETHADEQAALNIARSWLFLRSQEYKKYQTNKTTGNTDKRAFVETWQSFYRKKLKEVWKPAV

SEQ ID NO: 33295 - protein, 978 aa, synthetic construct
  REGION 1..978: note = engineered CasX variant
QEIKRINGIRRRLVKDSNTKKAGKTGPMKTLLVRVMTPDLRERLENLRKKPENIPQPISNTSRANLNKLLTDYTEMKKAILHVYWEEFQKDPVGLMSRVAQPASKKIDQNKLKPEMDEKGNLTTAGFACSQCGQPLFVYKLEQVSEKGKAYTNYFGRCNVAEHEKLILLAQLKPEKDSDEAVTYSLGKFGQRALDFYSIHVTKESTHPVKPLAQIAGNRYASYPVGKALSDACMGTIASFLSKYQDIIIEHQKVVKGNQKRLESLRELAGKENLEYPSVTLPPQPHTKEGVDAYNEVIARVRMWVNLNLWQKLKLSRDDAKPLLRLKGFPSFPLVERQANEVDWWDMVCNVKKLINEKKEDGKVFWQNLAGYKRQEALRPYLSSEEDRKKGKKFARYQLGDLLLHLEKKHGEDWGKVYDEAWERIDKKVEGLSKHIKLEEERRSEDAQSKAALTDWLRAKASFVIEGLKEADKDEFCRCELKLQKWYGDLRGKPFAIEAENSILDISGFSKQYNCAFIWQKDGVKKLNLYLIINYFKGGKLRFKKIKPEAFEANRFYTVINKKSGEIVPMEVNFNFDDPNLIILPLAFGKRVGREFIWNDLLSLETGSLKLANGRVIEKTLYNRRTRQDEPALFVALTFERREVLDSSNIKPMNLIGVDRGENIPAVIALTDPEGCPLSRFKDSLGNPTHILRIGESYKEKQRTIQAKKEVEQRRAGGYSRKYASKAKNLADDMVRNTARDLLYYAVTQDAMLIFENLSRGFGRQGKRTFMAERQYTRMEDWLTAKLAYEGLPSKTYLSKTLAQYTSKTCSNCGFTITSADYDRVLEKLKKTATGWMTTINGKELKVEGQITYYNRYKRQNVVKDLSVELDRLSEESVNNDISSWTKGRSGEALSLLKKRFSHRPVQEKFVCLNCGFETHADEQAALNIARSWLFLRSQEYKKYQTNKTTGNTDKRAFVETWQSFYRKKLKEVWKPAV

SEQ ID NO: 33296 - protein, 978 aa, synthetic construct
  REGION 1..978: note = engineered CasX variant
QEIKRINGIRRRLVKDSNTKKAGKTGPMKTLLVRVMTPDLRERLENLRKKPENIPQPISNTSRANLNKLLTDYTEMKKAILHVYWEEFQKDPVGLMSRVAQPASKKIDQNKLKPEMDEKGNLTTAGFACSQCGQPLFVYKLEQVSEKGKAYTNYFGRCNVAEHEKLILLAQLKPEKDSDEAVTYSLGKFGQRALDFYSIHVTKESTHPVKPLAQIAGNRYASHPVGKALSDACMGTIASFLSKYQDIIIEHQKVVKGNQKRLESLRELAGKENLEYPSVTLPPQPHTKEGVDAYNEVIARVRMWVNLNLWQKLKLSRDDAKPLLRLKGFPSFPLVERQANEVDWWDMVCNVKKLINEKKEDGKVFWQNLAGYKRQEALRPYLSSEEDRKKGKKFARYQLGDLLLHLEKKHGEDWGKVYDEAWERIDKKVEGLSKHIKLEEERRSEDAQSKAALTDWLRAKASFVIEGLKEADKDEFCRCELKLQKWYGDLRGKPFAIEAENSILDISGFSKQYNCAFIWQKDGVKKLNLYLIINYFKGGKLRFKKIKPEAFEANRFYTVINKKSGEIVPMEVNFNFDDPNLIILPLAFGKRVGREFIWNDLLSLETGSLKLANGRVIEKTLYNRRTRQDEPALFVALTFERREVLDSSNIKPMNLIGVDRGENIPAVIALTDPEGCPLSRFKDSLGNPTHILRIGESYKEKQRTIQAKKEVEQRRAGGYSRKYASKAKNLADDMVRNTARDLLYYAVTQDAMLIFENLSRGFGRQGKRTFMAERQYTRMEDWLTAKLAYEGLPSKTYLSKTLAQYTSKTCSNCGFTITSADYDRVLEKLKKTATGWMTTINGKELKVEGQITYYNRYKRQNVVKDLSVELDRLSEESVNNDISSWTKGRSGEALSLLKKRFSHRPVQEKFVCLNCGFETHADEQAALNIARSWLFLRSQEYKKYQTNKTTGNTDKRAFVETWQSFYRKKLKEVWKPAV

SEQ ID NO: 33297 - protein, 978 aa, synthetic construct
  REGION 1..978: note = engineered CasX variant
QEIKRINGIRRRLVKDSNTKKAGKTGPMKTLLVRVMTPDLRERLENLRKKPENIPQPISNTSRANLNKLLTDYTEMKKAILHVYWEEFQKDPVGLMSRVAQPASKKIDQNKLKPEMDEKGNLTTAGFACSQCGQPLFVYKLEQVSEKGKAYTNYFGRCNVAEHEKLILLAQLKPEKDSDEAVTYSLGKFGQRALDFYSIHVTKESTHPVKPLAQIAGNRYASSPVGKALSDACMGTIASFLSKYQDIIIEHQKVVKGNQKRLESLRELAGKENLEYPSVTLPPQPHTKEGVDAYNEVIARVRMWVNLNLWQKLKLSRDDAKPLLRLKGFPSFPLVERQANEVDWWDMVCNVKKLINEKKEDGKVFWQNLAGYKRQEALRPYLSSEEDRKKGKKFARYQLGDLLLHLEKKHGEDWGKVYDEAWERIDKKVEGLSKHIKLEEERRSEDAQSKAALTDWLRAKASFVIEGLKEADKDEFCRCELKLQKWYGDLRGKPFAIEAENSILDISGFSKQYNCAFIWQKDGVKKLNLYLIINYFKGGKLRFKKIKPEAFEANRFYTVINKKSGEIVPMEVNFNFDDPNLIILPLAFGKRVGREFIWNDLLSLETGSLKLANGRVIEKTLYNRRTRQDEPALFVALTFERREVLDSSNIKPMNLIGVDRGENIPAVIALTDPEGCPLSRFKDSLGNPTHILRIGESYKEKQRTIQAKKEVEQRRAGGYSRKYASKAKNLADDMVRNTARDLLYYAVTQDAMLIFENLSRGFGRQGKRTFMAERQYTRMEDWLTAKLAYEGLPSKTYLSKTLAQYTSKTCSNCGFTITSADYDRVLEKLKKTATGWMTTINGKELKVEGQITYYNRYKRQNVVKDLSVELDRLSEESVNNDISSWTKGRSGEALSLLKKRFSHRPVQEKFVCLNCGFETHADEQAALNIARSWLFLRSQEYKKYQTNKTTGNTDKRAFVETWQSFYRKKLKEVWKPAV

SEQ ID NO: 33298 - protein, 978 aa, synthetic construct
  REGION 1..978: note = engineered CasX variant
QEIKRINGIRRRLVKDSNTKKAGKTGPMKTLLVRVMTPDLRERLENLRKKPENIPQPISNTSRANLNKLLTDYTEMKKAILHVYWEEFQKDPVGLMSRVAQPASKKIDQNKLKPEMDEKGNLTTAGFACSQCGQPLFVYKLEQVSEKGKAYTNYFGRCNVAEHEKLILLAQLKPEKDSDEAVTYSLGKFGQRALDFYSIHVTKESTHPVKPLAQIAGNRYASTPVGKALSDACMGTIASFLSKYQDIIIEHQKVVKGNQKRLESLRELAGKENLEYPSVTLPPQPHTKEGVDAYNEVIARVRMWVNLNLWQKLKLSRDDAKPLLRLKGFPSFPLVERQANEVDWWDMVCNVKKLINEKKEDGKVFWQNLAGYKRQEALRPYLSSEEDRKKGKKFARYQLGDLLLHLEKKHGEDWGKVYDEAWERIDKKVEGLSKHIKLEEERRSEDAQSKAALTDWLRAKASFVIEGLKEADKDEFCRCELKLQKWYGDLRGKPFAIEAENSILDISGFSKQYNCAFIWQKDGVKKLNLYLIINYFKGGKLRFKKIKPEAFEANRFYTVINKKSGEIVPMEVNFNFDDPNLIILPLAFGKRVGREFIWNDLLSLETGSLKLANGRVIEKTLYNRRTRQDEPALFVALTFERREVLDSSNIKPMNLIGVDRGENIPAVIALTDPEGCPLSRFKDSLGNPTHILRIGESYKEKQRTIQAKKEVEQRRAGGYSRKYASKAKNLADDMVRNTARDLLYYAVTQDAMLIFENLSRGFGRQGKRTFMAERQYTRMEDWLTAKLAYEGLPSKTYLSKTLAQYTSKTCSNCGFTITSADYDRVLEKLKKTATGWMTTINGKELKVEGQITYYNRYKRQNVVKDLSVELDRLSEESVNNDISSWTKGRSGEALSLLKKRFSHRPVQEKFVCLNCGFETHADEQAALNIARSWLFLRSQEYKKYQTNKTTGNTDKRAFVETWQSFYRKKLKEVWKPAV

SEQ ID NO: 33299 - protein, 978 aa, synthetic construct
  REGION 1..978: note = engineered CasX variant
QEIKRINGIRRRLVKDSNTKKAGKTGPMKTLLVRVMTPDLRERLENLRKKPENIPQPISNTSRANLNKLLTDYTEMKKAILHVYWEEFQKDPVGLMSRVAQPASKKIDQNKLKPEMDEKGNLTTAGFACSQCGQPLFVYKLEQVSEKGKAYTNYFGRCNVAEHEKLILLAQLKPEKDSDEAVTYSLGKFGQRALDFYSIHVTKESTHPVKPLAQIAGNRYASAPVGKALSDACMGTIASFLSKYQDIIIEHQKVVKGNQKRLESLRELAGKENLEYPSVTLPPQPHTKEGVDAYNEVIARVRMWVNLNLWQKLKLSRDDAKPLLRLKGFPSFPLVERQANEVDWWDMVCNVKKLINEKKEDGKVFWQNLAGYKRQEALRPYLSSEEDRKKGKKFARYQLGDLLLHLEKKHGEDWGKVYDEAWERIDKKVEGLSKHIKLEEERRSEDAQSKAALTDWLRAKASFVIEGLKEADKDEFCRCELKLQKWYGDLRGKPFAIEAENSILDISGFSKQYNCAFIWQKDGVKKLNLYLIINYFKGGKLRFKKIKPEAFEANRFYTVINKKSGEIVPMEVNFNFDDPNLIILPLAFGKRVGREFIWNDLLSLETGSLKLANGRVIEKTLYNRRTRQDEPALFVALTFERREVLDSSNIKPMNLIGVDRGENIPAVIALTDPEGCPLSRFKDSLGNPTHILRIGESYKEKQRTIQAKKEVEQRRAGGYSRKYASKAKNLADDMVRNTARDLLYYAVTQDAMLIFENLSRGFGRQGKRTFMAERQYTRMEDWLTAKLAYEGLPSKTYLSKTLAQYTSKTCSNCGFTITSADYDRVLEKLKKTATGWMTTINGKELKVEGQITYYNRYKRQNVVKDLSVELDRLSEESVNNDISSWTKGRSGEALSLLKKRFSHRPVQEKFVCLNCGFETHADEQAALNIARSWLFLRSQEYKKYQTNKTTGNTDKRAFVETWQSFYRKKLKEVWKPAV

SEQ ID NO: 33300 - protein, 978 aa, synthetic construct
  REGION 1..978: note = engineered CasX variant
QEIKRINGIRRRLVKDSNTKKAGKTGPMKTLLVRVMTPDLRERLENLRKKPENIPQPISNTSRANLNKLLTDYTEMKKAILHVYWEEFQKDPVGLMSRVAQPASKKIDQNKLKPEMDEKGNLTTAGFACSQCGQPLFVYKLEQVSEKGKAYTNYFGRCNVAEHEKLILLAQLKPEKDSDEAVTYSLGKFGQRALDFYSIHVTKESTHPVKPLAQIAGNRYASVPVGKALSDACMGTIASFLSKYQDIIIEHQKVVKGNQKRLESLRELAGKENLEYPSVTLPPQPHTKEGVDAYNEVIARVRMWVNLNLWQKLKLSRDDAKPLLRLKGFPSFPLVERQANEVDWWDMVCNVKKLINEKKEDGKVFWQNLAGYKRQEALRPYLSSEEDRKKGKKFARYQLGDLLLHLEKKHGEDWGKVYDEAWERIDKKVEGLSKHIKLEEERRSEDAQSKAALTDWLRAKASFVIEGLKEADKDEFCRCELKLQKWYGDLRGKPFAIEAENSILDISGFSKQYNCAFIWQKDGVKKLNLYLIINYFKGGKLRFKKIKPEAFEANRFYTVINKKSGEIVPMEVNFNFDDPNLIILPLAFGKRVGREFIWNDLLSLETGSLKLANGRVIEKTLYNRRTRQDEPALFVALTFERREVLDSSNIKPMNLIGVDRGENIPAVIALTDPEGCPLSRFKDSLGNPTHILRIGESYKEKQRTIQAKKEVEQRRAGGYSRKYASKAKNLADDMVRNTARDLLYYAVTQDAMLIFENLSRGFGRQGKRTFMAERQYTRMEDWLTAKLAYEGLPSKTYLSKTLAQYTSKTCSNCGFTITSADYDRVLEKLKKTATGWMTTINGKELKVEGQITYYNRYKRQNVVKDLSVELDRLSEESVNNDISSWTKGRSGEALSLLKKRFSHRPVQEKFVCLNCGFETHADEQAALNIARSWLFLRSQEYKKYQTNKTTGNTDKRAFVETWQSFYRKKLKEVWKPAV

SEQ ID NO: 33301 - protein, 978 aa, synthetic construct
  REGION 1..978: note = engineered CasX variant
QEIKRINGIRRRLVKDSNTKKAGKTGPMKTLLVRVMTPDLRERLENLRKKPENIPQPISNTSRANLNKLLTDYTEMKKAILHVYWEEFQKDPVGLMSRVAQPASKKIDQNKLKPEMDEKGNLTTAGFACSQCGQPLFVYKLEQVSEKGKAYTNYFGRCNVAEHEKLIKLAQLKPEKDSDEAVTYSLGKFGQRALDFYSIHVTKESTHPVKPLAQIAGNRYASGPVGKALSDACMGTIASFLSKYQDIIIEHQKVVKGNQKRLESLRELAGKENLEYPSVTLPPQPHTKEGVDAYNEVIARVRMWVNLNLWQKLKLSRDDAKPLLRLKGFPSFPLVERQANEVDWWDMVCNVKKLINEKKEDGKVFWQNLAGYKRQEALRPYLSSEEDRKKGKKFARYQLGDLLLHLEKKHGEDWGKVYDEAWERIDKKVEGLSKHIKLEEERRSEDAQSKAALTDWLRAKASFVIEGLKEADKDEFCRCELKLQKWYGDLRGKPFAIEAENSILDISGFSKQYNCAFIWQKDGVKKLNLYLIINYFKGGKLRFKKIKPEAFEANRFYTVINKKSGEIVPMEVNFNFDDPNLIILPLAFGKRVGREFIWNDLLSLETGSLKLANGRVIEKTLYNRRTRQDEPALFVALTFERREVLDSSNIKPMNLIGVDRGENIPAVIALTDPEGCPLSRFKDSLGNPTHILRIGESYKEKQRTIQAKKEVEQRRAGGYSRKYASKAKNLADDMVRNTARDLLYYAVTQDAMLIFENLSRGFGRQGKRTFMAERQYTRMEDWLTAKLAYEGLPSKTYLSKTLAQYTSKTCSNCGFTITSADYDRVLEKLKKTATGWMTTINGKELKVEGQITYYNRYKRQNVVKDLSVELDRLSEESVNNDISSWTKGRSGEALSLLKKRFSHRPVQEKFVCLNCGFETHADEQAALNIARSWLFLRSQEYKKYQTNKTTGNTDKRAFVETWQSFYRKKLKEVWKPAV

SEQ ID NO: 33302 - protein, 977 aa, synthetic construct
  REGION 1..977: note = engineered CasX variant
QEIKRINGIRRRLVKDSNTKKAGKTGPMKTLLVRVMTPDLRERLENLRKKPENIPQPISNTSRANLNKLLTDYTEMKKAILHVYWEEFQKDPVGLMSRVAQPASKKIDQNKLKPEMDEKGNLTTAGFACSQCGQPLFVYKLEQVSEKGKAYTNYFGRCNVAEHEKLILLAQLKPEKDSDEAVTYSLGKFGQRALDFYSIHVTKESTHPVKPLAQIAGNRYASPVGKALSDACMGTIASFLSKYQDIIIEHQKVVKGNQKRLESLRELAGKENLEYPSVTLPPQPHTKEGVDAYNEVIARVRMWVNLNLWQKLKLSRDDAKPLLRLKGFPSFPLVERQANEVDWWDMVCNVKKLINEKKEDGKVFWQNLAGYKRQEALRPYLSSEEDRKKGKKFARYQLGDLLLHLEKKHGEDWGKVYDEAWERIDKKVEGLSKHIKLEEERRSEDAQSKAALTDWLRAKASFVIEGLKEADKDEFCRCELKLQKWYGDLRGKPFAIEAENSILDISGFSKQYNCAFIWQKDGVKKLNLYLIINYFKGGKLRFKKIKPEAFEANRFYTVINKKSGEIVPMEVNFNFDDPNLIILPLAFGKRVGREFIWNDLLSLETGSLKLANGRVIEKTLYNRRTRQDEPALFVALTFERREVLDSSNIKPMNLIGVDRGENIPAVIALTDPEGCPLSRFKDSLGNPTHILRIGESYKEKQRTIQAKKEVEQRRAGGYSRKYASKAKNLADDMVRNTARDLLYYAVTQDAMLIFENLSRGFGRQGKRTFMAERQYTRMEDWLTAKLAYEGLPSKTYLSKTLAQYTSKTCSNCGFTITSADYDRVLEKLKKTATGWMTTINGKELKVEGQITYYNRYKRQNVVKDLSVELDRLSEESVNNDISSWTKGRSGEALSLLKKRFSHRPVQEKFVCLNCGFETHADEQAALNIARSWLFLRSQEYKKYQTNKTTGNTDKRAFVETWQSFYRKKLKEVWKPAV

SEQ ID NO: 33303 - protein, 979 aa, synthetic construct
  REGION 1..979: note = engineered CasX variant
QEIKRINGIRRRLVKDSNTKKAGKTGPMKTLLVRVMTPDLRERLENLRKKPENIPQPISNTSRANLNKLLTDYTEMKKAILHVYWEEFQKDPVGLMSRVAQPASKKIDQNKLKPEMDEKGNLTTAGFACSQCGQPLFVYKLEQVSEKGKAYTNYFGRCNVAEHEKLILLAQLKPEKDSDEAVTYSLGKFGQRALDFYSIHVTKESTHPVKPLAQIAGNRYASYPVGKALSDACMGTIASFLSKYQDIIIEHQKVVKGNQKRLESLRELAGKENLEYPSVTLPPQPHTKEGVDAYNEVIARVRMWVNLNLWQKLKLSRDDAKPLLRLKGFPSFPLVERQANEVDWWDMVCNVKKLINEKKEDGKVFWQNLAGYKRQEALRPYLSSEEDRKKGKKFARYQLGDLLLHLEKKHGEDWGKVYDEAWERIDKKVEGLSKHIKLEEERRSEDAQSKAALTDWLRAKASFVIEGLKEADKDEFCRCELKLQKWYGDLRGKPFAIEAENSILDISGFSKQYNCAFIWQKDGVKKLNLYLIINYFKGGKLRFKKIKPEAFEANRFYTVINKKSGEIVPMEVNFNFDDPNLIILPLAFGKRQGREFIWNDLLSLETGSLKLANGRVIEKTLYNRRTRQDEPALFVALTFERREVLDSSNIKTPMNLIGVDRGENIPAVIALTDPEGCPLSRFKDSLGNPTHILRIGESYKEKQRTIQAKKEVEQRRAGGYSRKYASKAKNLADDMVRNTARDLLYYAVTQDAMLIFENLSRGFGRQGKRTFMAERQYTRMEDWLTAKLAYEGLPSKTYLSKTLAQYTSKTCSNCGFTITSADYDRVLEKLKKTATGWMTTINGKELKVEGQITYYNRYKRQNVVKDLSVELDRLSEESVNNDISSWTKGRSGEALSLLKKRFSHRPVQEKFVCLNCGFETHADEQAALNIARSWLFLRSQEYKKYQTNKTTGNTDKRAFVETWQSFYRKKLKEVWKPAV

SEQ ID NO: 33304 - protein, 979 aa, synthetic construct
  REGION 1..979: note = engineered CasX variant
QEIKRINGIRRRLVKDSNTKKAGKTGPMKTLLVRVMTPDLRERLENLRKKPENIPQPISNTSRANLNKLLTDYTEMKKAILHVYWEEFQKDPVGLMSRVAQPASKKIDQNKLKPEMDEKGNLTTAGFACSQCGQPLFVYKLEQVSEKGKAYTNYFGRCNVAEHEKLILLAQLKPEKDSDEAVTYSLGKFGQRALDFYSIHVTKESTHPVKPLAQIAGNRYASHPVGKALSDACMGTIASFLSKYQDIIIEHQKVVKGNQKRLESLRELAGKENLEYPSVTLPPQPHTKEGVDAYNEVIARVRMWVNLNLWQKLKLSRDDAKPLLRLKGFPSFPLVERQANEVDWWDMVCNVKKLINEKKEDGKVFWQNLAGYKRQEALRPYLSSEEDRKKGKKFARYQLGDLLLHLEKKHGEDWGKVYDEAWERIDKKVEGLSKHIKLEEERRSEDAQSKAALTDWLRAKASFVIEGLKEADKDEFCRCELKLQKWYGDLRGKPFAIEAENSILDISGFSKQYNCAFIWQKDGVKKLNLYLIINYFKGGKLRFKKIKPEAFEANRFYTVINKKSGEIVPMEVNFNFDDPNLIILPLAFGKRQGREFIWNDLLSLETGSLKLANGRVIEKTLYNRRTRQDEPALFVALTFERREVLDSSNIKTPMNLIGVDRGENIPAVIALTDPEGCPLSRFKDSLGNPTHILRIGESYKEKQRTIQAKKEVEQRRAGGYSRKYASKAKNLADDMVRNTARDLLYYAVTQDAMLIFENLSRGFGRQGKRTFMAERQYTRMEDWLTAKLAYEGLPSKTYLSKTLAQYTSKTCSNCGFTITSADYDRVLEKLKKTATGWMTTINGKELKVEGQITYYNRYKRQNVVKDLSVELDRLSEESVNNDISSWTKGRSGEALSLLKKRFSHRPVQEKFVCLNCGFETHADEQAALNIARSWLFLRSQEYKKYQTNKTTGNTDKRAFVETWQSFYRKKLKEVWKPAV

SEQ ID NO: 33305 - protein, 979 aa, synthetic construct
  REGION 1..979: note = engineered CasX variant
QEIKRINGIRRRLVKDSNTKKAGKTGPMKTLLVRVMTPDLRERLENLRKKPENIPQPISNTSRANLNKLLTDYTEMKKAILHVYWEEFQKDPVGLMSRVAQPASKKIDQNKLKPEMDEKGNLTTAGFACSQCGQPLFVYKLEQVSEKGKAYTNYFGRCNVAEHEKLILLAQLKPEKDSDEAVTYSLGKFGQRALDFYSIHVTKESTHPVKPLAQIAGNRYASSPVGKALSDACMGTIASFLSKYQDIIIEHQKVVKGNQKRLESLRELAGKENLEYPSVTLPPQPHTKEGVDAYNEVIARVRMWVNLNLWQKLKLSRDDAKPLLRLKGFPSFPLVERQANEVDWWDMVCNVKKLINEKKEDGKVFWQNLAGYKRQEALRPYLSSEEDRKKGKKFARYQLGDLLLHLEKKHGEDWGKVYDEAWERIDKKVEGLSKHIKLEEERRSEDAQSKAALTDWLRAKASFVIEGLKEADKDEFCRCELKLQKWYGDLRGKPFAIEAENSILDISGFSKQYNCAFIWQKDGVKKLNLYLIINYFKGGKLRFKKIKPEAFEANRFYTVINKKSGEIVPMEVNFNFDDPNLIILPLAFGKRQGREFIWNDLLSLETGSLKLANGRVIEKTLYNRRTRQDEPALFVALTFERREVLDSSNIKTPMNLIGVDRGENIPAVIALTDPEGCPLSRFKDSLGNPTHILRIGESYKEKQRTIQAKKEVEQRRAGGYSRKYASKAKNLADDMVRNTARDLLYYAVTQDAMLIFENLSRGFGRQGKRTFMAERQYTRMEDWLTAKLAYEGLPSKTYLSKTLAQYTSKTCSNCGFTITSADYDRVLEKLKKTATGWMTTINGKELKVEGQITYYNRYKRQNVVKDLSVELDRLSEESVNNDISSWTKGRSGEALSLLKKRFSHRPVQEKFVCLNCGFETHADEQAALNIARSWLFLRSQEYKKYQTNKTTGNTDKRAFVETWQSFYRKKLKEVWKPAV

SEQ ID NO: 33306 - protein, 979 aa, synthetic construct
  REGION 1..979: note = engineered CasX variant
QEIKRINGIRRRLVKDSNTKKAGKTGPMKTLLVRVMTPDLRERLENLRKKPENIPQPISNTSRANLNKLLTDYTEMKKAILHVYWEEFQKDPVGLMSRVAQPASKKIDQNKLKPEMDEKGNLTTAGFACSQCGQPLFVYKLEQVSEKGKAYTNYFGRCNVAEHEKLILLAQLKPEKDSDEAVTYSLGKFGQRALDFYSIHVTKESTHPVKPLAQIAGNRYASTPVGKALSDACMGTIASFLSKYQDIIIEHQKVVKGNQKRLESLRELAGKENLEYPSVTLPPQPHTKEGVDAYNEVIARVRMWVNLNLWQKLKLSRDDAKPLLRLKGFPSFPLVERQANEVDWWDMVCNVKKLINEKKEDGKVFWQNLAGYKRQEALRPYLSSEEDRKKGKKFARYQLGDLLLHLEKKHGEDWGKVYDEAWERIDKKVEGLSKHIKLEEERRSEDAQSKAALTDWLRAKASFVIEGLKEADKDEFCRCELKLQKWYGDLRGKPFAIEAENSILDISGFSKQYNCAFIWQKDGVKKLNLYLIINYFKGGKLRFKKIKPEAFEANRFYTVINKKSGEIVPMEVNFNFDDPNLIILPLAFGKRQGREFIWNDLLSLETGSLKLANGRVIEKTLYNRRTRQDEPALFVALTFERREVLDSSNIKTPMNLIGVDRGENIPAVIALTDPEGCPLSRFKDSLGNPTHILRIGESYKEKQRTIQAKKEVEQRRAGGYSRKYASKAKNLADDMVRNTARDLLYYAVTQDAMLIFENLSRGFGRQGKRTFMAERQYTRMEDWLTAKLAYEGLPSKTYLSKTLAQYTSKTCSNCGFTITSADYDRVLEKLKKTATGWMTTINGKELKVEGQITYYNRYKRQNVVKDLSVELDRLSEESVNNDISSWTKGRSGEALSLLKKRFSHRPVQEKFVCLNCGFETHADEQAALNIARSWLFLRSQEYKKYQTNKTTGNTDKRAFVETWQSFYRKKLKEVWKPAV

SEQ ID NO: 33307 - protein, 979 aa, synthetic construct
  REGION 1..979: note = engineered CasX variant
QEIKRINGIRRRLVKDSNTKKAGKTGPMKTLLVRVMTPDLRERLENLRKKPENIPQPISNTSRANLNKLLTDYTEMKKAILHVYWEEFQKDPVGLMSRVAQPASKKIDQNKLKPEMDEKGNLTTAGFACSQCGQPLFVYKLEQVSEKGKAYTNYFGRCNVAEHEKLILLAQLKPEKDSDEAVTYSLGKFGQRALDFYSIHVTKESTHPVKPLAQIAGNRYASAPVGKALSDACMGTIASFLSKYQDIIIEHQKVVKGNQKRLESLRELAGKENLEYPSVTLPPQPHTKEGVDAYNEVIARVRMWVNLNLWQKLKLSRDDAKPLLRLKGFPSFPLVERQANEVDWWDMVCNVKKLINEKKEDGKVFWQNLAGYKRQEALRPYLSSEEDRKKGKKFARYQLGDLLLHLEKKHGEDWGKVYDEAWERIDKKVEGLSKHIKLEEERRSEDAQSKAALTDWLRAKASFVIEGLKEADKDEFCRCELKLQKWYGDLRGKPFAIEAENSILDISGFSKQYNCAFIWQKDGVKKLNLYLIINYFKGGKLRFKKIKPEAFEANRFYTVINKKSGEIVPMEVNFNFDDPNLIILPLAFGKRQGREFIWNDLLSLETGSLKLANGRVIEKTLYNRRTRQDEPALFVALTFERREVLDSSNIKTPMNLIGVDRGENIPAVIALTDPEGCPLSRFKDSLGNPTHILRIGESYKEKQRTIQAKKEVEQRRAGGYSRKYASKAKNLADDMVRNTARDLLYYAVTQDAMLIFENLSRGFGRQGKRTFMAERQYTRMEDWLTAKLAYEGLPSKTYLSKTLAQYTSKTCSNCGFTITSADYDRVLEKLKKTATGWMTTINGKELKVEGQITYYNRYKRQNVVKDLSVELDRLSEESVNNDISSWTKGRSGEALSLLKKRFSHRPVQEKFVCLNCGFETHADEQAALNIARSWLFLRSQEYKKYQTNKTTGNTDKRAFVETWQSFYRKKLKEVWKPAV

SEQ ID NO: 33308 - protein, 979 aa, synthetic construct
  REGION 1..979: note = engineered CasX variant
QEIKRINGIRRRLVKDSNTKKAGKTGPMKTLLVRVMTPDLRERLENLRKKPENIPQPISNTSRANLNKLLTDYTEMKKAILHVYWEEFQKDPVGLMSRVAQPASKKIDQNKLKPEMDEKGNLTTAGFACSQCGQPLFVYKLEQVSEKGKAYTNYFGRCNVAEHEKLILLAQLKPEKDSDEAVTYSLGKFGQRALDFYSIHVTKESTHPVKPLAQIAGNRYASVPVGKALSDACMGTIASFLSKYQDIIIEHQKVVKGNQKRLESLRELAGKENLEYPSVTLPPQPHTKEGVDAYNEVIARVRMWVNLNLWQKLKLSRDDAKPLLRLKGFPSFPLVERQANEVDWWDMVCNVKKLINEKKEDGKVFWQNLAGYKRQEALRPYLSSEEDRKKGKKFARYQLGDLLLHLEKKHGEDWGKVYDEAWERIDKKVEGLSKHIKLEEERRSEDAQSKAALTDWLRAKASFVIEGLKEADKDEFCRCELKLQKWYGDLRGKPFAIEAENSILDISGFSKQYNCAFIWQKDGVKKLNLYLIINYFKGGKLRFKKIKPEAFEANRFYTVINKKSGEIVPMEVNFNFDDPNLIILPLAFGKRQGREFIWNDLLSLETGSLKLANGRVIEKTLYNRRTRQDEPALFVALTFERREVLDSSNIKTPMNLIGVDRGENIPAVIALTDPEGCPLSRFKDSLGNPTHILRIGESYKEKQRTIQAKKEVEQRRAGGYSRKYASKAKNLADDMVRNTARDLLYYAVTQDAMLIFENLSRGFGRQGKRTFMAERQYTRMEDWLTAKLAYEGLPSKTYLSKTLAQYTSKTCSNCGFTITSADYDRVLEKLKKTATGWMTTINGKELKVEGQITYYNRYKRQNVVKDLSVELDRLSEESVNNDISSWTKGRSGEALSLLKKRFSHRPVQEKFVCLNCGFETHADEQAALNIARSWLFLRSQEYKKYQTNKTTGNTDKRAFVETWQSFYRKKLKEVWKPAV

SEQ ID NO: 33309 - protein, 979 aa, synthetic construct
  REGION 1..979: note = engineered CasX variant
QEIKRINGIRRRLVKDSNTKKAGKTGPMKTLLVRVMTPDLRERLENLRKKPENIPQPISNTSRANLNKLLTDYTEMKKAILHVYWEEFQKDPVGLMSRVAQPASKKIDQNKLKPEMDEKGNLTTAGFACSQCGQPLFVYKLEQVSEKGKAYTNYFGRCNVAEHEKLIKLAQLKPEKDSDEAVTYSLGKFGQRALDFYSIHVTKESTHPVKPLAQIAGNRYASGPVGKALSDACMGTIASFLSKYQDIIIEHQKVVKGNQKRLESLRELAGKENLEYPSVTLPPQPHTKEGVDAYNEVIARVRMWVNLNLWQKLKLSRDDAKPLLRLKGFPSFPLVERQANEVDWWDMVCNVKKLINEKKEDGKVFWQNLAGYKRQEALRPYLSSEEDRKKGKKFARYQLGDLLLHLEKKHGEDWGKVYDEAWERIDKKVEGLSKHIKLEEERRSEDAQSKAALTDWLRAKASFVIEGLKEADKDEFCRCELKLQKWYGDLRGKPFAIEAENSILDISGFSKQYNCAFIWQKDGVKKLNLYLIINYFKGGKLRFKKIKPEAFEANRFYTVINKKSGEIVPMEVNFNFDDPNLIILPLAFGKRQGREFIWNDLLSLETGSLKLANGRVIEKTLYNRRTRQDEPALFVALTFERREVLDSSNIKTPMNLIGVDRGENIPAVIALTDPEGCPLSRFKDSLGNPTHILRIGESYKEKQRTIQAKKEVEQRRAGGYSRKYASKAKNLADDMVRNTARDLLYYAVTQDAMLIFENLSRGFGRQGKRTFMAERQYTRMEDWLTAKLAYEGLPSKTYLSKTLAQYTSKTCSNCGFTITSADYDRVLEKLKKTATGWMTTINGKELKVEGQITYYNRYKRQNVVKDLSVELDRLSEESVNNDISSWTKGRSGEALSLLKKRFSHRPVQEKFVCLNCGFETHADEQAALNIARSWLFLRSQEYKKYQTNKTTGNTDKRAFVETWQSFYRKKLKEVWKPAV

SEQ ID NO: 33310 - protein, 978 aa, synthetic construct
  REGION 1..978: note = engineered CasX variant
QEIKRINGIRRRLVKDSNTKKAGKTGPMKTLLVRVMTPDLRERLENLRKKPENIPQPISNTSRANLNKLLTDYTEMKKAILHVYWEEFQKDPVGLMSRVAQPASKKIDQNKLKPEMDEKGNLTTAGFACSQCGQPLFVYKLEQVSEKGKAYTNYFGRCNVAEHEKLILLAQLKPEKDSDEAVTYSLGKFGQRALDFYSIHVTKESTHPVKPLAQIAGNRYASPVGKALSDACMGTIASFLSKYQDIIIEHQKVVKGNQKRLESLRELAGKENLEYPSVTLPPQPHTKEGVDAYNEVIARVRMWVNLNLWQKLKLSRDDAKPLLRLKGFPSFPLVERQANEVDWWDMVCNVKKLINEKKEDGKVFWQNLAGYKRQEALRPYLSSEEDRKKGKKFARYQLGDLLLHLEKKHGEDWGKVYDEAWERIDKKVEGLSKHIKLEEERRSEDAQSKAALTDWLRAKASFVIEGLKEADKDEFCRCELKLQKWYGDLRGKPFAIEAENSILDISGFSKQYNCAFIWQKDGVKKLNLYLIINYFKGGKLRFKKIKPEAFEANRFYTVINKKSGEIVPMEVNFNFDDPNLIILPLAFGKRQGREFIWNDLLSLETGSLKLANGRVIEKTLYNRRTRQDEPALFVALTFERREVLDSSNIKTPMNLIGVDRGENIPAVIALTDPEGCPLSRFKDSLGNPTHILRIGESYKEKQRTIQAKKEVEQRRAGGYSRKYASKAKNLADDMVRNTARDLLYYAVTQDAMLIFENLSRGFGRQGKRTFMAERQYTRMEDWLTAKLAYEGLPSKTYLSKTLAQYTSKTCSNCGFTITSADYDRVLEKLKKTATGWMTTINGKELKVEGQITYYNRYKRQNVVKDLSVELDRLSEESVNNDISSWTKGRSGEALSLLKKRFSHRPVQEKFVCLNCGFETHADEQAALNIARSWLFLRSQEYKKYQTNKTTGNTDKRAFVETWQSFYRKKLKEVWKPAV

SEQ ID NO: 33311 - protein, 979 aa, synthetic construct
  REGION 1..979: note = engineered CasX variant
QEIKRINGIRRRLVKDSNTKKAGKTGPMKTLLVRVMTPDLRERLENLRKKPENIPQPISNTSRANLNKLLTDYTEMKKAILHVYWEEFQKDPVGLMSRVAQPASKKIDQNKLKPEMDEKGNLTTAGFACSQCGQPLFVYKLEQVSEKGKAYTNYFGRCNVAEHEKLILLAQLKPEKDSDEAVTYSLGKFGQRALDFYSIHVTKESTHPVKPLAQIAGNRYASYPVGKALSDACMGTIASFLSKYQDIIIEHQKVVKGNQKRLESLRELAGKENLEYPSVTLPPQPHTKEGVDAYNEVIARVRMWVNLNLWQKLKLSRDDAKPLLRLKGFPSFPLVERQANEVDWWDMVCNVKKLINEKKEDGKVFWQNLAGYKRQEALRPYLSSEEDRKKGKKFARYQLGDLLLHLEKKHGEDWGKVYDEAWERIDKKVEGLSKHIKLEEERRSEDAQSKAALTDWLRAKASFVIEGLKEADKDEFCRCELKLQKWYGDLRGKPFAIEAENSILDISGFSKQYNCAFIWQKDGVKKLNLYLIINYFKGGKLRFKKIKPEAFEANRFYTVINKKSGEIVPMEVNFNFDDPNLIILPLAFGKRQGREFIWNDLLSLETGSLKLANGRVIEKTLYNRRTRQDEPALFVALTFERREVLDSSNIKPMSNLIGVDRGENIPAVIALTDPEGCPLSRFKDSLGNPTHILRIGESYKEKQRTIQAKKEVEQRRAGGYSRKYASKAKNLADDMVRNTARDLLYYAVTQDAMLIFENLSRGFGRQGKRTFMAERQYTRMEDWLTAKLAYEGLPSKTYLSKTLAQYTSKTCSNCGFTITSADYDRVLEKLKKTATGWMTTINGKELKVEGQITYYNRYKRQNVVKDLSVELDRLSEESVNNDISSWTKGRSGEALSLLKKRFSHRPVQEKFVCLNCGFETHADEQAALNIARSWLFLRSQEYKKYQTNKTTGNTDKRAFVETWQSFYRKKLKEVWKPAV

SEQ ID NO: 33312 - protein, 979 aa, synthetic construct
  REGION 1..979: note = engineered CasX variant
QEIKRINGIRRRLVKDSNTKKAGKTGPMKTLLVRVMTPDLRERLENLRKKPENIPQPISNTSRANLNKLLTDYTEMKKAILHVYWEEFQKDPVGLMSRVAQPASKKIDQNKLKPEMDEKGNLTTAGFACSQCGQPLFVYKLEQVSEKGKAYTNYFGRCNVAEHEKLILLAQLKPEKDSDEAVTYSLGKFGQRALDFYSIHVTKESTHPVKPLAQIAGNRYASHPVGKALSDACMGTIASFLSKYQDIIIEHQKVVKGNQKRLESLRELAGKENLEYPSVTLPPQPHTKEGVDAYNEVIARVRMWVNLNLWQKLKLSRDDAKPLLRLKGFPSFPLVERQANEVDWWDMVCNVKKLINEKKEDGKVFWQNLAGYKRQEALRPYLSSEEDRKKGKKFARYQLGDLLLHLEKKHGEDWGKVYDEAWERIDKKVEGLSKHIKLEEERRSEDAQSKAALTDWLRAKASFVIEGLKEADKDEFCRCELKLQKWYGDLRGKPFAIEAENSILDISGFSKQYNCAFIWQKDGVKKLNLYLIINYFKGGKLRFKKIKPEAFEANRFYTVINKKSGEIVPMEVNFNFDDPNLIILPLAFGKRQGREFIWNDLLSLETGSLKLANGRVIEKTLYNRRTRQDEPALFVALTFERREVLDSSNIKPMSNLIGVDRGENIPAVIALTDPEGCPLSRFKDSLGNPTHILRIGESYKEKQRTIQAKKEVEQRRAGGYSRKYASKAKNLADDMVRNTARDLLYYAVTQDAMLIFENLSRGFGRQGKRTFMAERQYTRMEDWLTAKLAYEGLPSKTYLSKTLAQYTSKTCSNCGFTITSADYDRVLEKLKKTATGWMTTINGKELKVEGQITYYNRYKRQNVVKDLSVELDRLSEESVNNDISSWTKGRSGEALSLLKKRFSHRPVQEKFVCLNCGFETHADEQAALNIARSWLFLRSQEYKKYQTNKTTGNTDKRAFVETWQSFYRKKLKEVWKPAV

SEQ ID NO: 33313 - protein, 979 aa, synthetic construct
  REGION 1..979: note = engineered CasX variant
QEIKRINGIRRRLVKDSNTKKAGKTGPMKTLLVRVMTPDLRERLENLRKKPENIPQPISNTSRANLNKLLTDYTEMKKAILHVYWEEFQKDPVGLMSRVAQPASKKIDQNKLKPEMDEKGNLTTAGFACSQCGQPLFVYKLEQVSEKGKAYTNYFGRCNVAEHEKLILLAQLKPEKDSDEAVTYSLGKFGQRALDFYSIHVTKESTHPVKPLAQIAGNRYASSPVGKALSDACMGTIASFLSKYQDIIIEHQKVVKGNQKRLESLRELAGKENLEYPSVTLPPQPHTKEGVDAYNEVIARVRMWVNLNLWQKLKLSRDDAKPLLRLKGFPSFPLVERQANEVDWWDMVCNVKKLINEKKEDGKVFWQNLAGYKRQEALRPYLSSEEDRKKGKKFARYQLGDLLLHLEKKHGEDWGKVYDEAWERIDKKVEGLSKHIKLEEERRSEDAQSKAALTDWLRAKASFVIEGLKEADKDEFCRCELKLQKWYGDLRGKPFAIEAENSILDISGFSKQYNCAFIWQKDGVKKLNLYLIINYFKGGKLRFKKIKPEAFEANRFYTVINKKSGEIVPMEVNFNFDDPNLIILPLAFGKRQGREFIWNDLLSLETGSLKLANGRVIEKTLYNRRTRQDEPALFVALTFERREVLDSSNIKPMSNLIGVDRGENIPAVIALTDPEGCPLSRFKDSLGNPTHILRIGESYKEKQRTIQAKKEVEQRRAGGYSRKYASKAKNLADDMVRNTARDLLYYAVTQDAMLIFENLSRGFGRQGKRTFMAERQYTRMEDWLTAKLAYEGLPSKTYLSKTLAQYTSKTCSNCGFTITSADYDRVLEKLKKTATGWMTTINGKELKVEGQITYYNRYKRQNVVKDLSVELDRLSEESVNNDISSWTKGRSGEALSLLKKRFSHRPVQEKFVCLNCGFETHADEQAALNIARSWLFLRSQEYKKYQTNKTTGNTDKRAFVETWQSFYRKKLKEVWKPAV

SEQ ID NO: 33314 - protein, 979 aa, synthetic construct
  REGION 1..979: note = engineered CasX variant
QEIKRINGIRRRLVKDSNTKKAGKTGPMKTLLVRVMTPDLRERLENLRKKPENIPQPISNTSRANLNKLLTDYTEMKKAILHVYWEEFQKDPVGLMSRVAQPASKKIDQNKLKPEMDEKGNLTTAGFACSQCGQPLFVYKLEQVSEKGKAYTNYFGRCNVAEHEKLILLAQLKPEKDSDEAVTYSLGKFGQRALDFYSIHVTKESTHPVKPLAQIAGNRYASTPVGKALSDACMGTIASFLSKYQDIIIEHQKVVKGNQKRLESLRELAGKENLEYPSVTLPPQPHTKEGVDAYNEVIARVRMWVNLNLWQKLKLSRDDAKPLLRLKGFPSFPLVERQANEVDWWDMVCNVKKLINEKKEDGKVFWQNLAGYKRQEALRPYLSSEEDRKKGKKFARYQLGDLLLHLEKKHGEDWGKVYDEAWERIDKKVEGLSKHIKLEEERRSEDAQSKAALTDWLRAKASFVIEGLKEADKDEFCRCELKLQKWYGDLRGKPFAIEAENSILDISGFSKQYNCAFIWQKDGVKKLNLYLIINYFKGGKLRFKKIKPEAFEANRFYTVINKKSGEIVPMEVNFNFDDPNLIILPLAFGKRQGREFIWNDLLSLETGSLKLANGRVIEKTLYNRRTRQDEPALFVALTFERREVLDSSNIKPMSNLIGVDRGENIPAVIALTDPEGCPLSRFKDSLGNPTHILRIGESYKEKQRTIQAKKEVEQRRAGGYSRKYASKAKNLADDMVRNTARDLLYYAVTQDAMLIFENLSRGFGRQGKRTFMAERQYTRMEDWLTAKLAYEGLPSKTYLSKTLAQYTSKTCSNCGFTITSADYDRVLEKLKKTATGWMTTINGKELKVEGQITYYNRYKRQNVVKDLSVELDRLSEESVNNDISSWTKGRSGEALSLLKKRFSHRPVQEKFVCLNCGFETHADEQAALNIARSWLFLRSQEYKKYQTNKTTGNTDKRAFVETWQSFYRKKLKEVWKPAV

SEQ ID NO: 33315 - protein, 979 aa, synthetic construct
  REGION 1..979: note = engineered CasX variant
QEIKRINGIRRRLVKDSNTKKAGKTGPMKTLLVRVMTPDLRERLENLRKKPENIPQPISNTSRANLNKLLTDYTEMKKAILHVYWEEFQKDPVGLMSRVAQPASKKIDQNKLKPEMDEKGNLTTAGFACSQCGQPLFVYKLEQVSEKGKAYTNYFGRCNVAEHEKLILLAQLKPEKDSDEAVTYSLGKFGQRALDFYSIHVTKESTHPVKPLAQIAGNRYASAPVGKALSDACMGTIASFLSKYQDIIIEHQKVVKGNQKRLESLRELAGKENLEYPSVTLPPQPHTKEGVDAYNEVIARVRMWVNLNLWQKLKLSRDDAKPLLRLKGFPSFPLVERQANEVDWWDMVCNVKKLINEKKEDGKVFWQNLAGYKRQEALRPYLSSEEDRKKGKKFARYQLGDLLLHLEKKHGEDWGKVYDEAWERIDKKVEGLSKHIKLEEERRSEDAQSKAALTDWLRAKASFVIEGLKEADKDEFCRCELKLQKWYGDLRGKPFAIEAENSILDISGFSKQYNCAFIWQKDGVKKLNLYLIINYFKGGKLRFKKIKPEAFEANRFYTVINKKSGEIVPMEVNFNFDDPNLIILPLAFGKRQGREFIWNDLLSLETGSLKLANGRVIEKTLYNRRTRQDEPALFVALTFERREVLDSSNIKPMSNLIGVDRGENIPAVIALTDPEGCPLSRFKDSLGNPTHILRIGESYKEKQRTIQAKKEVEQRRAGGYSRKYASKAKNLADDMVRNTARDLLYYAVTQDAMLIFENLSRGFGRQGKRTFMAERQYTRMEDWLTAKLAYEGLPSKTYLSKTLAQYTSKTCSNCGFTITSADYDRVLEKLKKTATGWMTTINGKELKVEGQITYYNRYKRQNVVKDLSVELDRLSEESVNNDISSWTKGRSGEALSLLKKRFSHRPVQEKFVCLNCGFETHADEQAALNIARSWLFLRSQEYKKYQTNKTTGNTDKRAFVETWQSFYRKKLKEVWKPAV

SEQ ID NO: 33316 - protein, 979 aa, synthetic construct
  REGION 1..979: note = engineered CasX variant
QEIKRINGIRRRLVKDSNTKKAGKTGPMKTLLVRVMTPDLRERLENLRKKPENIPQPISNTSRANLNKLLTDYTEMKKAILHVYWEEFQKDPVGLMSRVAQPASKKIDQNKLKPEMDEKGNLTTAGFACSQCGQPLFVYKLEQVSEKGKAYTNYFGRCNVAEHEKLILLAQLKPEKDSDEAVTYSLGKFGQRALDFYSIHVTKESTHPVKPLAQIAGNRYASVPVGKALSDACMGTIASFLSKYQDIIIEHQKVVKGNQKRLESLRELAGKENLEYPSVTLPPQPHTKEGVDAYNEVIARVRMWVNLNLWQKLKLSRDDAKPLLRLKGFPSFPLVERQANEVDWWDMVCNVKKLINEKKEDGKVFWQNLAGYKRQEALRPYLSSEEDRKKGKKFARYQLGDLLLHLEKKHGEDWGKVYDEAWERIDKKVEGLSKHIKLEEERRSEDAQSKAALTDWLRAKASFVIEGLKEADKDEFCRCELKLQKWYGDLRGKPFAIEAENSILDISGFSKQYNCAFIWQKDGVKKLNLYLIINYFKGGKLRFKKIKPEAFEANRFYTVINKKSGEIVPMEVNFNFDDPNLIILPLAFGKRQGREFIWNDLLSLETGSLKLANGRVIEKTLYNRRTRQDEPALFVALTFERREVLDSSNIKPMSNLIGVDRGENIPAVIALTDPEGCPLSRFKDSLGNPTHILRIGESYKEKQRTIQAKKEVEQRRAGGYSRKYASKAKNLADDMVRNTARDLLYYAVTQDAMLIFENLSRGFGRQGKRTFMAERQYTRMEDWLTAKLAYEGLPSKTYLSKTLAQYTSKTCSNCGFTITSADYDRVLEKLKKTATGWMTTINGKELKVEGQITYYNRYKRQNVVKDLSVELDRLSEESVNNDISSWTKGRSGEALSLLKKRFSHRPVQEKFVCLNCGFETHADEQAALNIARSWLFLRSQEYKKYQTNKTTGNTDKRAFVETWQSFYRKKLKEVWKPAV

SEQ ID NO: 33317 - protein, 979 aa, synthetic construct
  REGION 1..979: note = engineered CasX variant
QEIKRINGIRRRLVKDSNTKKAGKTGPMKTLLVRVMTPDLRERLENLRKKPENIPQPISNTSRANLNKLLTDYTEMKKAILHVYWEEFQKDPVGLMSRVAQPASKKIDQNKLKPEMDEKGNLTTAGFACSQCGQPLFVYKLEQVSEKGKAYTNYFGRCNVAEHEKLIKLAQLKPEKDSDEAVTYSLGKFGQRALDFYSIHVTKESTHPVKPLAQIAGNRYASGPVGKALSDACMGTIASFLSKYQDIIIEHQKVVKGNQKRLESLRELAGKENLEYPSVTLPPQPHTKEGVDAYNEVIARVRMWVNLNLWQKLKLSRDDAKPLLRLKGFPSFPLVERQANEVDWWDMVCNVKKLINEKKEDGKVFWQNLAGYKRQEALRPYLSSEEDRKKGKKFARYQLGDLLLHLEKKHGEDWGKVYDEAWERIDKKVEGLSKHIKLEEERRSEDAQSKAALTDWLRAKASFVIEGLKEADKDEFCRCELKLQKWYGDLRGKPFAIEAENSILDISGFSKQYNCAFIWQKDGVKKLNLYLIINYFKGGKLRFKKIKPEAFEANRFYTVINKKSGEIVPMEVNFNFDDPNLIILPLAFGKRQGREFIWNDLLSLETGSLKLANGRVIEKTLYNRRTRQDEPALFVALTFERREVLDSSNIKPMSNLIGVDRGENIPAVIALTDPEGCPLSRFKDSLGNPTHILRIGESYKEKQRTIQAKKEVEQRRAGGYSRKYASKAKNLADDMVRNTARDLLYYAVTQDAMLIFENLSRGFGRQGKRTFMAERQYTRMEDWLTAKLAYEGLPSKTYLSKTLAQYTSKTCSNCGFTITSADYDRVLEKLKKTATGWMTTINGKELKVEGQITYYNRYKRQNVVKDLSVELDRLSEESVNNDISSWTKGRSGEALSLLKKRFSHRPVQEKFVCLNCGFETHADEQAALNIARSWLFLRSQEYKKYQTNKTTGNTDKRAFVETWQSFYRKKLKEVWKPAV

SEQ ID NO: 33318 - protein, 978 aa, synthetic construct
  REGION 1..978: note = engineered CasX variant
QEIKRINGIRRRLVKDSNTKKAGKTGPMKTLLVRVMTPDLRERLENLRKKPENIPQPISNTSRANLNKLLTDYTEMKKAILHVYWEEFQKDPVGLMSRVAQPASKKIDQNKLKPEMDEKGNLTTAGFACSQCGQPLFVYKLEQVSEKGKAYTNYFGRCNVAEHEKLILLAQLKPEKDSDEAVTYSLGKFGQRALDFYSIHVTKESTHPVKPLAQIAGNRYASPVGKALSDACMGTIASFLSKYQDIIIEHQKVVKGNQKRLESLRELAGKENLEYPSVTLPPQPHTKEGVDAYNEVIARVRMWVNLNLWQKLKLSRDDAKPLLRLKGFPSFPLVERQANEVDWWDMVCNVKKLINEKKEDGKVFWQNLAGYKRQEALRPYLSSEEDRKKGKKFARYQLGDLLLHLEKKHGEDWGKVYDEAWERIDKKVEGLSKHIKLEEERRSEDAQSKAALTDWLRAKASFVIEGLKEADKDEFCRCELKLQKWYGDLRGKPFAIEAENSILDISGFSKQYNCAFIWQKDGVKKLNLYLIINYFKGGKLRFKKIKPEAFEANRFYTVINKKSGEIVPMEVNFNFDDPNLIILPLAFGKRQGREFIWNDLLSLETGSLKLANGRVIEKTLYNRRTRQDEPALFVALTFERREVLDSSNIKPMSNLIGVDRGENIPAVIALTDPEGCPLSRFKDSLGNPTHILRIGESYKEKQRTIQAKKEVEQRRAGGYSRKYASKAKNLADDMVRNTARDLLYYAVTQDAMLIFENLSRGFGRQGKRTFMAERQYTRMEDWLTAKLAYEGLPSKTYLSKTLAQYTSKTCSNCGFTITSADYDRVLEKLKKTATGWMTTINGKELKVEGQITYYNRYKRQNVVKDLSVELDRLSEESVNNDISSWTKGRSGEALSLLKKRFSHRPVQEKFVCLNCGFETHADEQAALNIARSWLFLRSQEYKKYQTNKTTGNTDKRAFVETWQSFYRKKLKEVWKPAV

SEQ ID NO: 33319 - protein, 978 aa, synthetic construct
  REGION 1..978: note = engineered CasX variant
QEIKRINGIRRRLVKDSNTKKAGKTGPMKTLLVRVMTPDLRERLENLRKKPENIPQPISNTSRANLNKLLTDYTEMKKAILHVYWEEFQKDPVGLMSRVAQPASKKIDQNKLKPEMDEKGNLTTAGFACSQCGQPLFVYKLEQVSEKGKAYTNYFGRCNVAEHEKLILLAQLKPEKDSDEAVTYSLGKFGQRALDFYSIHVTKESTHPVKPLAQIAGNRYASYPVGKALSDACMGTIASFLSKYQDIIIEHQKVVKGNQKRLESLRELAGKENLEYPSVTLPPQPHTKEGVDAYNEVIARVRMWVNLNLWQKLKLSRDDAKPLLRLKGFPSFPLVERQANEVDWWDMVCNVKKLINEKKEDGKVFWQNLAGYKRQEALRPYLSSEEDRKKGKKFARYQLGDLLLHLEKKHGEDWGKVYDEAWERIDKKVEGLSKHIKLEEERRSEDAQSKAALTDWLRAKASFVIEGLKEADKDEFCRCELKLQKWYGDLRGKPFAIEAENSILDISGFSKQYNCAFIWQKDGVKKLNLYLIINYFKGGKLRFKKIKPEAFEANRFYTVINKKSGEIVPMEVNFNFDDPNLIILPLAFGKRQGREFIWNDLLSLETGSLKLANGRVIEKTLYNRRTRQDEPALFVALTFERREVLDSSNIKPMNLIGVDRGENIPAVIALTDPEGCPLSRFKDSLGNPTHILRIRESYKEKQRTIQAKKEVEQRRAGGYSRKYASKAKNLADDMVRNTARDLLYYAVTQDAMLIFENLSRGFGRQGKRTFMAERQYTRMEDWLTAKLAYEGLPSKTYLSKTLAQYTSKTCSNCGFTITSADYDRVLEKLKKTATGWMTTINGKELKVEGQITYYNRYKRQNVVKDLSVELDRLSEESVNNDISSWTKGRSGEALSLLKKRFSHRPVQEKFVCLNCGFETHADEQAALNIARSWLFLRSQEYKKYQTNKTTGNTDKRAFVETWQSFYRKKLKEVWKPAV

SEQ ID NO: 33320 - protein, 978 aa, synthetic construct
  REGION 1..978: note = engineered CasX variant
QEIKRINGIRRRLVKDSNTKKAGKTGPMKTLLVRVMTPDLRERLENLRKKPENIPQPISNTSRANLNKLLTDYTEMKKAILHVYWEEFQKDPVGLMSRVAQPASKKIDQNKLKPEMDEKGNLTTAGFACSQCGQPLFVYKLEQVSEKGKAYTNYFGRCNVAEHEKLILLAQLKPEKDSDEAVTYSLGKFGQRALDFYSIHVTKESTHPVKPLAQIAGNRYASHPVGKALSDACMGTIASFLSKYQDIIIEHQKVVKGNQKRLESLRELAGKENLEYPSVTLPPQPHTKEGVDAYNEVIARVRMWVNLNLWQKLKLSRDDAKPLLRLKGFPSFPLVERQANEVDWWDMVCNVKKLINEKKEDGKVFWQNLAGYKRQEALRPYLSSEEDRKKGKKFARYQLGDLLLHLEKKHGEDWGKVYDEAWERIDKKVEGLSKHIKLEEERRSEDAQSKAALTDWLRAKASFVIEGLKEADKDEFCRCELKLQKWYGDLRGKPFAIEAENSILDISGFSKQYNCAFIWQKDGVKKLNLYLIINYFKGGKLRFKKIKPEAFEANRFYTVINKKSGEIVPMEVNFNFDDPNLIILPLAFGKRQGREFIWNDLLSLETGSLKLANGRVIEKTLYNRRTRQDEPALFVALTFERREVLDSSNIKPMNLIGVDRGENIPAVIALTDPEGCPLSRFKDSLGNPTHILRIRESYKEKQRTIQAKKEVEQRRAGGYSRKYASKAKNLADDMVRNTARDLLYYAVTQDAMLIFENLSRGFGRQGKRTFMAERQYTRMEDWLTAKLAYEGLPSKTYLSKTLAQYTSKTCSNCGFTITSADYDRVLEKLKKTATGWMTTINGKELKVEGQITYYNRYKRQNVVKDLSVELDRLSEESVNNDISSWTKGRSGEALSLLKKRFSHRPVQEKFVCLNCGFETHADEQAALNIARSWLFLRSQEYKKYQTNKTTGNTDKRAFVETWQSFYRKKLKEVWKPAV

SEQ ID NO: 33321 - protein, 978 aa, synthetic construct
  REGION 1..978: note = engineered CasX variant
QEIKRINGIRRRLVKDSNTKKAGKTGPMKTLLVRVMTPDLRERLENLRKKPENIPQPISNTSRANLNKLLTDYTEMKKAILHVYWEEFQKDPVGLMSRVAQPASKKIDQNKLKPEMDEKGNLTTAGFACSQCGQPLFVYKLEQVSEKGKAYTNYFGRCNVAEHEKLILLAQLKPEKDSDEAVTYSLGKFGQRALDFYSIHVTKESTHPVKPLAQIAGNRYASSPVGKALSDACMGTIASFLSKYQDIIIEHQKVVKGNQKRLESLRELAGKENLEYPSVTLPPQPHTKEGVDAYNEVIARVRMWVNLNLWQKLKLSRDDAKPLLRLKGFPSFPLVERQANEVDWWDMVCNVKKLINEKKEDGKVFWQNLAGYKRQEALRPYLSSEEDRKKGKKFARYQLGDLLLHLEKKHGEDWGKVYDEAWERIDKKVEGLSKHIKLEEERRSEDAQSKAALTDWLRAKASFVIEGLKEADKDEFCRCELKLQKWYGDLRGKPFAIEAENSILDISGFSKQYNCAFIWQKDGVKKLNLYLIINYFKGGKLRFKKIKPEAFEANRFYTVINKKSGEIVPMEVNFNFDDPNLIILPLAFGKRQGREFIWNDLLSLETGSLKLANGRVIEKTLYNRRTRQDEPALFVALTFERREVLDSSNIKPMNLIGVDRGENIPAVIALTDPEGCPLSRFKDSLGNPTHILRIRESYKEKQRTIQAKKEVEQRRAGGYSRKYASKAKNLADDMVRNTARDLLYYAVTQDAMLIFENLSRGFGRQGKRTFMAERQYTRMEDWLTAKLAYEGLPSKTYLSKTLAQYTSKTCSNCGFTITSADYDRVLEKLKKTATGWMTTINGKELKVEGQITYYNRYKRQNVVKDLSVELDRLSEESVNNDISSWTKGRSGEALSLLKKRFSHRPVQEKFVCLNCGFETHADEQAALNIARSWLFLRSQEYKKYQTNKTTGNTDKRAFVETWQSFYRKKLKEVWKPAV

SEQ ID NO: 33322 - protein, 978 aa, synthetic construct
  REGION 1..978: note = engineered CasX variant
QEIKRINGIRRRLVKDSNTKKAGKTGPMKTLLVRVMTPDLRERLENLRKKPENIPQPISNTSRANLNKLLTDYTEMKKAILHVYWEEFQKDPVGLMSRVAQPASKKIDQNKLKPEMDEKGNLTTAGFACSQCGQPLFVYKLEQVSEKGKAYTNYFGRCNVAEHEKLILLAQLKPEKDSDEAVTYSLGKFGQRALDFYSIHVTKESTHPVKPLAQIAGNRYASTPVGKALSDACMGTIASFLSKYQDIIIEHQKVVKGNQKRLESLRELAGKENLEYPSVTLPPQPHTKEGVDAYNEVIARVRMWVNLNLWQKLKLSRDDAKPLLRLKGFPSFPLVERQANEVDWWDMVCNVKKLINEKKEDGKVFWQNLAGYKRQEALRPYLSSEEDRKKGKKFARYQLGDLLLHLEKKHGEDWGKVYDEAWERIDKKVEGLSKHIKLEEERRSEDAQSKAALTDWLRAKASFVIEGLKEADKDEFCRCELKLQKWYGDLRGKPFAIEAENSILDISGFSKQYNCAFIWQKDGVKKLNLYLIINYFKGGKLRFKKIKPEAFEANRFYTVINKKSGEIVPMEVNFNFDDPNLIILPLAFGKRQGREFIWNDLLSLETGSLKLANGRVIEKTLYNRRTRQDEPALFVALTFERREVLDSSNIKPMNLIGVDRGENIPAVIALTDPEGCPLSRFKDSLGNPTHILRIRESYKEKQRTIQAKKEVEQRRAGGYSRKYASKAKNLADDMVRNTARDLLYYAVTQDAMLIFENLSRGFGRQGKRTFMAERQYTRMEDWLTAKLAYEGLPSKTYLSKTLAQYTSKTCSNCGFTITSADYDRVLEKLKKTATGWMTTINGKELKVEGQITYYNRYKRQNVVKDLSVELDRLSEESVNNDISSWTKGRSGEALSLLKKRFSHRPVQEKFVCLNCGFETHADEQAALNIARSWLFLRSQEYKKYQTNKTTGNTDKRAFVETWQSFYRKKLKEVWKPAV

SEQ ID NO: 33323 - protein, 978 aa, synthetic construct
  REGION 1..978: note = engineered CasX variant
QEIKRINGIRRRLVKDSNTKKAGKTGPMKTLLVRVMTPDLRERLENLRKKPENIPQPISNTSRANLNKLLTDYTEMKKAILHVYWEEFQKDPVGLMSRVAQPASKKIDQNKLKPEMDEKGNLTTAGFACSQCGQPLFVYKLEQVSEKGKAYTNYFGRCNVAEHEKLILLAQLKPEKDSDEAVTYSLGKFGQRALDFYSIHVTKESTHPVKPLAQIAGNRYASAPVGKALSDACMGTIASFLSKYQDIIIEHQKVVKGNQKRLESLRELAGKENLEYPSVTLPPQPHTKEGVDAYNEVIARVRMWVNLNLWQKLKLSRDDAKPLLRLKGFPSFPLVERQANEVDWWDMVCNVKKLINEKKEDGKVFWQNLAGYKRQEALRPYLSSEEDRKKGKKFARYQLGDLLLHLEKKHGEDWGKVYDEAWERIDKKVEGLSKHIKLEEERRSEDAQSKAALTDWLRAKASFVIEGLKEADKDEFCRCELKLQKWYGDLRGKPFAIEAENSILDISGFSKQYNCAFIWQKDGVKKLNLYLIINYFKGGKLRFKKIKPEAFEANRFYTVINKKSGEIVPMEVNFNFDDPNLIILPLAFGKRQGREFIWNDLLSLETGSLKLANGRVIEKTLYNRRTRQDEPALFVALTFERREVLDSSNIKPMNLIGVDRGENIPAVIALTDPEGCPLSRFKDSLGNPTHILRIRESYKEKQRTIQAKKEVEQRRAGGYSRKYASKAKNLADDMVRNTARDLLYYAVTQDAMLIFENLSRGFGRQGKRTFMAERQYTRMEDWLTAKLAYEGLPSKTYLSKTLAQYTSKTCSNCGFTITSADYDRVLEKLKKTATGWMTTINGKELKVEGQITYYNRYKRQNVVKDLSVELDRLSEESVNNDISSWTKGRSGEALSLLKKRFSHRPVQEKFVCLNCGFETHADEQAALNIARSWLFLRSQEYKKYQTNKTTGNTDKRAFVETWQSFYRKKLKEVWKPAV

SEQ ID NO: 33324 - protein, 978 aa, synthetic construct
  REGION 1..978: note = engineered CasX variant
QEIKRINGIRRRLVKDSNTKKAGKTGPMKTLLVRVMTPDLRERLENLRKKPENIPQPISNTSRANLNKLLTDYTEMKKAILHVYWEEFQKDPVGLMSRVAQPASKKIDQNKLKPEMDEKGNLTTAGFACSQCGQPLFVYKLEQVSEKGKAYTNYFGRCNVAEHEKLILLAQLKPEKDSDEAVTYSLGKFGQRALDFYSIHVTKESTHPVKPLAQIAGNRYASVPVGKALSDACMGTIASFLSKYQDIIIEHQKVVKGNQKRLESLRELAGKENLEYPSVTLPPQPHTKEGVDAYNEVIARVRMWVNLNLWQKLKLSRDDAKPLLRLKGFPSFPLVERQANEVDWWDMVCNVKKLINEKKEDGKVFWQNLAGYKRQEALRPYLSSEEDRKKGKKFARYQLGDLLLHLEKKHGEDWGKVYDEAWERIDKKVEGLSKHIKLEEERRSEDAQSKAALTDWLRAKASFVIEGLKEADKDEFCRCELKLQKWYGDLRGKPFAIEAENSILDISGFSKQYNCAFIWQKDGVKKLNLYLIINYFKGGKLRFKKIKPEAFEANRFYTVINKKSGEIVPMEVNFNFDDPNLIILPLAFGKRQGREFIWNDLLSLETGSLKLANGRVIEKTLYNRRTRQDEPALFVALTFERREVLDSSNIKPMNLIGVDRGENIPAVIALTDPEGCPLSRFKDSLGNPTHILRIRESYKEKQRTIQAKKEVEQRRAGGYSRKYASKAKNLADDMVRNTARDLLYYAVTQDAMLIFENLSRGFGRQGKRTFMAERQYTRMEDWLTAKLAYEGLPSKTYLSKTLAQYTSKTCSNCGFTITSADYDRVLEKLKKTATGWMTTINGKELKVEGQITYYNRYKRQNVVKDLSVELDRLSEESVNNDISSWTKGRSGEALSLLKKRFSHRPVQEKFVCLNCGFETHADEQAALNIARSWLFLRSQEYKKYQTNKTTGNTDKRAFVETWQSFYRKKLKEVWKPAV

SEQ ID NO: 33325 - protein, 978 aa, synthetic construct
  REGION 1..978: note = engineered CasX variant
QEIKRINGIRRRLVKDSNTKKAGKTGPMKTLLVRVMTPDLRERLENLRKKPENIPQPISNTSRANLNKLLTDYTEMKKAILHVYWEEFQKDPVGLMSRVAQPASKKIDQNKLKPEMDEKGNLTTAGFACSQCGQPLFVYKLEQVSEKGKAYTNYFGRCNVAEHEKLIKLAQLKPEKDSDEAVTYSLGKFGQRALDFYSIHVTKESTHPVKPLAQIAGNRYASGPVGKALSDACMGTIASFLSKYQDIIIEHQKVVKGNQKRLESLRELAGKENLEYPSVTLPPQPHTKEGVDAYNEVIARVRMWVNLNLWQKLKLSRDDAKPLLRLKGFPSFPLVERQANEVDWWDMVCNVKKLINEKKEDGKVFWQNLAGYKRQEALRPYLSSEEDRKKGKKFARYQLGDLLLHLEKKHGEDWGKVYDEAWERIDKKVEGLSKHIKLEEERRSEDAQSKAALTDWLRAKASFVIEGLKEADKDEFCRCELKLQKWYGDLRGKPFAIEAENSILDISGFSKQYNCAFIWQKDGVKKLNLYLIINYFKGGKLRFKKIKPEAFEANRFYTVINKKSGEIVPMEVNFNFDDPNLIILPLAFGKRQGREFIWNDLLSLETGSLKLANGRVIEKTLYNRRTRQDEPALFVALTFERREVLDSSNIKPMNLIGVDRGENIPAVIALTDPEGCPLSRFKDSLGNPTHILRIRESYKEKQRTIQAKKEVEQRRAGGYSRKYASKAKNLADDMVRNTARDLLYYAVTQDAMLIFENLSRGFGRQGKRTFMAERQYTRMEDWLTAKLAYEGLPSKTYLSKTLAQYTSKTCSNCGFTITSADYDRVLEKLKKTATGWMTTINGKELKVEGQITYYNRYKRQNVVKDLSVELDRLSEESVNNDISSWTKGRSGEALSLLKKRFSHRPVQEKFVCLNCGFETHADEQAALNIARSWLFLRSQEYKKYQTNKTTGNTDKRAFVETWQSFYRKKLKEVWKPAV

SEQ ID NO: 33326 - protein, 977 aa, synthetic construct
  REGION 1..977: note = engineered CasX variant
QEIKRINGIRRRLVKDSNTKKAGKTGPMKTLLVRVMTPDLRERLENLRKKPENIPQPISNTSRANLNKLLTDYTEMKKAILHVYWEEFQKDPVGLMSRVAQPASKKIDQNKLKPEMDEKGNLTTAGFACSQCGQPLFVYKLEQVSEKGKAYTNYFGRCNVAEHEKLILLAQLKPEKDSDEAVTYSLGKFGQRALDFYSIHVTKESTHPVKPLAQIAGNRYASPVGKALSDACMGTIASFLSKYQDIIIEHQKVVKGNQKRLESLRELAGKENLEYPSVTLPPQPHTKEGVDAYNEVIARVRMWVNLNLWQKLKLSRDDAKPLLRLKGFPSFPLVERQANEVDWWDMVCNVKKLINEKKEDGKVFWQNLAGYKRQEALRPYLSSEEDRKKGKKFARYQLGDLLLHLEKKHGEDWGKVYDEAWERIDKKVEGLSKHIKLEEERRSEDAQSKAALTDWLRAKASFVIEGLKEADKDEFCRCELKLQKWYGDLRGKPFAIEAENSILDISGFSKQYNCAFIWQKDGVKKLNLYLIINYFKGGKLRFKKIKPEAFEANRFYTVINKKSGEIVPMEVNFNFDDPNLIILPLAFGKRQGREFIWNDLLSLETGSLKLANGRVIEKTLYNRRTRQDEPALFVALTFERREVLDSSNIKPMNLIGVDRGENIPAVIALTDPEGCPLSRFKDSLGNPTHILRIRESYKEKQRTIQAKKEVEQRRAGGYSRKYASKAKNLADDMVRNTARDLLYYAVTQDAMLIFENLSRGFGRQGKRTFMAERQYTRMEDWLTAKLAYEGLPSKTYLSKTLAQYTSKTCSNCGFTITSADYDRVLEKLKKTATGWMTTINGKELKVEGQITYYNRYKRQNVVKDLSVELDRLSEESVNNDISSWTKGRSGEALSLLKKRFSHRPVQEKFVCLNCGFETHADEQAALNIARSWLFLRSQEYKKYQTNKTTGNTDKRAFVETWQSFYRKKLKEVWKPAV

SEQ ID NO: 33327 - protein, 978 aa, synthetic construct
  REGION 1..978: note = engineered CasX variant
QEIKRINGIRRRLVKDSNTKKAGKTGPMKTLLVRVMTPDLRERLENLRKKPENIPQPISNTSRANLNKLLTDYTEMKKAILHVYWEEFQKDPVGLMSRVAQPASKKIDQNKLKPEMDEKGNLTTAGFACSQCGQPLFVYKLEQVSEKGKAYTNYFGRCNVAEHEKLILLAQLKPEKDSDEAVTYSLGKFGQRALDFYSIHVTKESTHPVKPLAQIAGNRYASYPVGKALSDACMGTIASFLSKYQDIIIEHQKVVKGNQKRLESLRELAGKENLEYPSVTLPPQPHTKEGVDAYNEVIARVRMWVNLNLWQKLKLSRDDAKPLLRLKGFPSFPLVERQANEVDWWDMVCNVKKLINEKKEDGKVFWQNLAGYKRQEALRPYLSSEEDRKKGKKFARYQLGDLLLHLEKKHGEDWGKVYDEAWERIDKKVEGLSKHIKLEEERRSEDAQSKAALTDWLRAKASFVIEGLKEADKDEFCRCELKLQKWYGDLRGKPFAIEAENSILDISGFSKQYNCAFIWQKDGVKKLNLYLIINYFKGGKLRFKKIKPEAFEANRFYTVINKKSGEIVPMEVNFNFDDPNLIILPLAFGKRQGREFIWNDLLSLETGSLKLANGRVIEKTLYNRRTRQDEPALFVALTFERREVLDSSNIKPMNLIGVDRGENIPAVIALTDPEGCPLSRFKDSLGNPTHILRIGESYKEKQRTIQAKKEVEQRRAGGYSRKYASKAKNLADDMVRNTARDLLYYAVTQDAMLIFENLSRGFGRQGKRTFSAERQYTRMEDWLTAKLAYEGLPSKTYLSKTLAQYTSKTCSNCGFTITSADYDRVLEKLKKTATGWMTTINGKELKVEGQITYYNRYKRQNVVKDLSVELDRLSEESVNNDISSWTKGRSGEALSLLKKRFSHRPVQEKFVCLNCGFETHADEQAALNIARSWLFLRSQEYKKYQTNKTTGNTDKRAFVETWQSFYRKKLKEVWKPAV

SEQ ID NO: 33328 - protein, 978 aa, synthetic construct
  REGION 1..978: note = engineered CasX variant
QEIKRINGIRRRLVKDSNTKKAGKTGPMKTLLVRVMTPDLRERLENLRKKPENIPQPISNTSRANLNKLLTDYTEMKKAILHVYWEEFQKDPVGLMSRVAQPASKKIDQNKLKPEMDEKGNLTTAGFACSQCGQPLFVYKLEQVSEKGKAYTNYFGRCNVAEHEKLILLAQLKPEKDSDEAVTYSLGKFGQRALDFYSIHVTKESTHPVKPLAQIAGNRYASHPVGKALSDACMGTIASFLSKYQDIIIEHQKVVKGNQKRLESLRELAGKENLEYPSVTLPPQPHTKEGVDAYNEVIARVRMWVNLNLWQKLKLSRDDAKPLLRLKGFPSFPLVERQANEVDWWDMVCNVKKLINEKKEDGKVFWQNLAGYKRQEALRPYLSSEEDRKKGKKFARYQLGDLLLHLEKKHGEDWGKVYDEAWERIDKKVEGLSKHIKLEEERRSEDAQSKAALTDWLRAKASFVIEGLKEADKDEFCRCELKLQKWYGDLRGKPFAIEAENSILDISGFSKQYNCAFIWQKDGVKKLNLYLIINYFKGGKLRFKKIKPEAFEANRFYTVINKKSGEIVPMEVNFNFDDPNLIILPLAFGKRQGREFIWNDLLSLETGSLKLANGRVIEKTLYNRRTRQDEPALFVALTFERREVLDSSNIKPMNLIGVDRGENIPAVIALTDPEGCPLSRFKDSLGNPTHILRIGESYKEKQRTIQAKKEVEQRRAGGYSRKYASKAKNLADDMVRNTARDLLYYAVTQDAMLIFENLSRGFGRQGKRTFSAERQYTRMEDWLTAKLAYEGLPSKTYLSKTLAQYTSKTCSNCGFTITSADYDRVLEKLKKTATGWMTTINGKELKVEGQITYYNRYKRQNVVKDLSVELDRLSEESVNNDISSWTKGRSGEALSLLKKRFSHRPVQEKFVCLNCGFETHADEQAALNIARSWLFLRSQEYKKYQTNKTTGNTDKRAFVETWQSFYRKKLKEVWKPAV

SEQ ID NO: 33329 - protein, 978 aa, synthetic construct
  REGION 1..978: note = engineered CasX variant
QEIKRINGIRRRLVKDSNTKKAGKTGPMKTLLVRVMTPDLRERLENLRKKPENIPQPISNTSRANLNKLLTDYTEMKKAILHVYWEEFQKDPVGLMSRVAQPASKKIDQNKLKPEMDEKGNLTTAGFACSQCGQPLFVYKLEQVSEKGKAYTNYFGRCNVAEHEKLILLAQLKPEKDSDEAVTYSLGKFGQRALDFYSIHVTKESTHPVKPLAQIAGNRYASSPVGKALSDACMGTIASFLSKYQDIIIEHQKVVKGNQKRLESLRELAGKENLEYPSVTLPPQPHTKEGVDAYNEVIARVRMWVNLNLWQKLKLSRDDAKPLLRLKGFPSFPLVERQANEVDWWDMVCNVKKLINEKKEDGKVFWQNLAGYKRQEALRPYLSSEEDRKKGKKFARYQLGDLLLHLEKKHGEDWGKVYDEAWERIDKKVEGLSKHIKLEEERRSEDAQSKAALTDWLRAKASFVIEGLKEADKDEFCRCELKLQKWYGDLRGKPFAIEAENSILDISGFSKQYNCAFIWQKDGVKKLNLYLIINYFKGGKLRFKKIKPEAFEANRFYTVINKKSGEIVPMEVNFNFDDPNLIILPLAFGKRQGREFIWNDLLSLETGSLKLANGRVIEKTLYNRRTRQDEPALFVALTFERREVLDSSNIKPMNLIGVDRGENIPAVIALTDPEGCPLSRFKDSLGNPTHILRIGESYKEKQRTIQAKKEVEQRRAGGYSRKYASKAKNLADDMVRNTARDLLYYAVTQDAMLIFENLSRGFGRQGKRTFSAERQYTRMEDWLTAKLAYEGLPSKTYLSKTLAQYTSKTCSNCGFTITSADYDRVLEKLKKTATGWMTTINGKELKVEGQITYYNRYKRQNVVKDLSVELDRLSEESVNNDISSWTKGRSGEALSLLKKRFSHRPVQEKFVCLNCGFETHADEQAALNIARSWLFLRSQEYKKYQTNKTTGNTDKRAFVETWQSFYRKKLKEVWKPAV

SEQ ID NO: 33330 - protein, 978 aa, synthetic construct
  REGION 1..978: note = engineered CasX variant
QEIKRINGIRRRLVKDSNTKKAGKTGPMKTLLVRVMTPDLRERLENLRKKPENIPQPISNTSRANLNKLLTDYTEMKKAILHVYWEEFQKDPVGLMSRVAQPASKKIDQNKLKPEMDEKGNLTTAGFACSQCGQPLFVYKLEQVSEKGKAYTNYFGRCNVAEHEKLILLAQLKPEKDSDEAVTYSLGKFGQRALDFYSIHVTKESTHPVKPLAQIAGNRYASTPVGKALSDACMGTIASFLSKYQDIIIEHQKVVKGNQKRLESLRELAGKENLEYPSVTLPPQPHTKEGVDAYNEVIARVRMWVNLNLWQKLKLSRDDAKPLLRLKGFPSFPLVERQANEVDWWDMVCNVKKLINEKKEDGKVFWQNLAGYKRQEALRPYLSSEEDRKKGKKFARYQLGDLLLHLEKKHGEDWGKVYDEAWERIDKKVEGLSKHIKLEEERRSEDAQSKAALTDWLRAKASFVIEGLKEADKDEFCRCELKLQKWYGDLRGKPFAIEAENSILDISGFSKQYNCAFIWQKDGVKKLNLYLIINYFKGGKLRFKKIKPEAFEANRFYTVINKKSGEIVPMEVNFNFDDPNLIILPLAFGKRQGREFIWNDLLSLETGSLKLANGRVIEKTLYNRRTRQDEPALFVALTFERREVLDSSNIKPMNLIGVDRGENIPAVIALTDPEGCPLSRFKDSLGNPTHILRIGESYKEKQRTIQAKKEVEQRRAGGYSRKYASKAKNLADDMVRNTARDLLYYAVTQDAMLIFENLSRGFGRQGKRTFSAERQYTRMEDWLTAKLAYEGLPSKTYLSKTLAQYTSKTCSNCGFTITSADYDRVLEKLKKTATGWMTTINGKELKVEGQITYYNRYKRQNVVKDLSVELDRLSEESVNNDISSWTKGRSGEALSLLKKRFSHRPVQEKFVCLNCGFETHADEQAALNIARSWLFLRSQEYKKYQTNKTTGNTDKRAFVETWQSFYRKKLKEVWKPAV

SEQ ID NO: 33331 - protein, 978 aa, synthetic construct
  REGION 1..978: note = engineered CasX variant
QEIKRINGIRRRLVKDSNTKKAGKTGPMKTLLVRVMTPDLRERLENLRKKPENIPQPISNTSRANLNKLLTDYTEMKKAILHVYWEEFQKDPVGLMSRVAQPASKKIDQNKLKPEMDEKGNLTTAGFACSQCGQPLFVYKLEQVSEKGKAYTNYFGRCNVAEHEKLILLAQLKPEKDSDEAVTYSLGKFGQRALDFYSIHVTKESTHPVKPLAQIAGNRYASAPVGKALSDACMGTIASFLSKYQDIIIEHQKVVKGNQKRLESLRELAGKENLEYPSVTLPPQPHTKEGVDAYNEVIARVRMWVNLNLWQKLKLSRDDAKPLLRLKGFPSFPLVERQANEVDWWDMVCNVKKLINEKKEDGKVFWQNLAGYKRQEALRPYLSSEEDRKKGKKFARYQLGDLLLHLEKKHGEDWGKVYDEAWERIDKKVEGLSKHIKLEEERRSEDAQSKAALTDWLRAKASFVIEGLKEADKDEFCRCELKLQKWYGDLRGKPFAIEAENSILDISGFSKQYNCAFIWQKDGVKKLNLYLIINYFKGGKLRFKKIKPEAFEANRFYTVINKKSGEIVPMEVNFNFDDPNLIILPLAFGKRQGREFIWNDLLSLETGSLKLANGRVIEKTLYNRRTRQDEPALFVALTFERREVLDSSNIKPMNLIGVDRGENIPAVIALTDPEGCPLSRFKDSLGNPTHILRIGESYKEKQRTIQAKKEVEQRRAGGYSRKYASKAKNLADDMVRNTARDLLYYAVTQDAMLIFENLSRGFGRQGKRTFSAERQYTRMEDWLTAKLAYEGLPSKTYLSKTLAQYTSKTCSNCGFTITSADYDRVLEKLKKTATGWMTTINGKELKVEGQITYYNRYKRQNVVKDLSVELDRLSEESVNNDISSWTKGRSGEALSLLKKRFSHRPVQEKFVCLNCGFETHADEQAALNIARSWLFLRSQEYKKYQTNKTTGNTDKRAFVETWQSFYRKKLKEVWKPAV

SEQ ID NO: 33332 - protein, 978 aa, synthetic construct
  REGION 1..978: note = engineered CasX variant
QEIKRINGIRRRLVKDSNTKKAGKTGPMKTLLVRVMTPDLRERLENLRKKPENIPQPISNTSRANLNKLLTDYTEMKKAILHVYWEEFQKDPVGLMSRVAQPASKKIDQNKLKPEMDEKGNLTTAGFACSQCGQPLFVYKLEQVSEKGKAYTNYFGRCNVAEHEKLILLAQLKPEKDSDEAVTYSLGKFGQRALDFYSIHVTKESTHPVKPLAQIAGNRYASVPVGKALSDACMGTIASFLSKYQDIIIEHQKVVKGNQKRLESLRELAGKENLEYPSVTLPPQPHTKEGVDAYNEVIARVRMWVNLNLWQKLKLSRDDAKPLLRLKGFPSFPLVERQANEVDWWDMVCNVKKLINEKKEDGKVFWQNLAGYKRQEALRPYLSSEEDRKKGKKFARYQLGDLLLHLEKKHGEDWGKVYDEAWERIDKKVEGLSKHIKLEEERRSEDAQSKAALTDWLRAKASFVIEGLKEADKDEFCRCELKLQKWYGDLRGKPFAIEAENSILDISGFSKQYNCAFIWQKDGVKKLNLYLIINYFKGGKLRFKKIKPEAFEANRFYTVINKKSGEIVPMEVNFNFDDPNLIILPLAFGKRQGREFIWNDLLSLETGSLKLANGRVIEKTLYNRRTRQDEPALFVALTFERREVLDSSNIKPMNLIGVDRGENIPAVIALTDPEGCPLSRFKDSLGNPTHILRIGESYKEKQRTIQAKKEVEQRRAGGYSRKYASKAKNLADDMVRNTARDLLYYAVTQDAMLIFENLSRGFGRQGKRTFSAERQYTRMEDWLTAKLAYEGLPSKTYLSKTLAQYTSKTCSNCGFTITSADYDRVLEKLKKTATGWMTTINGKELKVEGQITYYNRYKRQNVVKDLSVELDRLSEESVNNDISSWTKGRSGEALSLLKKRFSHRPVQEKFVCLNCGFETHADEQAALNIARSWLFLRSQEYKKYQTNKTTGNTDKRAFVETWQSFYRKKLKEVWKPAV

SEQ ID NO: 33333 - protein, 978 aa, synthetic construct
  REGION 1..978: note = engineered CasX variant
QEIKRINGIRRRLVKDSNTKKAGKTGPMKTLLVRVMTPDLRERLENLRKKPENIPQPISNTSRANLNKLLTDYTEMKKAILHVYWEEFQKDPVGLMSRVAQPASKKIDQNKLKPEMDEKGNLTTAGFACSQCGQPLFVYKLEQVSEKGKAYTNYFGRCNVAEHEKLIKLAQLKPEKDSDEAVTYSLGKFGQRALDFYSIHVTKESTHPVKPLAQIAGNRYASGPVGKALSDACMGTIASFLSKYQDIIIEHQKVVKGNQKRLESLRELAGKENLEYPSVTLPPQPHTKEGVDAYNEVIARVRMWVNLNLWQKLKLSRDDAKPLLRLKGFPSFPLVERQANEVDWWDMVCNVKKLINEKKEDGKVFWQNLAGYKRQEALRPYLSSEEDRKKGKKFARYQLGDLLLHLEKKHGEDWGKVYDEAWERIDKKVEGLSKHIKLEEERRSEDAQSKAALTDWLRAKASFVIEGLKEADKDEFCRCELKLQKWYGDLRGKPFAIEAENSILDISGFSKQYNCAFIWQKDGVKKLNLYLIINYFKGGKLRFKKIKPEAFEANRFYTVINKKSGEIVPMEVNFNFDDPNLIILPLAFGKRQGREFIWNDLLSLETGSLKLANGRVIEKTLYNRRTRQDEPALFVALTFERREVLDSSNIKPMNLIGVDRGENIPAVIALTDPEGCPLSRFKDSLGNPTHILRIGESYKEKQRTIQAKKEVEQRRAGGYSRKYASKAKNLADDMVRNTARDLLYYAVTQDAMLIFENLSRGFGRQGKRTFSAERQYTRMEDWLTAKLAYEGLPSKTYLSKTLAQYTSKTCSNCGFTITSADYDRVLEKLKKTATGWMTTINGKELKVEGQITYYNRYKRQNVVKDLSVELDRLSEESVNNDISSWTKGRSGEALSLLKKRFSHRPVQEKFVCLNCGFETHADEQAALNIARSWLFLRSQEYKKYQTNKTTGNTDKRAFVETWQSFYRKKLKEVWKPAV

SEQ ID NO: 33334 - protein, 977 aa, synthetic construct
  REGION 1..977: note = engineered CasX variant
QEIKRINGIRRRLVKDSNTKKAGKTGPMKTLLVRVMTPDLRERLENLRKKPENIPQPISNTSRANLNKLLTDYTEMKKAILHVYWEEFQKDPVGLMSRVAQPASKKIDQNKLKPEMDEKGNLTTAGFACSQCGQPLFVYKLEQVSEKGKAYTNYFGRCNVAEHEKLILLAQLKPEKDSDEAVTYSLGKFGQRALDFYSIHVTKESTHPVKPLAQIAGNRYASPVGKALSDACMGTIASFLSKYQDIIIEHQKVVKGNQKRLESLRELAGKENLEYPSVTLPPQPHTKEGVDAYNEVIARVRMWVNLNLWQKLKLSRDDAKPLLRLKGFPSFPLVERQANEVDWWDMVCNVKKLINEKKEDGKVFWQNLAGYKRQEALRPYLSSEEDRKKGKKFARYQLGDLLLHLEKKHGEDWGKVYDEAWERIDKKVEGLSKHIKLEEERRSEDAQSKAALTDWLRAKASFVIEGLKEADKDEFCRCELKLQKWYGDLRGKPFAIEAENSILDISGFSKQYNCAFIWQKDGVKKLNLYLIINYFKGGKLRFKKIKPEAFEANRFYTVINKKSGEIVPMEVNFNFDDPNLIILPLAFGKRQGREFIWNDLLSLETGSLKLANGRVIEKTLYNRRTRQDEPALFVALTFERREVLDSSNIKPMNLIGVDRGENIPAVIALTDPEGCPLSRFKDSLGNPTHILRIGESYKEKQRTIQAKKEVEQRRAGGYSRKYASKAKNLADDMVRNTARDLLYYAVTQDAMLIFENLSRGFGRQGKRTFSAERQYTRMEDWLTAKLAYEGLPSKTYLSKTLAQYTSKTCSNCGFTITSADYDRVLEKLKKTATGWMTTINGKELKVEGQITYYNRYKRQNVVKDLSVELDRLSEESVNNDISSWTKGRSGEALSLLKKRFSHRPVQEKFVCLNCGFETHADEQAALNIARSWLFLRSQEYKKYQTNKTTGNTDKRAFVETWQSFYRKKLKEVWKPAV

SEQ ID NO: 33335 - protein, 978 aa, synthetic construct
  REGION 1..978: note = engineered CasX variant
QEIKRINGIRRRLVKDSNTKKAGKTGPMKTLLVRVMTPDLRERLENLRKKPENIPQPISNTSRANLNKLLTDYTEMKKAILHVYWEEFQKDPVGLMSRVAQPASKKIDQNKLKPEMDEKGNLTTAGFACSQCGQPLFVYKLEQVSEKGKAYTNYFGRCNVAEHEKLILLAQLKPEKDSDEAVTYSLGKFGQRALDFYSIHVTKESTHPVKPLAQIAGNRYASYPVGKALSDACMGTIASFLSKYQDIIIEHQKVVKGNQKRLESLRELAGKENLEYPSVTLPPQPHTKEGVDAYNEVIARVRMWVNLNLWQKLKLSRDDAKPLLRLKGFPSFPLVERQANEVDWWDMVCNVKKLINEKKEDGKVFWQNLAGYKRQEALRPYLSSEEDRKKGKKFARYQLGDLLLHLEKKHGEDWGKVYDEAWERIDKKVEGLSKHIKLEEERRSEDAQSKAALTDWLRAKASFVIEGLKEADKDEFCRCELKLQKWYGDLRGKPFAIEAENSILDISGFSKQYNCAFIWQKDGVKKLNLYLIINYFKGGKLRFKKIKPEAFEANRFYTVINKKSGEIVPMEVNFNFDDPNLIILPLAFGKRQGREFIWNDLLSLETGSLKLANGRVIEKTLYNRRTRQDEPALFVALTFERREVLDSSNIKPMNLIGVDRGENIPAVIALTDPEGCPLSRFKDSLGNPTHILRIGESYKEKQRTIQAKKEVEQRRAGGYSRKYASKAKNLADDMVRNTARDLLYYAVTQDAMLIFENLSRGFGRQGKRTFMAERQYTRMEDWLTAKLAYEGLPSKTYLSKTLAQYTSKTCSNCGFTITSADYDRVLEKLKKTATGWMTTINGKELKVEGQITYYNRYKRQNVVKDLSVELDRLSEESVNNDISSWDKGRSGEALSLLKKRFSHRPVQEKFVCLNCGFETHADEQAALNIARSWLFLRSQEYKKYQTNKTTGNTDKRAFVETWQSFYRKKLKEVWKPAV

SEQ ID NO: 33336 - protein, 978 aa, synthetic construct
  REGION 1..978: note = engineered CasX variant
QEIKRINGIRRRLVKDSNTKKAGKTGPMKTLLVRVMTPDLRERLENLRKKPENIPQPISNTSRANLNKLLTDYTEMKKAILHVYWEEFQKDPVGLMSRVAQPASKKIDQNKLKPEMDEKGNLTTAGFACSQCGQPLFVYKLEQVSEKGKAYTNYFGRCNVAEHEKLILLAQLKPEKDSDEAVTYSLGKFGQRALDFYSIHVTKESTHPVKPLAQIAGNRYASHPVGKALSDACMGTIASFLSKYQDIIIEHQKVVKGNQKRLESLRELAGKENLEYPSVTLPPQPHTKEGVDAYNEVIARVRMWVNLNLWQKLKLSRDDAKPLLRLKGFPSFPLVERQANEVDWWDMVCNVKKLINEKKEDGKVFWQNLAGYKRQEALRPYLSSEEDRKKGKKFARYQLGDLLLHLEKKHGEDWGKVYDEAWERIDKKVEGLSKHIKLEEERRSEDAQSKAALTDWLRAKASFVIEGLKEADKDEFCRCELKLQKWYGDLRGKPFAIEAENSILDISGFSKQYNCAFIWQKDGVKKLNLYLIINYFKGGKLRFKKIKPEAFEANRFYTVINKKSGEIVPMEVNFNFDDPNLIILPLAFGKRQGREFIWNDLLSLETGSLKLANGRVIEKTLYNRRTRQDEPALFVALTFERREVLDSSNIKPMNLIGVDRGENIPAVIALTDPEGCPLSRFKDSLGNPTHILRIGESYKEKQRTIQAKKEVEQRRAGGYSRKYASKAKNLADDMVRNTARDLLYYAVTQDAMLIFENLSRGFGRQGKRTFMAERQYTRMEDWLTAKLAYEGLPSKTYLSKTLAQYTSKTCSNCGFTITSADYDRVLEKLKKTATGWMTTINGKELKVEGQITYYNRYKRQNVVKDLSVELDRLSEESVNNDISSWDKGRSGEALSLLKKRFSHRPVQEKFVCLNCGFETHADEQAALNIARSWLFLRSQEYKKYQTNKTTGNTDKRAFVETWQSFYRKKLKEVWKPAV

SEQ ID NO: 33337 - protein, 978 aa, synthetic construct
  REGION 1..978: note = engineered CasX variant
QEIKRINGIRRRLVKDSNTKKAGKTGPMKTLLVRVMTPDLRERLENLRKKPENIPQPISNTSRANLNKLLTDYTEMKKAILHVYWEEFQKDPVGLMSRVAQPASKKIDQNKLKPEMDEKGNLTTAGFACSQCGQPLFVYKLEQVSEKGKAYTNYFGRCNVAEHEKLILLAQLKPEKDSDEAVTYSLGKFGQRALDFYSIHVTKESTHPVKPLAQIAGNRYASSPVGKALSDACMGTIASFLSKYQDIIIEHQKVVKGNQKRLESLRELAGKENLEYPSVTLPPQPHTKEGVDAYNEVIARVRMWVNLNLWQKLKLSRDDAKPLLRLKGFPSFPLVERQANEVDWWDMVCNVKKLINEKKEDGKVFWQNLAGYKRQEALRPYLSSEEDRKKGKKFARYQLGDLLLHLEKKHGEDWGKVYDEAWERIDKKVEGLSKHIKLEEERRSEDAQSKAALTDWLRAKASFVIEGLKEADKDEFCRCELKLQKWYGDLRGKPFAIEAENSILDISGFSKQYNCAFIWQKDGVKKLNLYLIINYFKGGKLRFKKIKPEAFEANRFYTVINKKSGEIVPMEVNFNFDDPNLIILPLAFGKRQGREFIWNDLLSLETGSLKLANGRVIEKTLYNRRTRQDEPALFVALTFERREVLDSSNIKPMNLIGVDRGENIPAVIALTDPEGCPLSRFKDSLGNPTHILRIGESYKEKQRTIQAKKEVEQRRAGGYSRKYASKAKNLADDMVRNTARDLLYYAVTQDAMLIFENLSRGFGRQGKRTFMAERQYTRMEDWLTAKLAYEGLPSKTYLSKTLAQYTSKTCSNCGFTITSADYDRVLEKLKKTATGWMTTINGKELKVEGQITYYNRYKRQNVVKDLSVELDRLSEESVNNDISSWDKGRSGEALSLLKKRFSHRPVQEKFVCLNCGFETHADEQAALNIARSWLFLRSQEYKKYQTNKTTGNTDKRAFVETWQSFYRKKLKEVWKPAV

SEQ ID NO: 33338 - protein, 978 aa, synthetic construct
  REGION 1..978: note = engineered CasX variant
QEIKRINGIRRRLVKDSNTKKAGKTGPMKTLLVRVMTPDLRERLENLRKKPENIPQPISNTSRANLNKLLTDYTEMKKAILHVYWEEFQKDPVGLMSRVAQPASKKIDQNKLKPEMDEKGNLTTAGFACSQCGQPLFVYKLEQVSEKGKAYTNYFGRCNVAEHEKLILLAQLKPEKDSDEAVTYSLGKFGQRALDFYSIHVTKESTHPVKPLAQIAGNRYASTPVGKALSDACMGTIASFLSKYQDIIIEHQKVVKGNQKRLESLRELAGKENLEYPSVTLPPQPHTKEGVDAYNEVIARVRMWVNLNLWQKLKLSRDDAKPLLRLKGFPSFPLVERQANEVDWWDMVCNVKKLINEKKEDGKVFWQNLAGYKRQEALRPYLSSEEDRKKGKKFARYQLGDLLLHLEKKHGEDWGKVYDEAWERIDKKVEGLSKHIKLEEERRSEDAQSKAALTDWLRAKASFVIEGLKEADKDEFCRCELKLQKWYGDLRGKPFAIEAENSILDISGFSKQYNCAFIWQKDGVKKLNLYLIINYFKGGKLRFKKIKPEAFEANRFYTVINKKSGEIVPMEVNFNFDDPNLIILPLAFGKRQGREFIWNDLLSLETGSLKLANGRVIEKTLYNRRTRQDEPALFVALTFERREVLDSSNIKPMNLIGVDRGENIPAVIALTDPEGCPLSRFKDSLGNPTHILRIGESYKEKQRTIQAKKEVEQRRAGGYSRKYASKAKNLADDMVRNTARDLLYYAVTQDAMLIFENLSRGFGRQGKRTFMAERQYTRMEDWLTAKLAYEGLPSKTYLSKTLAQYTSKTCSNCGFTITSADYDRVLEKLKKTATGWMTTINGKELKVEGQITYYNRYKRQNVVKDLSVELDRLSEESVNNDISSWDKGRSGEALSLLKKRFSHRPVQEKFVCLNCGFETHADEQAALNIARSWLFLRSQEYKKYQTNKTTGNTDKRAFVETWQSFYRKKLKEVWKPAV

SEQ ID NO: 33339 - protein, 978 aa, synthetic construct
  REGION 1..978: note = engineered CasX variant
QEIKRINGIRRRLVKDSNTKKAGKTGPMKTLLVRVMTPDLRERLENLRKKPENIPQPISNTSRANLNKLLTDYTEMKKAILHVYWEEFQKDPVGLMSRVAQPASKKIDQNKLKPEMDEKGNLTTAGFACSQCGQPLFVYKLEQVSEKGKAYTNYFGRCNVAEHEKLILLAQLKPEKDSDEAVTYSLGKFGQRALDFYSIHVTKESTHPVKPLAQIAGNRYASAPVGKALSDACMGTIASFLSKYQDIIIEHQKVVKGNQKRLESLRELAGKENLEYPSVTLPPQPHTKEGVDAYNEVIARVRMWVNLNLWQKLKLSRDDAKPLLRLKGFPSFPLVERQANEVDWWDMVCNVKKLINEKKEDGKVFWQNLAGYKRQEALRPYLSSEEDRKKGKKFARYQLGDLLLHLEKKHGEDWGKVYDEAWERIDKKVEGLSKHIKLEEERRSEDAQSKAALTDWLRAKASFVIEGLKEADKDEFCRCELKLQKWYGDLRGKPFAIEAENSILDISGFSKQYNCAFIWQKDGVKKLNLYLIINYFKGGKLRFKKIKPEAFEANRFYTVINKKSGEIVPMEVNFNFDDPNLIILPLAFGKRQGREFIWNDLLSLETGSLKLANGRVIEKTLYNRRTRQDEPALFVALTFERREVLDSSNIKPMNLIGVDRGENIPAVIALTDPEGCPLSRFKDSLGNPTHILRIGESYKEKQRTIQAKKEVEQRRAGGYSRKYASKAKNLADDMVRNTARDLLYYAVTQDAMLIFENLSRGFGRQGKRTFMAERQYTRMEDWLTAKLAYEGLPSKTYLSKTLAQYTSKTCSNCGFTITSADYDRVLEKLKKTATGWMTTINGKELKVEGQITYYNRYKRQNVVKDLSVELDRLSEESVNNDISSWDKGRSGEALSLLKKRFSHRPVQEKFVCLNCGFETHADEQAALNIARSWLFLRSQEYKKYQTNKTTGNTDKRAFVETWQSFYRKKLKEVWKPAV

SEQ ID NO: 33340 - protein, 978 aa, synthetic construct
  REGION 1..978: note = engineered CasX variant
QEIKRINGIRRRLVKDSNTKKAGKTGPMKTLLVRVMTPDLRERLENLRKKPENIPQPISNTSRANLNKLLTDYTEMKKAILHVYWEEFQKDPVGLMSRVAQPASKKIDQNKLKPEMDEKGNLTTAGFACSQCGQPLFVYKLEQVSEKGKAYTNYFGRCNVAEHEKLILLAQLKPEKDSDEAVTYSLGKFGQRALDFYSIHVTKESTHPVKPLAQIAGNRYASVPVGKALSDACMGTIASFLSKYQDIIIEHQKVVKGNQKRLESLRELAGKENLEYPSVTLPPQPHTKEGVDAYNEVIARVRMWVNLNLWQKLKLSRDDAKPLLRLKGFPSFPLVERQANEVDWWDMVCNVKKLINEKKEDGKVFWQNLAGYKRQEALRPYLSSEEDRKKGKKFARYQLGDLLLHLEKKHGEDWGKVYDEAWERIDKKVEGLSKHIKLEEERRSEDAQSKAALTDWLRAKASFVIEGLKEADKDEFCRCELKLQKWYGDLRGKPFAIEAENSILDISGFSKQYNCAFIWQKDGVKKLNLYLIINYFKGGKLRFKKIKPEAFEANRFYTVINKKSGEIVPMEVNFNFDDPNLIILPLAFGKRQGREFIWNDLLSLETGSLKLANGRVIEKTLYNRRTRQDEPALFVALTFERREVLDSSNIKPMNLIGVDRGENIPAVIALTDPEGCPLSRFKDSLGNPTHILRIGESYKEKQRTIQAKKEVEQRRAGGYSRKYASKAKNLADDMVRNTARDLLYYAVTQDAMLIFENLSRGFGRQGKRTFMAERQYTRMEDWLTAKLAYEGLPSKTYLSKTLAQYTSKTCSNCGFTITSADYDRVLEKLKKTATGWMTTINGKELKVEGQITYYNRYKRQNVVKDLSVELDRLSEESVNNDISSWDKGRSGEALSLLKKRFSHRPVQEKFVCLNCGFETHADEQAALNIARSWLFLRSQEYKKYQTNKTTGNTDKRAFVETWQSFYRKKLKEVWKPAV

SEQ ID NO: 33341 - protein, 978 aa, synthetic construct
  REGION 1..978: note = engineered CasX variant
QEIKRINGIRRRLVKDSNTKKAGKTGPMKTLLVRVMTPDLRERLENLRKKPENIPQPISNTSRANLNKLLTDYTEMKKAILHVYWEEFQKDPVGLMSRVAQPASKKIDQNKLKPEMDEKGNLTTAGFACSQCGQPLFVYKLEQVSEKGKAYTNYFGRCNVAEHEKLIKLAQLKPEKDSDEAVTYSLGKFGQRALDFYSIHVTKESTHPVKPLAQIAGNRYASGPVGKALSDACMGTIASFLSKYQDIIIEHQKVVKGNQKRLESLRELAGKENLEYPSVTLPPQPHTKEGVDAYNEVIARVRMWVNLNLWQKLKLSRDDAKPLLRLKGFPSFPLVERQANEVDWWDMVCNVKKLINEKKEDGKVFWQNLAGYKRQEALRPYLSSEEDRKKGKKFARYQLGDLLLHLEKKHGEDWGKVYDEAWERIDKKVEGLSKHIKLEEERRSEDAQSKAALTDWLRAKASFVIEGLKEADKDEFCRCELKLQKWYGDLRGKPFAIEAENSILDISGFSKQYNCAFIWQKDGVKKLNLYLIINYFKGGKLRFKKIKPEAFEANRFYTVINKKSGEIVPMEVNFNFDDPNLIILPLAFGKRQGREFIWNDLLSLETGSLKLANGRVIEKTLYNRRTRQDEPALFVALTFERREVLDSSNIKPMNLIGVDRGENIPAVIALTDPEGCPLSRFKDSLGNPTHILRIGESYKEKQRTIQAKKEVEQRRAGGYSRKYASKAKNLADDMVRNTARDLLYYAVTQDAMLIFENLSRGFGRQGKRTFMAERQYTRMEDWLTAKLAYEGLPSKTYLSKTLAQYTSKTCSNCGFTITSADYDRVLEKLKKTATGWMTTINGKELKVEGQITYYNRYKRQNVVKDLSVELDRLSEESVNNDISSWDKGRSGEALSLLKKRFSHRPVQEKFVCLNCGFETHADEQAALNIARSWLFLRSQEYKKYQTNKTTGNTDKRAFVETWQSFYRKKLKEVWKPAV

SEQ ID NO: 33342 - protein, 977 aa, synthetic construct
  REGION 1..977: note = engineered CasX variant
QEIKRINGIRRRLVKDSNTKKAGKTGPMKTLLVRVMTPDLRERLENLRKKPENIPQPISNTSRANLNKLLTDYTEMKKAILHVYWEEFQKDPVGLMSRVAQPASKKIDQNKLKPEMDEKGNLTTAGFACSQCGQPLFVYKLEQVSEKGKAYTNYFGRCNVAEHEKLILLAQLKPEKDSDEAVTYSLGKFGQRALDFYSIHVTKESTHPVKPLAQIAGNRYASPVGKALSDACMGTIASFLSKYQDIIIEHQKVVKGNQKRLESLRELAGKENLEYPSVTLPPQPHTKEGVDAYNEVIARVRMWVNLNLWQKLKLSRDDAKPLLRLKGFPSFPLVERQANEVDWWDMVCNVKKLINEKKEDGKVFWQNLAGYKRQEALRPYLSSEEDRKKGKKFARYQLGDLLLHLEKKHGEDWGKVYDEAWERIDKKVEGLSKHIKLEEERRSEDAQSKAALTDWLRAKASFVIEGLKEADKDEFCRCELKLQKWYGDLRGKPFAIEAENSILDISGFSKQYNCAFIWQKDGVKKLNLYLIINYFKGGKLRFKKIKPEAFEANRFYTVINKKSGEIVPMEVNFNFDDPNLIILPLAFGKRQGREFIWNDLLSLETGSLKLANGRVIEKTLYNRRTRQDEPALFVALTFERREVLDSSNIKPMNLIGVDRGENIPAVIALTDPEGCPLSRFKDSLGNPTHILRIGESYKEKQRTIQAKKEVEQRRAGGYSRKYASKAKNLADDMVRNTARDLLYYAVTQDAMLIFENLSRGFGRQGKRTFMAERQYTRMEDWLTAKLAYEGLPSKTYLSKTLAQYTSKTCSNCGFTITSADYDRVLEKLKKTATGWMTTINGKELKVEGQITYYNRYKRQNVVKDLSVELDRLSEESVNNDISSWDKGRSGEALSLLKKRFSHRPVQEKFVCLNCGFETHADEQAALNIARSWLFLRSQEYKKYQTNKTTGNTDKRAFVETWQSFYRKKLKEVWKPAV

SEQ ID NO: 33343 - protein, 978 aa, synthetic construct
  REGION 1..978: note = engineered CasX variant
QEIKRINGIRRRLVKDSNTKKAGKTGPMKTLLVRVMTPDLRERLENLRKKPENIPQPISNTSRANLNKLLTDYTEMKKAILHVYWEEFQVDPVGLMSRVAQPASKKIDQNKLKPEMDEKGNLTTAGFACSQCGQPLFVYKLEQVSEKGKAYTNYFGRCNVAEHEKLILLAQLKPEKDSDEAVTYSLGKFGQRALDFYSIHVTKESTHPVKPLAQIAGNRYASYPVGKALSDACMGTIASFLSKYQDIIIEHQKVVKGNQKRLESLRELAGKENLEYPSVTLPPQPHTKEGVDAYNEVIARVRMWVNLNLWQKLKLSRDDAKPLLRLKGFPSFPLVERQANEVDWWDMVCNVKKLINEKKEDGKVFWQNLAGYKRQEALRPYLSSEEDRKKGKKFARYQLGDLLLHLEKKHGEDWGKVYDEAWERIDKKVEGLSKHIKLEEERRSEDAQSKAALTDWLRAKASFVIEGLKEADKDEFCRCELKLQKWYGDLRGKPFAIEAENSILDISGFSKQYNCAFIWQKDGVKKLNLYLIINYFKGGKLRFKKIKPEAFEANRFYTVINKKSGEIVPMEVNFNFDDPNLIILPLAFGKRQGREFIWNDLLSLETGSLKLANGRVIEKTLYNRRTRQDEPALFVALTFERREVLDSSNIKPMNLIGVDRGENIPAVIALTDPEGCPLSRFKDSLGNPTHILRIGESYKEKQRTIQAKKEVEQRRAGGYSRKYASKAKNLADDMVRNTARDLLYYAVTQDAMLIFENLSRGFGRQGKRTFMAERQYTRMEDWLTAKLAYEGLPSKTYLSKTLAQYTSKTCSNCGFTITSADYDRVLEKLKKTATGWMTTINGKELKVEGQITYYNRYKRQNVVKDLSVELDRLSEESVNNDISSWTKGRSGEALSLLKKRFSHRPVQEKFVCLNCGFETHADEQAALNIARSWLFLRSQEYKKYQTNKTTGNTDKRAFVETWQSFYRKKLKEVWKPAV

SEQ ID NO: 33344 - protein, 978 aa, synthetic construct
  REGION 1..978: note = engineered CasX variant
QEIKRINGIRRRLVKDSNTKKAGKTGPMKTLLVRVMTPDLRERLENLRKKPENIPQPISNTSRANLNKLLTDYTEMKKAILHVYWEEFQVDPVGLMSRVAQPASKKIDQNKLKPEMDEKGNLTTAGFACSQCGQPLFVYKLEQVSEKGKAYTNYFGRCNVAEHEKLILLAQLKPEKDSDEAVTYSLGKFGQRALDFYSIHVTKESTHPVKPLAQIAGNRYASHPVGKALSDACMGTIASFLSKYQDIIIEHQKVVKGNQKRLESLRELAGKENLEYPSVTLPPQPHTKEGVDAYNEVIARVRMWVNLNLWQKLKLSRDDAKPLLRLKGFPSFPLVERQANEVDWWDMVCNVKKLINEKKEDGKVFWQNLAGYKRQEALRPYLSSEEDRKKGKKFARYQLGDLLLHLEKKHGEDWGKVYDEAWERIDKKVEGLSKHIKLEEERRSEDAQSKAALTDWLRAKASFVIEGLKEADKDEFCRCELKLQKWYGDLRGKPFAIEAENSILDISGFSKQYNCAFIWQKDGVKKLNLYLIINYFKGGKLRFKKIKPEAFEANRFYTVINKKSGEIVPMEVNFNFDDPNLIILPLAFGKRQGREFIWNDLLSLETGSLKLANGRVIEKTLYNRRTRQDEPALFVALTFERREVLDSSNIKPMNLIGVDRGENIPAVIALTDPEGCPLSRFKDSLGNPTHILRIGESYKEKQRTIQAKKEVEQRRAGGYSRKYASKAKNLADDMVRNTARDLLYYAVTQDAMLIFENLSRGFGRQGKRTFMAERQYTRMEDWLTAKLAYEGLPSKTYLSKTLAQYTSKTCSNCGFTITSADYDRVLEKLKKTATGWMTTINGKELKVEGQITYYNRYKRQNVVKDLSVELDRLSEESVNNDISSWTKGRSGEALSLLKKRFSHRPVQEKFVCLNCGFETHADEQAALNIARSWLFLRSQEYKKYQTNKTTGNTDKRAFVETWQSFYRKKLKEVWKPAV

SEQ ID NO: 33345 - protein, 978 aa, synthetic construct
  REGION 1..978: note = engineered CasX variant
QEIKRINGIRRRLVKDSNTKKAGKTGPMKTLLVRVMTPDLRERLENLRKKPENIPQPISNTSRANLNKLLTDYTEMKKAILHVYWEEFQVDPVGLMSRVAQPASKKIDQNKLKPEMDEKGNLTTAGFACSQCGQPLFVYKLEQVSEKGKAYTNYFGRCNVAEHEKLILLAQLKPEKDSDEAVTYSLGKFGQRALDFYSIHVTKESTHPVKPLAQIAGNRYASSPVGKALSDACMGTIASFLSKYQDIIIEHQKVVKGNQKRLESLRELAGKENLEYPSVTLPPQPHTKEGVDAYNEVIARVRMWVNLNLWQKLKLSRDDAKPLLRLKGFPSFPLVERQANEVDWWDMVCNVKKLINEKKEDGKVFWQNLAGYKRQEALRPYLSSEEDRKKGKKFARYQLGDLLLHLEKKHGEDWGKVYDEAWERIDKKVEGLSKHIKLEEERRSEDAQSKAALTDWLRAKASFVIEGLKEADKDEFCRCELKLQKWYGDLRGKPFAIEAENSILDISGFSKQYNCAFIWQKDGVKKLNLYLIINYFKGGKLRFKKIKPEAFEANRFYTVINKKSGEIVPMEVNFNFDDPNLIILPLAFGKRQGREFIWNDLLSLETGSLKLANGRVIEKTLYNRRTRQDEPALFVALTFERREVLDSSNIKPMNLIGVDRGENIPAVIALTDPEGCPLSRFKDSLGNPTHILRIGESYKEKQRTIQAKKEVEQRRAGGYSRKYASKAKNLADDMVRNTARDLLYYAVTQDAMLIFENLSRGFGRQGKRTFMAERQYTRMEDWLTAKLAYEGLPSKTYLSKTLAQYTSKTCSNCGFTITSADYDRVLEKLKKTATGWMTTINGKELKVEGQITYYNRYKRQNVVKDLSVELDRLSEESVNNDISSWTKGRSGEALSLLKKRFSHRPVQEKFVCLNCGFETHADEQAALNIARSWLFLRSQEYKKYQTNKTTGNTDKRAFVETWQSFYRKKLKEVWKPAV

SEQ ID NO: 33346 - protein, 978 aa, synthetic construct
  REGION 1..978: note = engineered CasX variant
QEIKRINGIRRRLVKDSNTKKAGKTGPMKTLLVRVMTPDLRERLENLRKKPENIPQPISNTSRANLNKLLTDYTEMKKAILHVYWEEFQVDPVGLMSRVAQPASKKIDQNKLKPEMDEKGNLTTAGFACSQCGQPLFVYKLEQVSEKGKAYTNYFGRCNVAEHEKLILLAQLKPEKDSDEAVTYSLGKFGQRALDFYSIHVTKESTHPVKPLAQIAGNRYASTPVGKALSDACMGTIASFLSKYQDIIIEHQKVVKGNQKRLESLRELAGKENLEYPSVTLPPQPHTKEGVDAYNEVIARVRMWVNLNLWQKLKLSRDDAKPLLRLKGFPSFPLVERQANEVDWWDMVCNVKKLINEKKEDGKVFWQNLAGYKRQEALRPYLSSEEDRKKGKKFARYQLGDLLLHLEKKHGEDWGKVYDEAWERIDKKVEGLSKHIKLEEERRSEDAQSKAALTDWLRAKASFVIEGLKEADKDEFCRCELKLQKWYGDLRGKPFAIEAENSILDISGFSKQYNCAFIWQKDGVKKLNLYLIINYFKGGKLRFKKIKPEAFEANRFYTVINKKSGEIVPMEVNFNFDDPNLIILPLAFGKRQGREFIWNDLLSLETGSLKLANGRVIEKTLYNRRTRQDEPALFVALTFERREVLDSSNIKPMNLIGVDRGENIPAVIALTDPEGCPLSRFKDSLGNPTHILRIGESYKEKQRTIQAKKEVEQRRAGGYSRKYASKAKNLADDMVRNTARDLLYYAVTQDAMLIFENLSRGFGRQGKRTFMAERQYTRMEDWLTAKLAYEGLPSKTYLSKTLAQYTSKTCSNCGFTITSADYDRVLEKLKKTATGWMTTINGKELKVEGQITYYNRYKRQNVVKDLSVELDRLSEESVNNDISSWTKGRSGEALSLLKKRFSHRPVQEKFVCLNCGFETHADEQAALNIARSWLFLRSQEYKKYQTNKTTGNTDKRAFVETWQSFYRKKLKEVWKPAV

SEQ ID NO: 33347 - protein, 978 aa, synthetic construct
  REGION 1..978: note = engineered CasX variant
QEIKRINGIRRRLVKDSNTKKAGKTGPMKTLLVRVMTPDLRERLENLRKKPENIPQPISNTSRANLNKLLTDYTEMKKAILHVYWEEFQVDPVGLMSRVAQPASKKIDQNKLKPEMDEKGNLTTAGFACSQCGQPLFVYKLEQVSEKGKAYTNYFGRCNVAEHEKLILLAQLKPEKDSDEAVTYSLGKFGQRALDFYSIHVTKESTHPVKPLAQIAGNRYASAPVGKALSDACMGTIASFLSKYQDIIIEHQKVVKGNQKRLESLRELAGKENLEYPSVTLPPQPHTKEGVDAYNEVIARVRMWVNLNLWQKLKLSRDDAKPLLRLKGFPSFPLVERQANEVDWWDMVCNVKKLINEKKEDGKVFWQNLAGYKRQEALRPYLSSEEDRKKGKKFARYQLGDLLLHLEKKHGEDWGKVYDEAWERIDKKVEGLSKHIKLEEERRSEDAQSKAALTDWLRAKASFVIEGLKEADKDEFCRCELKLQKWYGDLRGKPFAIEAENSILDISGFSKQYNCAFIWQKDGVKKLNLYLIINYFKGGKLRFKKIKPEAFEANRFYTVINKKSGEIVPMEVNFNFDDPNLIILPLAFGKRQGREFIWNDLLSLETGSLKLANGRVIEKTLYNRRTRQDEPALFVALTFERREVLDSSNIKPMNLIGVDRGENIPAVIALTDPEGCPLSRFKDSLGNPTHILRIGESYKEKQRTIQAKKEVEQRRAGGYSRKYASKAKNLADDMVRNTARDLLYYAVTQDAMLIFENLSRGFGRQGKRTFMAERQYTRMEDWLTAKLAYEGLPSKTYLSKTLAQYTSKTCSNCGFTITSADYDRVLEKLKKTATGWMTTINGKELKVEGQITYYNRYKRQNVVKDLSVELDRLSEESVNNDISSWTKGRSGEALSLLKKRFSHRPVQEKFVCLNCGFETHADEQAALNIARSWLFLRSQEYKKYQTNKTTGNTDKRAFVETWQSFYRKKLKEVWKPAV

SEQ ID NO: 33348 - protein, 978 aa, synthetic construct
  REGION 1..978: note = engineered CasX variant
QEIKRINGIRRRLVKDSNTKKAGKTGPMKTLLVRVMTPDLRERLENLRKKPENIPQPISNTSRANLNKLLTDYTEMKKAILHVYWEEFQVDPVGLMSRVAQPASKKIDQNKLKPEMDEKGNLTTAGFACSQCGQPLFVYKLEQVSEKGKAYTNYFGRCNVAEHEKLILLAQLKPEKDSDEAVTYSLGKFGQRALDFYSIHVTKESTHPVKPLAQIAGNRYASVPVGKALSDACMGTIASFLSKYQDIIIEHQKVVKGNQKRLESLRELAGKENLEYPSVTLPPQPHTKEGVDAYNEVIARVRMWVNLNLWQKLKLSRDDAKPLLRLKGFPSFPLVERQANEVDWWDMVCNVKKLINEKKEDGKVFWQNLAGYKRQEALRPYLSSEEDRKKGKKFARYQLGDLLLHLEKKHGEDWGKVYDEAWERIDKKVEGLSKHIKLEEERRSEDAQSKAALTDWLRAKASFVIEGLKEADKDEFCRCELKLQKWYGDLRGKPFAIEAENSILDISGFSKQYNCAFIWQKDGVKKLNLYLIINYFKGGKLRFKKIKPEAFEANRFYTVINKKSGEIVPMEVNFNFDDPNLIILPLAFGKRQGREFIWNDLLSLETGSLKLANGRVIEKTLYNRRTRQDEPALFVALTFERREVLDSSNIKPMNLIGVDRGENIPAVIALTDPEGCPLSRFKDSLGNPTHILRIGESYKEKQRTIQAKKEVEQRRAGGYSRKYASKAKNLADDMVRNTARDLLYYAVTQDAMLIFENLSRGFGRQGKRTFMAERQYTRMEDWLTAKLAYEGLPSKTYLSKTLAQYTSKTCSNCGFTITSADYDRVLEKLKKTATGWMTTINGKELKVEGQITYYNRYKRQNVVKDLSVELDRLSEESVNNDISSWTKGRSGEALSLLKKRFSHRPVQEKFVCLNCGFETHADEQAALNIARSWLFLRSQEYKKYQTNKTTGNTDKRAFVETWQSFYRKKLKEVWKPAV

SEQ ID NO: 33349 - protein, 978 aa, synthetic construct
  REGION 1..978: note = engineered CasX variant
QEIKRINGIRRRLVKDSNTKKAGKTGPMKTLLVRVMTPDLRERLENLRKKPENIPQPISNTSRANLNKLLTDYTEMKKAILHVYWEEFQVDPVGLMSRVAQPASKKIDQNKLKPEMDEKGNLTTAGFACSQCGQPLFVYKLEQVSEKGKAYTNYFGRCNVAEHEKLIKLAQLKPEKDSDEAVTYSLGKFGQRALDFYSIHVTKESTHPVKPLAQIAGNRYASGPVGKALSDACMGTIASFLSKYQDIIIEHQKVVKGNQKRLESLRELAGKENLEYPSVTLPPQPHTKEGVDAYNEVIARVRMWVNLNLWQKLKLSRDDAKPLLRLKGFPSFPLVERQANEVDWWDMVCNVKKLINEKKEDGKVFWQNLAGYKRQEALRPYLSSEEDRKKGKKFARYQLGDLLLHLEKKHGEDWGKVYDEAWERIDKKVEGLSKHIKLEEERRSEDAQSKAALTDWLRAKASFVIEGLKEADKDEFCRCELKLQKWYGDLRGKPFAIEAENSILDISGFSKQYNCAFIWQKDGVKKLNLYLIINYFKGGKLRFKKIKPEAFEANRFYTVINKKSGEIVPMEVNFNFDDPNLIILPLAFGKRQGREFIWNDLLSLETGSLKLANGRVIEKTLYNRRTRQDEPALFVALTFERREVLDSSNIKPMNLIGVDRGENIPAVIALTDPEGCPLSRFKDSLGNPTHILRIGESYKEKQRTIQAKKEVEQRRAGGYSRKYASKAKNLADDMVRNTARDLLYYAVTQDAMLIFENLSRGFGRQGKRTFMAERQYTRMEDWLTAKLAYEGLPSKTYLSKTLAQYTSKTCSNCGFTITSADYDRVLEKLKKTATGWMTTINGKELKVEGQITYYNRYKRQNVVKDLSVELDRLSEESVNNDISSWTKGRSGEALSLLKKRFSHRPVQEKFVCLNCGFETHADEQAALNIARSWLFLRSQEYKKYQTNKTTGNTDKRAFVETWQSFYRKKLKEVWKPAV

SEQ ID NO: 33350 - protein, 977 aa, synthetic construct
  REGION 1..977: note = engineered CasX variant
QEIKRINGIRRRLVKDSNTKKAGKTGPMKTLLVRVMTPDLRERLENLRKKPENIPQPISNTSRANLNKLLTDYTEMKKAILHVYWEEFQVDPVGLMSRVAQPASKKIDQNKLKPEMDEKGNLTTAGFACSQCGQPLFVYKLEQVSEKGKAYTNYFGRCNVAEHEKLILLAQLKPEKDSDEAVTYSLGKFGQRALDFYSIHVTKESTHPVKPLAQIAGNRYASPVGKALSDACMGTIASFLSKYQDIIIEHQKVVKGNQKRLESLRELAGKENLEYPSVTLPPQPHTKEGVDAYNEVIARVRMWVNLNLWQKLKLSRDDAKPLLRLKGFPSFPLVERQANEVDWWDMVCNVKKLINEKKEDGKVFWQNLAGYKRQEALRPYLSSEEDRKKGKKFARYQLGDLLLHLEKKHGEDWGKVYDEAWERIDKKVEGLSKHIKLEEERRSEDAQSKAALTDWLRAKASFVIEGLKEADKDEFCRCELKLQKWYGDLRGKPFAIEAENSILDISGFSKQYNCAFIWQKDGVKKLNLYLIINYFKGGKLRFKKIKPEAFEANRFYTVINKKSGEIVPMEVNFNFDDPNLIILPLAFGKRQGREFIWNDLLSLETGSLKLANGRVIEKTLYNRRTRQDEPALFVALTFERREVLDSSNIKPMNLIGVDRGENIPAVIALTDPEGCPLSRFKDSLGNPTHILRIGESYKEKQRTIQAKKEVEQRRAGGYSRKYASKAKNLADDMVRNTARDLLYYAVTQDAMLIFENLSRGFGRQGKRTFMAERQYTRMEDWLTAKLAYEGLPSKTYLSKTLAQYTSKTCSNCGFTITSADYDRVLEKLKKTATGWMTTINGKELKVEGQITYYNRYKRQNVVKDLSVELDRLSEESVNNDISSWTKGRSGEALSLLKKRFSHRPVQEKFVCLNCGFETHADEQAALNIARSWLFLRSQEYKKYQTNKTTGNTDKRAFVETWQSFYRKKLKEVWKPAV

SEQ ID NO: 33351 - protein, 978 aa, synthetic construct
  REGION 1..978: note = engineered CasX variant
QEIKRLNGIRRRLVKDSNTKKAGKTGPMKTLLVRVMTPDLRERLENLRKKPENIPQPISNTSRANLNKLLTDYTEMKKAILHVYWEEFQKDPVGLMSRVAQPASKKIDQNKLKPEMDEKGNLTTAGFACSQCGQPLFVYKLEQVSEKGKAYTNYFGRCNVAEHEKLILLAQLKPEKDSDEAVTYSLGKFGQRALDFYSIHVTKESTHPVKPLAQIAGNRYASYPVGKALSDACMGTIASFLSKYQDIIIEHQKVVKGNQKRLESLRELAGKENLEYPSVTLPPQPHTKEGVDAYNEVIARVRMWVNLNLWQKLKLSRDDAKPLLRLKGFPSFPLVERQANEVDWWDMVCNVKKLINEKKEDGKVFWQNLAGYKRQEALRPYLSSEEDRKKGKKFARYQLGDLLLHLEKKHGEDWGKVYDEAWERIDKKVEGLSKHIKLEEERRSEDAQSKAALTDWLRAKASFVIEGLKEADKDEFCRCELKLQKWYGDLRGKPFAIEAENSILDISGFSKQYNCAFIWQKDGVKKLNLYLIINYFKGGKLRFKKIKPEAFEANRFYTVINKKSGEIVPMEVNFNFDDPNLIILPLAFGKRQGREFIWNDLLSLETGSLKLANGRVIEKTLYNRRTRQDEPALFVALTFERREVLDSSNIKPMNLIGVDRGENIPAVIALTDPEGCPLSRFKDSLGNPTHILRIGESYKEKQRTIQAKKEVEQRRAGGYSRKYASKAKNLADDMVRNTARDLLYYAVTQDAMLIFENLSRGFGRQGKRTFMAERQYTRMEDWLTAKLAYEGLPSKTYLSKTLAQYTSKTCSNCGFTITSADYDRVLEKLKKTATGWMTTINGKELKVEGQITYYNRYKRQNVVKDLSVELDRLSEESVNNDISSWTKGRSGEALSLLKKRFSHRPVQEKFVCLNCGFETHADEQAALNIARSWLFLRSQEYKKYQTNKTTGNTDKRAFVETWQSFYRKKLKEVWKPAV

SEQ ID NO: 33352 - protein, 978 aa, synthetic construct
  REGION 1..978: note = engineered CasX variant
QEIKRLNGIRRRLVKDSNTKKAGKTGPMKTLLVRVMTPDLRERLENLRKKPENIPQPISNTSRANLNKLLTDYTEMKKAILHVYWEEFQKDPVGLMSRVAQPASKKIDQNKLKPEMDEKGNLTTAGFACSQCGQPLFVYKLEQVSEKGKAYTNYFGRCNVAEHEKLILLAQLKPEKDSDEAVTYSLGKFGQRALDFYSIHVTKESTHPVKPLAQIAGNRYASHPVGKALSDACMGTIASFLSKYQDIIIEHQKVVKGNQKRLESLRELAGKENLEYPSVTLPPQPHTKEGVDAYNEVIARVRMWVNLNLWQKLKLSRDDAKPLLRLKGFPSFPLVERQANEVDWWDMVCNVKKLINEKKEDGKVFWQNLAGYKRQEALRPYLSSEEDRKKGKKFARYQLGDLLLHLEKKHGEDWGKVYDEAWERIDKKVEGLSKHIKLEEERRSEDAQSKAALTDWLRAKASFVIEGLKEADKDEFCRCELKLQKWYGDLRGKPFAIEAENSILDISGFSKQYNCAFIWQKDGVKKLNLYLIINYFKGGKLRFKKIKPEAFEANRFYTVINKKSGEIVPMEVNFNFDDPNLIILPLAFGKRQGREFIWNDLLSLETGSLKLANGRVIEKTLYNRRTRQDEPALFVALTFERREVLDSSNIKPMNLIGVDRGENIPAVIALTDPEGCPLSRFKDSLGNPTHILRIGESYKEKQRTIQAKKEVEQRRAGGYSRKYASKAKNLADDMVRNTARDLLYYAVTQDAMLIFENLSRGFGRQGKRTFMAERQYTRMEDWLTAKLAYEGLPSKTYLSKTLAQYTSKTCSNCGFTITSADYDRVLEKLKKTATGWMTTINGKELKVEGQITYYNRYKRQNVVKDLSVELDRLSEESVNNDISSWTKGRSGEALSLLKKRFSHRPVQEKFVCLNCGFETHADEQAALNIARSWLFLRSQEYKKYQTNKTTGNTDKRAFVETWQSFYRKKLKEVWKPAV

SEQ ID NO: 33353 - protein, 978 aa, synthetic construct
  REGION 1..978: note = engineered CasX variant
QEIKRLNGIRRRLVKDSNTKKAGKTGPMKTLLVRVMTPDLRERLENLRKKPENIPQPISNTSRANLNKLLTDYTEMKKAILHVYWEEFQKDPVGLMSRVAQPASKKIDQNKLKPEMDEKGNLTTAGFACSQCGQPLFVYKLEQVSEKGKAYTNYFGRCNVAEHEKLILLAQLKPEKDSDEAVTYSLGKFGQRALDFYSIHVTKESTHPVKPLAQIAGNRYASSPVGKALSDACMGTIASFLSKYQDIIIEHQKVVKGNQKRLESLRELAGKENLEYPSVTLPPQPHTKEGVDAYNEVIARVRMWVNLNLWQKLKLSRDDAKPLLRLKGFPSFPLVERQANEVDWWDMVCNVKKLINEKKEDGKVFWQNLAGYKRQEALRPYLSSEEDRKKGKKFARYQLGDLLLHLEKKHGEDWGKVYDEAWERIDKKVEGLSKHIKLEEERRSEDAQSKAALTDWLRAKASFVIEGLKEADKDEFCRCELKLQKWYGDLRGKPFAIEAENSILDISGFSKQYNCAFIWQKDGVKKLNLYLIINYFKGGKLRFKKIKPEAFEANRFYTVINKKSGEIVPMEVNFNFDDPNLIILPLAFGKRQGREFIWNDLLSLETGSLKLANGRVIEKTLYNRRTRQDEPALFVALTFERREVLDSSNIKPMNLIGVDRGENIPAVIALTDPEGCPLSRFKDSLGNPTHILRIGESYKEKQRTIQAKKEVEQRRAGGYSRKYASKAKNLADDMVRNTARDLLYYAVTQDAMLIFENLSRGFGRQGKRTFMAERQYTRMEDWLTAKLAYEGLPSKTYLSKTLAQYTSKTCSNCGFTITSADYDRVLEKLKKTATGWMTTINGKELKVEGQITYYNRYKRQNVVKDLSVELDRLSEESVNNDISSWTKGRSGEALSLLKKRFSHRPVQEKFVCLNCGFETHADEQAALNIARSWLFLRSQEYKKYQTNKTTGNTDKRAFVETWQSFYRKKLKEVWKPAV

SEQ ID NO: 33354 - protein, 978 aa, synthetic construct
  REGION 1..978: note = engineered CasX variant
QEIKRLNGIRRRLVKDSNTKKAGKTGPMKTLLVRVMTPDLRERLENLRKKPENIPQPISNTSRANLNKLLTDYTEMKKAILHVYWEEFQKDPVGLMSRVAQPASKKIDQNKLKPEMDEKGNLTTAGFACSQCGQPLFVYKLEQVSEKGKAYTNYFGRCNVAEHEKLILLAQLKPEKDSDEAVTYSLGKFGQRALDFYSIHVTKESTHPVKPLAQIAGNRYASTPVGKALSDACMGTIASFLSKYQDIIIEHQKVVKGNQKRLESLRELAGKENLEYPSVTLPPQPHTKEGVDAYNEVIARVRMWVNLNLWQKLKLSRDDAKPLLRLKGFPSFPLVERQANEVDWWDMVCNVKKLINEKKEDGKVFWQNLAGYKRQEALRPYLSSEEDRKKGKKFARYQLGDLLLHLEKKHGEDWGKVYDEAWERIDKKVEGLSKHIKLEEERRSEDAQSKAALTDWLRAKASFVIEGLKEADKDEFCRCELKLQKWYGDLRGKPFAIEAENSILDISGFSKQYNCAFIWQKDGVKKLNLYLIINYFKGGKLRFKKIKPEAFEANRFYTVINKKSGEIVPMEVNFNFDDPNLIILPLAFGKRQGREFIWNDLLSLETGSLKLANGRVIEKTLYNRRTRQDEPALFVALTFERREVLDSSNIKPMNLIGVDRGENIPAVIALTDPEGCPLSRFKDSLGNPTHILRIGESYKEKQRTIQAKKEVEQRRAGGYSRKYASKAKNLADDMVRNTARDLLYYAVTQDAMLIFENLSRGFGRQGKRTFMAERQYTRMEDWLTAKLAYEGLPSKTYLSKTLAQYTSKTCSNCGFTITSADYDRVLEKLKKTATGWMTTINGKELKVEGQITYYNRYKRQNVVKDLSVELDRLSEESVNNDISSWTKGRSGEALSLLKKRFSHRPVQEKFVCLNCGFETHADEQAALNIARSWLFLRSQEYKKYQTNKTTGNTDKRAFVETWQSFYRKKLKEVWKPAV

SEQ ID NO: 33355 - protein, 978 aa, synthetic construct
  REGION 1..978: note = engineered CasX variant
QEIKRLNGIRRRLVKDSNTKKAGKTGPMKTLLVRVMTPDLRERLENLRKKPENIPQPISNTSRANLNKLLTDYTEMKKAILHVYWEEFQKDPVGLMSRVAQPASKKIDQNKLKPEMDEKGNLTTAGFACSQCGQPLFVYKLEQVSEKGKAYTNYFGRCNVAEHEKLILLAQLKPEKDSDEAVTYSLGKFGQRALDFYSIHVTKESTHPVKPLAQIAGNRYASAPVGKALSDACMGTIASFLSKYQDIIIEHQKVVKGNQKRLESLRELAGKENLEYPSVTLPPQPHTKEGVDAYNEVIARVRMWVNLNLWQKLKLSRDDAKPLLRLKGFPSFPLVERQANEVDWWDMVCNVKKLINEKKEDGKVFWQNLAGYKRQEALRPYLSSEEDRKKGKKFARYQLGDLLLHLEKKHGEDWGKVYDEAWERIDKKVEGLSKHIKLEEERRSEDAQSKAALTDWLRAKASFVIEGLKEADKDEFCRCELKLQKWYGDLRGKPFAIEAENSILDISGFSKQYNCAFIWQKDGVKKLNLYLIINYFKGGKLRFKKIKPEAFEANRFYTVINKKSGEIVPMEVNFNFDDPNLIILPLAFGKRQGREFIWNDLLSLETGSLKLANGRVIEKTLYNRRTRQDEPALFVALTFERREVLDSSNIKPMNLIGVDRGENIPAVIALTDPEGCPLSRFKDSLGNPTHILRIGESYKEKQRTIQAKKEVEQRRAGGYSRKYASKAKNLADDMVRNTARDLLYYAVTQDAMLIFENLSRGFGRQGKRTFMAERQYTRMEDWLTAKLAYEGLPSKTYLSKTLAQYTSKTCSNCGFTITSADYDRVLEKLKKTATGWMTTINGKELKVEGQITYYNRYKRQNVVKDLSVELDRLSEESVNNDISSWTKGRSGEALSLLKKRFSHRPVQEKFVCLNCGFETHADEQAALNIARSWLFLRSQEYKKYQTNKTTGNTDKRAFVETWQSFYRKKLKEVWKPAV

SEQ ID NO: 33356 - protein, 978 aa, synthetic construct
  REGION 1..978: note = engineered CasX variant
QEIKRLNGIRRRLVKDSNTKKAGKTGPMKTLLVRVMTPDLRERLENLRKKPENIPQPISNTSRANLNKLLTDYTEMKKAILHVYWEEFQKDPVGLMSRVAQPASKKIDQNKLKPEMDEKGNLTTAGFACSQCGQPLFVYKLEQVSEKGKAYTNYFGRCNVAEHEKLILLAQLKPEKDSDEAVTYSLGKFGQRALDFYSIHVTKESTHPVKPLAQIAGNRYASVPVGKALSDACMGTIASFLSKYQDIIIEHQKVVKGNQKRLESLRELAGKENLEYPSVTLPPQPHTKEGVDAYNEVIARVRMWVNLNLWQKLKLSRDDAKPLLRLKGFPSFPLVERQANEVDWWDMVCNVKKLINEKKEDGKVFWQNLAGYKRQEALRPYLSSEEDRKKGKKFARYQLGDLLLHLEKKHGEDWGKVYDEAWERIDKKVEGLSKHIKLEEERRSEDAQSKAALTDWLRAKASFVIEGLKEADKDEFCRCELKLQKWYGDLRGKPFAIEAENSILDISGFSKQYNCAFIWQKDGVKKLNLYLIINYFKGGKLRFKKIKPEAFEANRFYTVINKKSGEIVPMEVNFNFDDPNLIILPLAFGKRQGREFIWNDLLSLETGSLKLANGRVIEKTLYNRRTRQDEPALFVALTFERREVLDSSNIKPMNLIGVDRGENIPAVIALTDPEGCPLSRFKDSLGNPTHILRIGESYKEKQRTIQAKKEVEQRRAGGYSRKYASKAKNLADDMVRNTARDLLYYAVTQDAMLIFENLSRGFGRQGKRTFMAERQYTRMEDWLTAKLAYEGLPSKTYLSKTLAQYTSKTCSNCGFTITSADYDRVLEKLKKTATGWMTTINGKELKVEGQITYYNRYKRQNVVKDLSVELDRLSEESVNNDISSWTKGRSGEALSLLKKRFSHRPVQEKFVCLNCGFETHADEQAALNIARSWLFLRSQEYKKYQTNKTTGNTDKRAFVETWQSFYRKKLKEVWKPAV

SEQ ID NO: 33357 - protein, 978 aa, synthetic construct
  REGION 1..978: note = engineered CasX variant
QEIKRLNGIRRRLVKDSNTKKAGKTGPMKTLLVRVMTPDLRERLENLRKKPENIPQPISNTSRANLNKLLTDYTEMKKAILHVYWEEFQKDPVGLMSRVAQPASKKIDQNKLKPEMDEKGNLTTAGFACSQCGQPLFVYKLEQVSEKGKAYTNYFGRCNVAEHEKLIKLAQLKPEKDSDEAVTYSLGKFGQRALDFYSIHVTKESTHPVKPLAQIAGNRYASGPVGKALSDACMGTIASFLSKYQDIIIEHQKVVKGNQKRLESLRELAGKENLEYPSVTLPPQPHTKEGVDAYNEVIARVRMWVNLNLWQKLKLSRDDAKPLLRLKGFPSFPLVERQANEVDWWDMVCNVKKLINEKKEDGKVFWQNLAGYKRQEALRPYLSSEEDRKKGKKFARYQLGDLLLHLEKKHGEDWGKVYDEAWERIDKKVEGLSKHIKLEEERRSEDAQSKAALTDWLRAKASFVIEGLKEADKDEFCRCELKLQKWYGDLRGKPFAIEAENSILDISGFSKQYNCAFIWQKDGVKKLNLYLIINYFKGGKLRFKKIKPEAFEANRFYTVINKKSGEIVPMEVNFNFDDPNLIILPLAFGKRQGREFIWNDLLSLETGSLKLANGRVIEKTLYNRRTRQDEPALFVALTFERREVLDSSNIKPMNLIGVDRGENIPAVIALTDPEGCPLSRFKDSLGNPTHILRIGESYKEKQRTIQAKKEVEQRRAGGYSRKYASKAKNLADDMVRNTARDLLYYAVTQDAMLIFENLSRGFGRQGKRTFMAERQYTRMEDWLTAKLAYEGLPSKTYLSKTLAQYTSKTCSNCGFTITSADYDRVLEKLKKTATGWMTTINGKELKVEGQITYYNRYKRQNVVKDLSVELDRLSEESVNNDISSWTKGRSGEALSLLKKRFSHRPVQEKFVCLNCGFETHADEQAALNIARSWLFLRSQEYKKYQTNKTTGNTDKRAFVETWQSFYRKKLKEVWKPAV

SEQ ID NO: 33358 - protein, 977 aa, synthetic construct
  REGION 1..977: note = engineered CasX variant
QEIKRLNGIRRRLVKDSNTKKAGKTGPMKTLLVRVMTPDLRERLENLRKKPENIPQPISNTSRANLNKLLTDYTEMKKAILHVYWEEFQKDPVGLMSRVAQPASKKIDQNKLKPEMDEKGNLTTAGFACSQCGQPLFVYKLEQVSEKGKAYTNYFGRCNVAEHEKLILLAQLKPEKDSDEAVTYSLGKFGQRALDFYSIHVTKESTHPVKPLAQIAGNRYASPVGKALSDACMGTIASFLSKYQDIIIEHQKVVKGNQKRLESLRELAGKENLEYPSVTLPPQPHTKEGVDAYNEVIARVRMWVNLNLWQKLKLSRDDAKPLLRLKGFPSFPLVERQANEVDWWDMVCNVKKLINEKKEDGKVFWQNLAGYKRQEALRPYLSSEEDRKKGKKFARYQLGDLLLHLEKKHGEDWGKVYDEAWERIDKKVEGLSKHIKLEEERRSEDAQSKAALTDWLRAKASFVIEGLKEADKDEFCRCELKLQKWYGDLRGKPFAIEAENSILDISGFSKQYNCAFIWQKDGVKKLNLYLIINYFKGGKLRFKKIKPEAFEANRFYTVINKKSGEIVPMEVNFNFDDPNLIILPLAFGKRQGREFIWNDLLSLETGSLKLANGRVIEKTLYNRRTRQDEPALFVALTFERREVLDSSNIKPMNLIGVDRGENIPAVIALTDPEGCPLSRFKDSLGNPTHILRIGESYKEKQRTIQAKKEVEQRRAGGYSRKYASKAKNLADDMVRNTARDLLYYAVTQDAMLIFENLSRGFGRQGKRTFMAERQYTRMEDWLTAKLAYEGLPSKTYLSKTLAQYTSKTCSNCGFTITSADYDRVLEKLKKTATGWMTTINGKELKVEGQITYYNRYKRQNVVKDLSVELDRLSEESVNNDISSWTKGRSGEALSLLKKRFSHRPVQEKFVCLNCGFETHADEQAALNIARSWLFLRSQEYKKYQTNKTTGNTDKRAFVETWQSFYRKKLKEVWKPAV

SEQ ID NO: 33359 - protein, 978 aa, synthetic construct
  REGION 1..978: note = engineered CasX variant
QEIKRINGIRRRLVKDSNTKKAGKTGPMKTLLVRVMTPDLRERLENLRKKPENIPQPISNTSRANLNKLLTDYTEMKKAILHVYWEEFQKDPVGLMSRVAQPASKKIDQNKLKPEMDEKGNLTTAGFACSQCGQPLFVYKLEQVSEKGKAYTNYVGRCNVAEHEKLILLAQLKPEKDSDEAVTYSLGKFGQRALDFYSIHVTKESTHPVKPLAQIAGNRYASYPVGKALSDACMGTIASFLSKYQDIIIEHQKVVKGNQKRLESLRELAGKENLEYPSVTLPPQPHTKEGVDAYNEVIARVRMWVNLNLWQKLKLSRDDAKPLLRLKGFPSFPLVERQANEVDWWDMVCNVKKLINEKKEDGKVFWQNLAGYKRQEALRPYLSSEEDRKKGKKFARYQLGDLLLHLEKKHGEDWGKVYDEAWERIDKKVEGLSKHIKLEEERRSEDAQSKAALTDWLRAKASFVIEGLKEADKDEFCRCELKLQKWYGDLRGKPFAIEAENSILDISGFSKQYNCAFIWQKDGVKKLNLYLIINYFKGGKLRFKKIKPEAFEANRFYTVINKKSGEIVPMEVNFNFDDPNLIILPLAFGKRQGREFIWNDLLSLETGSLKLANGRVIEKTLYNRRTRQDEPALFVALTFERREVLDSSNIKPMNLIGVDRGENIPAVIALTDPEGCPLSRFKDSLGNPTHILRIGESYKEKQRTIQAKKEVEQRRAGGYSRKYASKAKNLADDMVRNTARDLLYYAVTQDAMLIFENLSRGFGRQGKRTFMAERQYTRMEDWLTAKLAYEGLPSKTYLSKTLAQYTSKTCSNCGFTITSADYDRVLEKLKKTATGWMTTINGKELKVEGQITYYNRYKRQNVVKDLSVELDRLSEESVNNDISSWTKGRSGEALSLLKKRFSHRPVQEKFVCLNCGFETHADEQAALNIARSWLFLRSQEYKKYQTNKTTGNTDKRAFVETWQSFYRKKLKEVWKPAV

SEQ ID NO: 33360 - protein, 978 aa, synthetic construct
  REGION 1..978: note = engineered CasX variant
QEIKRINGIRRRLVKDSNTKKAGKTGPMKTLLVRVMTPDLRERLENLRKKPENIPQPISNTSRANLNKLLTDYTEMKKAILHVYWEEFQKDPVGLMSRVAQPASKKIDQNKLKPEMDEKGNLTTAGFACSQCGQPLFVYKLEQVSEKGKAYTNYVGRCNVAEHEKLILLAQLKPEKDSDEAVTYSLGKFGQRALDFYSIHVTKESTHPVKPLAQIAGNRYASHPVGKALSDACMGTIASFLSKYQDIIIEHQKVVKGNQKRLESLRELAGKENLEYPSVTLPPQPHTKEGVDAYNEVIARVRMWVNLNLWQKLKLSRDDAKPLLRLKGFPSFPLVERQANEVDWWDMVCNVKKLINEKKEDGKVFWQNLAGYKRQEALRPYLSSEEDRKKGKKFARYQLGDLLLHLEKKHGEDWGKVYDEAWERIDKKVEGLSKHIKLEEERRSEDAQSKAALTDWLRAKASFVIEGLKEADKDEFCRCELKLQKWYGDLRGKPFAIEAENSILDISGFSKQYNCAFIWQKDGVKKLNLYLIINYFKGGKLRFKKIKPEAFEANRFYTVINKKSGEIVPMEVNFNFDDPNLIILPLAFGKRQGREFIWNDLLSLETGSLKLANGRVIEKTLYNRRTRQDEPALFVALTFERREVLDSSNIKPMNLIGVDRGENIPAVIALTDPEGCPLSRFKDSLGNPTHILRIGESYKEKQRTIQAKKEVEQRRAGGYSRKYASKAKNLADDMVRNTARDLLYYAVTQDAMLIFENLSRGFGRQGKRTFMAERQYTRMEDWLTAKLAYEGLPSKTYLSKTLAQYTSKTCSNCGFTITSADYDRVLEKLKKTATGWMTTINGKELKVEGQITYYNRYKRQNVVKDLSVELDRLSEESVNNDISSWTKGRSGEALSLLKKRFSHRPVQEKFVCLNCGFETHADEQAALNIARSWLFLRSQEYKKYQTNKTTGNTDKRAFVETWQSFYRKKLKEVWKPAV

SEQ ID NO: 33361 - protein, 978 aa, synthetic construct
  REGION 1..978: note = engineered CasX variant
QEIKRINGIRRRLVKDSNTKKAGKTGPMKTLLVRVMTPDLRERLENLRKKPENIPQPISNTSRANLNKLLTDYTEMKKAILHVYWEEFQKDPVGLMSRVAQPASKKIDQNKLKPEMDEKGNLTTAGFACSQCGQPLFVYKLEQVSEKGKAYTNYVGRCNVAEHEKLILLAQLKPEKDSDEAVTYSLGKFGQRALDFYSIHVTKESTHPVKPLAQIAGNRYASSPVGKALSDACMGTIASFLSKYQDIIIEHQKVVKGNQKRLESLRELAGKENLEYPSVTLPPQPHTKEGVDAYNEVIARVRMWVNLNLWQKLKLSRDDAKPLLRLKGFPSFPLVERQANEVDWWDMVCNVKKLINEKKEDGKVFWQNLAGYKRQEALRPYLSSEEDRKKGKKFARYQLGDLLLHLEKKHGEDWGKVYDEAWERIDKKVEGLSKHIKLEEERRSEDAQSKAALTDWLRAKASFVIEGLKEADKDEFCRCELKLQKWYGDLRGKPFAIEAENSILDISGFSKQYNCAFIWQKDGVKKLNLYLIINYFKGGKLRFKKIKPEAFEANRFYTVINKKSGEIVPMEVNFNFDDPNLIILPLAFGKRQGREFIWNDLLSLETGSLKLANGRVIEKTLYNRRTRQDEPALFVALTFERREVLDSSNIKPMNLIGVDRGENIPAVIALTDPEGCPLSRFKDSLGNPTHILRIGESYKEKQRTIQAKKEVEQRRAGGYSRKYASKAKNLADDMVRNTARDLLYYAVTQDAMLIFENLSRGFGRQGKRTFMAERQYTRMEDWLTAKLAYEGLPSKTYLSKTLAQYTSKTCSNCGFTITSADYDRVLEKLKKTATGWMTTINGKELKVEGQITYYNRYKRQNVVKDLSVELDRLSEESVNNDISSWTKGRSGEALSLLKKRFSHRPVQEKFVCLNCGFETHADEQAALNIARSWLFLRSQEYKKYQTNKTTGNTDKRAFVETWQSFYRKKLKEVWKPAV

SEQ ID NO: 33362 - protein, 978 aa, synthetic construct
  REGION 1..978: note = engineered CasX variant
QEIKRINGIRRRLVKDSNTKKAGKTGPMKTLLVRVMTPDLRERLENLRKKPENIPQPISNTSRANLNKLLTDYTEMKKAILHVYWEEFQKDPVGLMSRVAQPASKKIDQNKLKPEMDEKGNLTTAGFACSQCGQPLFVYKLEQVSEKGKAYTNYVGRCNVAEHEKLILLAQLKPEKDSDEAVTYSLGKFGQRALDFYSIHVTKESTHPVKPLAQIAGNRYASTPVGKALSDACMGTIASFLSKYQDIIIEHQKVVKGNQKRLESLRELAGKENLEYPSVTLPPQPHTKEGVDAYNEVIARVRMWVNLNLWQKLKLSRDDAKPLLRLKGFPSFPLVERQANEVDWWDMVCNVKKLINEKKEDGKVFWQNLAGYKRQEALRPYLSSEEDRKKGKKFARYQLGDLLLHLEKKHGEDWGKVYDEAWERIDKKVEGLSKHIKLEEERRSEDAQSKAALTDWLRAKASFVIEGLKEADKDEFCRCELKLQKWYGDLRGKPFAIEAENSILDISGFSKQYNCAFIWQKDGVKKLNLYLIINYFKGGKLRFKKIKPEAFEANRFYTVINKKSGEIVPMEVNFNFDDPNLIILPLAFGKRQGREFIWNDLLSLETGSLKLANGRVIEKTLYNRRTRQDEPALFVALTFERREVLDSSNIKPMNLIGVDRGENIPAVIALTDPEGCPLSRFKDSLGNPTHILRIGESYKEKQRTIQAKKEVEQRRAGGYSRKYASKAKNLADDMVRNTARDLLYYAVTQDAMLIFENLSRGFGRQGKRTFMAERQYTRMEDWLTAKLAYEGLPSKTYLSKTLAQYTSKTCSNCGFTITSADYDRVLEKLKKTATGWMTTINGKELKVEGQITYYNRYKRQNVVKDLSVELDRLSEESVNNDISSWTKGRSGEALSLLKKRFSHRPVQEKFVCLNCGFETHADEQAALNIARSWLFLRSQEYKKYQTNKTTGNTDKRAFVETWQSFYRKKLKEVWKPAV

SEQ ID NO: 33363 - protein, 978 aa, synthetic construct
  REGION 1..978: note = engineered CasX variant
QEIKRINGIRRRLVKDSNTKKAGKTGPMKTLLVRVMTPDLRERLENLRKKPENIPQPISNTSRANLNKLLTDYTEMKKAILHVYWEEFQKDPVGLMSRVAQPASKKIDQNKLKPEMDEKGNLTTAGFACSQCGQPLFVYKLEQVSEKGKAYTNYVGRCNVAEHEKLILLAQLKPEKDSDEAVTYSLGKFGQRALDFYSIHVTKESTHPVKPLAQIAGNRYASAPVGKALSDACMGTIASFLSKYQDIIIEHQKVVKGNQKRLESLRELAGKENLEYPSVTLPPQPHTKEGVDAYNEVIARVRMWVNLNLWQKLKLSRDDAKPLLRLKGFPSFPLVERQANEVDWWDMVCNVKKLINEKKEDGKVFWQNLAGYKRQEALRPYLSSEEDRKKGKKFARYQLGDLLLHLEKKHGEDWGKVYDEAWERIDKKVEGLSKHIKLEEERRSEDAQSKAALTDWLRAKASFVIEGLKEADKDEFCRCELKLQKWYGDLRGKPFAIEAENSILDISGFSKQYNCAFIWQKDGVKKLNLYLIINYFKGGKLRFKKIKPEAFEANRFYTVINKKSGEIVPMEVNFNFDDPNLIILPLAFGKRQGREFIWNDLLSLETGSLKLANGRVIEKTLYNRRTRQDEPALFVALTFERREVLDSSNIKPMNLIGVDRGENIPAVIALTDPEGCPLSRFKDSLGNPTHILRIGESYKEKQRTIQAKKEVEQRRAGGYSRKYASKAKNLADDMVRNTARDLLYYAVTQDAMLIFENLSRGFGRQGKRTFMAERQYTRMEDWLTAKLAYEGLPSKTYLSKTLAQYTSKTCSNCGFTITSADYDRVLEKLKKTATGWMTTINGKELKVEGQITYYNRYKRQNVVKDLSVELDRLSEESVNNDISSWTKGRSGEALSLLKKRFSHRPVQEKFVCLNCGFETHADEQAALNIARSWLFLRSQEYKKYQTNKTTGNTDKRAFVETWQSFYRKKLKEVWKPAV

SEQ ID NO: 33364 - protein, 978 aa, synthetic construct
  REGION 1..978: note = engineered CasX variant
QEIKRINGIRRRLVKDSNTKKAGKTGPMKTLLVRVMTPDLRERLENLRKKPENIPQPISNTSRANLNKLLTDYTEMKKAILHVYWEEFQKDPVGLMSRVAQPASKKIDQNKLKPEMDEKGNLTTAGFACSQCGQPLFVYKLEQVSEKGKAYTNYVGRCNVAEHEKLILLAQLKPEKDSDEAVTYSLGKFGQRALDFYSIHVTKESTHPVKPLAQIAGNRYASVPVGKALSDACMGTIASFLSKYQDIIIEHQKVVKGNQKRLESLRELAGKENLEYPSVTLPPQPHTKEGVDAYNEVIARVRMWVNLNLWQKLKLSRDDAKPLLRLKGFPSFPLVERQANEVDWWDMVCNVKKLINEKKEDGKVFWQNLAGYKRQEALRPYLSSEEDRKKGKKFARYQLGDLLLHLEKKHGEDWGKVYDEAWERIDKKVEGLSKHIKLEEERRSEDAQSKAALTDWLRAKASFVIEGLKEADKDEFCRCELKLQKWYGDLRGKPFAIEAENSILDISGFSKQYNCAFIWQKDGVKKLNLYLIINYFKGGKLRFKKIKPEAFEANRFYTVINKKSGEIVPMEVNFNFDDPNLIILPLAFGKRQGREFIWNDLLSLETGSLKLANGRVIEKTLYNRRTRQDEPALFVALTFERREVLDSSNIKPMNLIGVDRGENIPAVIALTDPEGCPLSRFKDSLGNPTHILRIGESYKEKQRTIQAKKEVEQRRAGGYSRKYASKAKNLADDMVRNTARDLLYYAVTQDAMLIFENLSRGFGRQGKRTFMAERQYTRMEDWLTAKLAYEGLPSKTYLSKTLAQYTSKTCSNCGFTITSADYDRVLEKLKKTATGWMTTINGKELKVEGQITYYNRYKRQNVVKDLSVELDRLSEESVNNDISSWTKGRSGEALSLLKKRFSHRPVQEKFVCLNCGFETHADEQAALNIARSWLFLRSQEYKKYQTNKTTGNTDKRAFVETWQSFYRKKLKEVWKPAV

SEQ ID NO: 33365 - protein, 978 aa, synthetic construct
  REGION 1..978: note = engineered CasX variant
QEIKRINGIRRRLVKDSNTKKAGKTGPMKTLLVRVMTPDLRERLENLRKKPENIPQPISNTSRANLNKLLTDYTEMKKAILHVYWEEFQKDPVGLMSRVAQPASKKIDQNKLKPEMDEKGNLTTAGFACSQCGQPLFVYKLEQVSEKGKAYTNYVGRCNVAEHEKLIKLAQLKPEKDSDEAVTYSLGKFGQRALDFYSIHVTKESTHPVKPLAQIAGNRYASGPVGKALSDACMGTIASFLSKYQDIIIEHQKVVKGNQKRLESLRELAGKENLEYPSVTLPPQPHTKEGVDAYNEVIARVRMWVNLNLWQKLKLSRDDAKPLLRLKGFPSFPLVERQANEVDWWDMVCNVKKLINEKKEDGKVFWQNLAGYKRQEALRPYLSSEEDRKKGKKFARYQLGDLLLHLEKKHGEDWGKVYDEAWERIDKKVEGLSKHIKLEEERRSEDAQSKAALTDWLRAKASFVIEGLKEADKDEFCRCELKLQKWYGDLRGKPFAIEAENSILDISGFSKQYNCAFIWQKDGVKKLNLYLIINYFKGGKLRFKKIKPEAFEANRFYTVINKKSGEIVPMEVNFNFDDPNLIILPLAFGKRQGREFIWNDLLSLETGSLKLANGRVIEKTLYNRRTRQDEPALFVALTFERREVLDSSNIKPMNLIGVDRGENIPAVIALTDPEGCPLSRFKDSLGNPTHILRIGESYKEKQRTIQAKKEVEQRRAGGYSRKYASKAKNLADDMVRNTARDLLYYAVTQDAMLIFENLSRGFGRQGKRTFMAERQYTRMEDWLTAKLAYEGLPSKTYLSKTLAQYTSKTCSNCGFTITSADYDRVLEKLKKTATGWMTTINGKELKVEGQITYYNRYKRQNVVKDLSVELDRLSEESVNNDISSWTKGRSGEALSLLKKRFSHRPVQEKFVCLNCGFETHADEQAALNIARSWLFLRSQEYKKYQTNKTTGNTDKRAFVETWQSFYRKKLKEVWKPAV

SEQ ID NO: 33366 - protein, 977 aa, synthetic construct
  REGION 1..977: note = engineered CasX variant
QEIKRINGIRRRLVKDSNTKKAGKTGPMKTLLVRVMTPDLRERLENLRKKPENIPQPISNTSRANLNKLLTDYTEMKKAILHVYWEEFQKDPVGLMSRVAQPASKKIDQNKLKPEMDEKGNLTTAGFACSQCGQPLFVYKLEQVSEKGKAYTNYVGRCNVAEHEKLILLAQLKPEKDSDEAVTYSLGKFGQRALDFYSIHVTKESTHPVKPLAQIAGNRYASPVGKALSDACMGTIASFLSKYQDIIIEHQKVVKGNQKRLESLRELAGKENLEYPSVTLPPQPHTKEGVDAYNEVIARVRMWVNLNLWQKLKLSRDDAKPLLRLKGFPSFPLVERQANEVDWWDMVCNVKKLINEKKEDGKVFWQNLAGYKRQEALRPYLSSEEDRKKGKKFARYQLGDLLLHLEKKHGEDWGKVYDEAWERIDKKVEGLSKHIKLEEERRSEDAQSKAALTDWLRAKASFVIEGLKEADKDEFCRCELKLQKWYGDLRGKPFAIEAENSILDISGFSKQYNCAFIWQKDGVKKLNLYLIINYFKGGKLRFKKIKPEAFEANRFYTVINKKSGEIVPMEVNFNFDDPNLIILPLAFGKRQGREFIWNDLLSLETGSLKLANGRVIEKTLYNRRTRQDEPALFVALTFERREVLDSSNIKPMNLIGVDRGENIPAVIALTDPEGCPLSRFKDSLGNPTHILRIGESYKEKQRTIQAKKEVEQRRAGGYSRKYASKAKNLADDMVRNTARDLLYYAVTQDAMLIFENLSRGFGRQGKRTFMAERQYTRMEDWLTAKLAYEGLPSKTYLSKTLAQYTSKTCSNCGFTITSADYDRVLEKLKKTATGWMTTINGKELKVEGQITYYNRYKRQNVVKDLSVELDRLSEESVNNDISSWTKGRSGEALSLLKKRFSHRPVQEKFVCLNCGFETHADEQAALNIARSWLFLRSQEYKKYQTNKTTGNTDKRAFVETWQSFYRKKLKEVWKPAV

SEQ ID NO: 33367 - protein, 978 aa, synthetic construct
  REGION 1..978: note = engineered CasX variant
QEIKRINGIRRRLVKDSNTKKAGKTGPMKTLLVRVMTPDLRERLENLRKKPENIPQPISNTSRANLNKLLTDYTEMKKAILHVYWEEFQKDPVGLMSRVAQPASKKIDQNKLKPEMDEKGNLTTAGFACSQCGQPLFVYKLEQVSEKGKAYTNYFGRCNVAEHEKLILLAQLKPEKDSDEAVTYSLGKFGQRALDFYSIHVTKESTHPVKPLAQIAGNRYASYPVGKALSDACMGTIASFLSKYQDIIIEHQKVVKGNQKRLESLRELAGKENLEYPSVTLPPQPHTKEGVDAYNEVIARVRMWVNLNLWQKLKLSRDDAKPLLRLKGFPSFPLVERQANEVDWWDMVCNVKKLINEKKEDGKVFWQNLAGYKRQEALRPYLSSEEDRKKGKKFARYQLGDLLLHLEKKHGEDWGKVYDEAWERIDKKVEGLSKHIKLEEERRSEDAQSKAALTDWLRAKASFVIEGLKEADKDEFCRCELKLQKWYGDLRGKPFAIEAENSILDISGFSKQYNCAFIWQKDGVKKLNLYLIINYFKGGKLRFKKIKPEAFEANRFYTVINKKSGEIVPMEVNFNFDDPNLIILPLAFGKRQGREFIWNDLLSLETGSLKLANGRVIEKTLYNRRTRQDEPALFVALTFERREVLDSSNIKPMNLIGVDRGENIPAVIALTDPEGCPLSRFKDSLGNPTHILRIGESYKEKQRTIQAKKEVEQRRAGGYSRKYASKAKNLADDMVRNTARDLLYYAVTQDAMLIFENLSRGFGRQGKRTFMAERQYTRMEDWLTAKLAYEGLASKTYLSKTLAQYTSKTCSNCGFTITSADYDRVLEKLKKTATGWMTTINGKELKVEGQITYYNRYKRQNVVKDLSVELDRLSEESVNNDISSWTKGRSGEALSLLKKRFSHRPVQEKFVCLNCGFETHADEQAALNIARSWLFLRSQEYKKYQTNKTTGNTDKRAFVETWQSFYRKKLKEVWKPAV

SEQ ID NO: 33368 - protein, 978 aa, synthetic construct
  REGION 1..978: note = engineered CasX variant
QEIKRINGIRRRLVKDSNTKKAGKTGPMKTLLVRVMTPDLRERLENLRKKPENIPQPISNTSRANLNKLLTDYTEMKKAILHVYWEEFQKDPVGLMSRVAQPASKKIDQNKLKPEMDEKGNLTTAGFACSQCGQPLFVYKLEQVSEKGKAYTNYFGRCNVAEHEKLILLAQLKPEKDSDEAVTYSLGKFGQRALDFYSIHVTKESTHPVKPLAQIAGNRYASHPVGKALSDACMGTIASFLSKYQDIIIEHQKVVKGNQKRLESLRELAGKENLEYPSVTLPPQPHTKEGVDAYNEVIARVRMWVNLNLWQKLKLSRDDAKPLLRLKGFPSFPLVERQANEVDWWDMVCNVKKLINEKKEDGKVFWQNLAGYKRQEALRPYLSSEEDRKKGKKFARYQLGDLLLHLEKKHGEDWGKVYDEAWERIDKKVEGLSKHIKLEEERRSEDAQSKAALTDWLRAKASFVIEGLKEADKDEFCRCELKLQKWYGDLRGKPFAIEAENSILDISGFSKQYNCAFIWQKDGVKKLNLYLIINYFKGGKLRFKKIKPEAFEANRFYTVINKKSGEIVPMEVNFNFDDPNLIILPLAFGKRQGREFIWNDLLSLETGSLKLANGRVIEKTLYNRRTRQDEPALFVALTFERREVLDSSNIKPMNLIGVDRGENIPAVIALTDPEGCPLSRFKDSLGNPTHILRIGESYKEKQRTIQAKKEVEQRRAGGYSRKYASKAKNLADDMVRNTARDLLYYAVTQDAMLIFENLSRGFGRQGKRTFMAERQYTRMEDWLTAKLAYEGLASKTYLSKTLAQYTSKTCSNCGFTITSADYDRVLEKLKKTATGWMTTINGKELKVEGQITYYNRYKRQNVVKDLSVELDRLSEESVNNDISSWTKGRSGEALSLLKKRFSHRPVQEKFVCLNCGFETHADEQAALNIARSWLFLRSQEYKKYQTNKTTGNTDKRAFVETWQSFYRKKLKEVWKPAV

SEQ ID NO: 33369 - protein, 978 aa, synthetic construct
  REGION 1..978: note = engineered CasX variant
QEIKRINGIRRRLVKDSNTKKAGKTGPMKTLLVRVMTPDLRERLENLRKKPENIPQPISNTSRANLNKLLTDYTEMKKAILHVYWEEFQKDPVGLMSRVAQPASKKIDQNKLKPEMDEKGNLTTAGFACSQCGQPLFVYKLEQVSEKGKAYTNYFGRCNVAEHEKLILLAQLKPEKDSDEAVTYSLGKFGQRALDFYSIHVTKESTHPVKPLAQIAGNRYASSPVGKALSDACMGTIASFLSKYQDIIIEHQKVVKGNQKRLESLRELAGKENLEYPSVTLPPQPHTKEGVDAYNEVIARVRMWVNLNLWQKLKLSRDDAKPLLRLKGFPSFPLVERQANEVDWWDMVCNVKKLINEKKEDGKVFWQNLAGYKRQEALRPYLSSEEDRKKGKKFARYQLGDLLLHLEKKHGEDWGKVYDEAWERIDKKVEGLSKHIKLEEERRSEDAQSKAALTDWLRAKASFVIEGLKEADKDEFCRCELKLQKWYGDLRGKPFAIEAENSILDISGFSKQYNCAFIWQKDGVKKLNLYLIINYFKGGKLRFKKIKPEAFEANRFYTVINKKSGEIVPMEVNFNFDDPNLIILPLAFGKRQGREFIWNDLLSLETGSLKLANGRVIEKTLYNRRTRQDEPALFVALTFERREVLDSSNIKPMNLIGVDRGENIPAVIALTDPEGCPLSRFKDSLGNPTHILRIGESYKEKQRTIQAKKEVEQRRAGGYSRKYASKAKNLADDMVRNTARDLLYYAVTQDAMLIFENLSRGFGRQGKRTFMAERQYTRMEDWLTAKLAYEGLASKTYLSKTLAQYTSKTCSNCGFTITSADYDRVLEKLKKTATGWMTTINGKELKVEGQITYYNRYKRQNVVKDLSVELDRLSEESVNNDISSWTKGRSGEALSLLKKRFSHRPVQEKFVCLNCGFETHADEQAALNIARSWLFLRSQEYKKYQTNKTTGNTDKRAFVETWQSFYRKKLKEVWKPAV

SEQ ID NO: 33370 - protein, 978 aa, synthetic construct
  REGION 1..978: note = engineered CasX variant
QEIKRINGIRRRLVKDSNTKKAGKTGPMKTLLVRVMTPDLRERLENLRKKPENIPQPISNTSRANLNKLLTDYTEMKKAILHVYWEEFQKDPVGLMSRVAQPASKKIDQNKLKPEMDEKGNLTTAGFACSQCGQPLFVYKLEQVSEKGKAYTNYFGRCNVAEHEKLILLAQLKPEKDSDEAVTYSLGKFGQRALDFYSIHVTKESTHPVKPLAQIAGNRYASTPVGKALSDACMGTIASFLSKYQDIIIEHQKVVKGNQKRLESLRELAGKENLEYPSVTLPPQPHTKEGVDAYNEVIARVRMWVNLNLWQKLKLSRDDAKPLLRLKGFPSFPLVERQANEVDWWDMVCNVKKLINEKKEDGKVFWQNLAGYKRQEALRPYLSSEEDRKKGKKFARYQLGDLLLHLEKKHGEDWGKVYDEAWERIDKKVEGLSKHIKLEEERRSEDAQSKAALTDWLRAKASFVIEGLKEADKDEFCRCELKLQKWYGDLRGKPFAIEAENSILDISGFSKQYNCAFIWQKDGVKKLNLYLIINYFKGGKLRFKKIKPEAFEANRFYTVINKKSGEIVPMEVNFNFDDPNLIILPLAFGKRQGREFIWNDLLSLETGSLKLANGRVIEKTLYNRRTRQDEPALFVALTFERREVLDSSNIKPMNLIGVDRGENIPAVIALTDPEGCPLSRFKDSLGNPTHILRIGESYKEKQRTIQAKKEVEQRRAGGYSRKYASKAKNLADDMVRNTARDLLYYAVTQDAMLIFENLSRGFGRQGKRTFMAERQYTRMEDWLTAKLAYEGLASKTYLSKTLAQYTSKTCSNCGFTITSADYDRVLEKLKKTATGWMTTINGKELKVEGQITYYNRYKRQNVVKDLSVELDRLSEESVNNDISSWTKGRSGEALSLLKKRFSHRPVQEKFVCLNCGFETHADEQAALNIARSWLFLRSQEYKKYQTNKTTGNTDKRAFVETWQSFYRKKLKEVWKPAV

SEQ ID NO: 33371 - protein, 978 aa, synthetic construct
  REGION 1..978: note = engineered CasX variant
QEIKRINGIRRRLVKDSNTKKAGKTGPMKTLLVRVMTPDLRERLENLRKKPENIPQPISNTSRANLNKLLTDYTEMKKAILHVYWEEFQKDPVGLMSRVAQPASKKIDQNKLKPEMDEKGNLTTAGFACSQCGQPLFVYKLEQVSEKGKAYTNYFGRCNVAEHEKLILLAQLKPEKDSDEAVTYSLGKFGQRALDFYSIHVTKESTHPVKPLAQIAGNRYASAPVGKALSDACMGTIASFLSKYQDIIIEHQKVVKGNQKRLESLRELAGKENLEYPSVTLPPQPHTKEGVDAYNEVIARVRMWVNLNLWQKLKLSRDDAKPLLRLKGFPSFPLVERQANEVDWWDMVCNVKKLINEKKEDGKVFWQNLAGYKRQEALRPYLSSEEDRKKGKKFARYQLGDLLLHLEKKHGEDWGKVYDEAWERIDKKVEGLSKHIKLEEERRSEDAQSKAALTDWLRAKASFVIEGLKEADKDEFCRCELKLQKWYGDLRGKPFAIEAENSILDISGFSKQYNCAFIWQKDGVKKLNLYLIINYFKGGKLRFKKIKPEAFEANRFYTVINKKSGEIVPMEVNFNFDDPNLIILPLAFGKRQGREFIWNDLLSLETGSLKLANGRVIEKTLYNRRTRQDEPALFVALTFERREVLDSSNIKPMNLIGVDRGENIPAVIALTDPEGCPLSRFKDSLGNPTHILRIGESYKEKQRTIQAKKEVEQRRAGGYSRKYASKAKNLADDMVRNTARDLLYYAVTQDAMLIFENLSRGFGRQGKRTFMAERQYTRMEDWLTAKLAYEGLASKTYLSKTLAQYTSKTCSNCGFTITSADYDRVLEKLKKTATGWMTTINGKELKVEGQITYYNRYKRQNVVKDLSVELDRLSEESVNNDISSWTKGRSGEALSLLKKRFSHRPVQEKFVCLNCGFETHADEQAALNIARSWLFLRSQEYKKYQTNKTTGNTDKRAFVETWQSFYRKKLKEVWKPAV

SEQ ID NO: 33372 - protein, 978 aa, synthetic construct
  REGION 1..978: note = engineered CasX variant
QEIKRINGIRRRLVKDSNTKKAGKTGPMKTLLVRVMTPDLRERLENLRKKPENIPQPISNTSRANLNKLLTDYTEMKKAILHVYWEEFQKDPVGLMSRVAQPASKKIDQNKLKPEMDEKGNLTTAGFACSQCGQPLFVYKLEQVSEKGKAYTNYFGRCNVAEHEKLILLAQLKPEKDSDEAVTYSLGKFGQRALDFYSIHVTKESTHPVKPLAQIAGNRYASVPVGKALSDACMGTIASFLSKYQDIIIEHQKVVKGNQKRLESLRELAGKENLEYPSVTLPPQPHTKEGVDAYNEVIARVRMWVNLNLWQKLKLSRDDAKPLLRLKGFPSFPLVERQANEVDWWDMVCNVKKLINEKKEDGKVFWQNLAGYKRQEALRPYLSSEEDRKKGKKFARYQLGDLLLHLEKKHGEDWGKVYDEAWERIDKKVEGLSKHIKLEEERRSEDAQSKAALTDWLRAKASFVIEGLKEADKDEFCRCELKLQKWYGDLRGKPFAIEAENSILDISGFSKQYNCAFIWQKDGVKKLNLYLIINYFKGGKLRFKKIKPEAFEANRFYTVINKKSGEIVPMEVNFNFDDPNLIILPLAFGKRQGREFIWNDLLSLETGSLKLANGRVIEKTLYNRRTRQDEPALFVALTFERREVLDSSNIKPMNLIGVDRGENIPAVIALTDPEGCPLSRFKDSLGNPTHILRIGESYKEKQRTIQAKKEVEQRRAGGYSRKYASKAKNLADDMVRNTARDLLYYAVTQDAMLIFENLSRGFGRQGKRTFMAERQYTRMEDWLTAKLAYEGLASKTYLSKTLAQYTSKTCSNCGFTITSADYDRVLEKLKKTATGWMTTINGKELKVEGQITYYNRYKRQNVVKDLSVELDRLSEESVNNDISSWTKGRSGEALSLLKKRFSHRPVQEKFVCLNCGFETHADEQAALNIARSWLFLRSQEYKKYQTNKTTGNTDKRAFVETWQSFYRKKLKEVWKPAV

SEQ ID NO: 33373 - protein, 978 aa, synthetic construct
  REGION 1..978: note = engineered CasX variant
QEIKRINGIRRRLVKDSNTKKAGKTGPMKTLLVRVMTPDLRERLENLRKKPENIPQPISNTSRANLNKLLTDYTEMKKAILHVYWEEFQKDPVGLMSRVAQPASKKIDQNKLKPEMDEKGNLTTAGFACSQCGQPLFVYKLEQVSEKGKAYTNYFGRCNVAEHEKLIKLAQLKPEKDSDEAVTYSLGKFGQRALDFYSIHVTKESTHPVKPLAQIAGNRYASGPVGKALSDACMGTIASFLSKYQDIIIEHQKVVKGNQKRLESLRELAGKENLEYPSVTLPPQPHTKEGVDAYNEVIARVRMWVNLNLWQKLKLSRDDAKPLLRLKGFPSFPLVERQANEVDWWDMVCNVKKLINEKKEDGKVFWQNLAGYKRQEALRPYLSSEEDRKKGKKFARYQLGDLLLHLEKKHGEDWGKVYDEAWERIDKKVEGLSKHIKLEEERRSEDAQSKAALTDWLRAKASFVIEGLKEADKDEFCRCELKLQKWYGDLRGKPFAIEAENSILDISGFSKQYNCAFIWQKDGVKKLNLYLIINYFKGGKLRFKKIKPEAFEANRFYTVINKKSGEIVPMEVNFNFDDPNLIILPLAFGKRQGREFIWNDLLSLETGSLKLANGRVIEKTLYNRRTRQDEPALFVALTFERREVLDSSNIKPMNLIGVDRGENIPAVIALTDPEGCPLSRFKDSLGNPTHILRIGESYKEKQRTIQAKKEVEQRRAGGYSRKYASKAKNLADDMVRNTARDLLYYAVTQDAMLIFENLSRGFGRQGKRTFMAERQYTRMEDWLTAKLAYEGLASKTYLSKTLAQYTSKTCSNCGFTITSADYDRVLEKLKKTATGWMTTINGKELKVEGQITYYNRYKRQNVVKDLSVELDRLSEESVNNDISSWTKGRSGEALSLLKKRFSHRPVQEKFVCLNCGFETHADEQAALNIARSWLFLRSQEYKKYQTNKTTGNTDKRAFVETWQSFYRKKLKEVWKPAV

SEQ ID NO: 33374 - protein, 977 aa, synthetic construct
  REGION 1..977: note = engineered CasX variant
QEIKRINGIRRRLVKDSNTKKAGKTGPMKTLLVRVMTPDLRERLENLRKKPENIPQPISNTSRANLNKLLTDYTEMKKAILHVYWEEFQKDPVGLMSRVAQPASKKIDQNKLKPEMDEKGNLTTAGFACSQCGQPLFVYKLEQVSEKGKAYTNYFGRCNVAEHEKLILLAQLKPEKDSDEAVTYSLGKFGQRALDFYSIHVTKESTHPVKPLAQIAGNRYASPVGKALSDACMGTIASFLSKYQDIIIEHQKVVKGNQKRLESLRELAGKENLEYPSVTLPPQPHTKEGVDAYNEVIARVRMWVNLNLWQKLKLSRDDAKPLLRLKGFPSFPLVERQANEVDWWDMVCNVKKLINEKKEDGKVFWQNLAGYKRQEALRPYLSSEEDRKKGKKFARYQLGDLLLHLEKKHGEDWGKVYDEAWERIDKKVEGLSKHIKLEEERRSEDAQSKAALTDWLRAKASFVIEGLKEADKDEFCRCELKLQKWYGDLRGKPFAIEAENSILDISGFSKQYNCAFIWQKDGVKKLNLYLIINYFKGGKLRFKKIKPEAFEANRFYTVINKKSGEIVPMEVNFNFDDPNLIILPLAFGKRQGREFIWNDLLSLETGSLKLANGRVIEKTLYNRRTRQDEPALFVALTFERREVLDSSNIKPMNLIGVDRGENIPAVIALTDPEGCPLSRFKDSLGNPTHILRIGESYKEKQRTIQAKKEVEQRRAGGYSRKYASKAKNLADDMVRNTARDLLYYAVTQDAMLIFENLSRGFGRQGKRTFMAERQYTRMEDWLTAKLAYEGLASKTYLSKTLAQYTSKTCSNCGFTITSADYDRVLEKLKKTATGWMTTINGKELKVEGQITYYNRYKRQNVVKDLSVELDRLSEESVNNDISSWTKGRSGEALSLLKKRFSHRPVQEKFVCLNCGFETHADEQAALNIARSWLFLRSQEYKKYQTNKTTGNTDKRAFVETWQSFYRKKLKEVWKPAV

SEQ ID NO: 33375 - protein, 978 aa, synthetic construct
  REGION 1..978: note = engineered CasX variant
QEIKRINGIRRRLVKDSNTKKAGKTGPMKTLLVRVMTPDLRERLENLRKKPENIPQPISNTSRANLNKLLTDYTEMKKAILHVYWEEFQKDPVGLMSRVAQPASKKIDQNKLKPEMDEKGNLTTAGFACSQCGQPLFVYKLEQVSEKGKAYTNYFGRCNVAEHEKLILLAQLKPEKDSDEAVTYSLGKFGQRALDFYSIHVTKESTHPVKPLAQIAGNRYASYPVGKALSDACMGTIASFLSKYQDIIIEHQKVVKGNQKRLESLRELAGKENLEYPSVTLPPQPHTKEGVDAYNEVIARVRMWVNLNLWQKLKLSRDDAKPLLRLKGFPSFPLVERQANEVDWWDMVCNVKKLINEKKEDGKVFWQNLAGYKRQEALRPYLSSEEDRKKGKKFARYQLGDLLLHLEKKHGEDWGKVYDEAWERIDKKVEGLSKHIKLEEERRSEDAQSKAALTDWLRAKASFVIEGLKEADKDEFCRCELKLQKWYGDLRGKPFAIEAENSILDISGFSKQYNCAFIWQKDGVKKLNLYLIINYFKGGKLRFKKIKPEAFEANRFYTVINKKSGEIVPMEVNFNFDDPNLIILPLAFGKRQGREFIWNDLLSLETGSLKLANGRVIEKTLYNRRTRQDEPALFVALTFERREVLDSSNIKPMNLIGVDRGENIPAVIALTDPEGCPLSRFKDSLGNPTHILRIGESYKEKQRTIQAKKEVEQRRAGGYSRKYASKAKNLADDMVRNTARDLLYYAVTQDAMLIFENLSRGFGRQGKRTFMAERQYTRMEDWLTAKLAYEGLPSKVYLSKTLAQYTSKTCSNCGFTITSADYDRVLEKLKKTATGWMTTINGKELKVEGQITYYNRYKRQNVVKDLSVELDRLSEESVNNDISSWTKGRSGEALSLLKKRFSHRPVQEKFVCLNCGFETHADEQAALNIARSWLFLRSQEYKKYQTNKTTGNTDKRAFVETWQSFYRKKLKEVWKPAV

SEQ ID NO: 33376 - protein, 978 aa, synthetic construct
  REGION 1..978: note = engineered CasX variant
QEIKRINGIRRRLVKDSNTKKAGKTGPMKTLLVRVMTPDLRERLENLRKKPENIPQPISNTSRANLNKLLTDYTEMKKAILHVYWEEFQKDPVGLMSRVAQPASKKIDQNKLKPEMDEKGNLTTAGFACSQCGQPLFVYKLEQVSEKGKAYTNYFGRCNVAEHEKLILLAQLKPEKDSDEAVTYSLGKFGQRALDFYSIHVTKESTHPVKPLAQIAGNRYASHPVGKALSDACMGTIASFLSKYQDIIIEHQKVVKGNQKRLESLRELAGKENLEYPSVTLPPQPHTKEGVDAYNEVIARVRMWVNLNLWQKLKLSRDDAKPLLRLKGFPSFPLVERQANEVDWWDMVCNVKKLINEKKEDGKVFWQNLAGYKRQEALRPYLSSEEDRKKGKKFARYQLGDLLLHLEKKHGEDWGKVYDEAWERIDKKVEGLSKHIKLEEERRSEDAQSKAALTDWLRAKASFVIEGLKEADKDEFCRCELKLQKWYGDLRGKPFAIEAENSILDISGFSKQYNCAFIWQKDGVKKLNLYLIINYFKGGKLRFKKIKPEAFEANRFYTVINKKSGEIVPMEVNFNFDDPNLIILPLAFGKRQGREFIWNDLLSLETGSLKLANGRVIEKTLYNRRTRQDEPALFVALTFERREVLDSSNIKPMNLIGVDRGENIPAVIALTDPEGCPLSRFKDSLGNPTHILRIGESYKEKQRTIQAKKEVEQRRAGGYSRKYASKAKNLADDMVRNTARDLLYYAVTQDAMLIFENLSRGFGRQGKRTFMAERQYTRMEDWLTAKLAYEGLPSKVYLSKTLAQYTSKTCSNCGFTITSADYDRVLEKLKKTATGWMTTINGKELKVEGQITYYNRYKRQNVVKDLSVELDRLSEESVNNDISSWTKGRSGEALSLLKKRFSHRPVQEKFVCLNCGFETHADEQAALNIARSWLFLRSQEYKKYQTNKTTGNTDKRAFVETWQSFYRKKLKEVWKPAV

SEQ ID NO: 33377 - protein, 978 aa, synthetic construct
  REGION 1..978: note = engineered CasX variant
QEIKRINGIRRRLVKDSNTKKAGKTGPMKTLLVRVMTPDLRERLENLRKKPENIPQPISNTSRANLNKLLTDYTEMKKAILHVYWEEFQKDPVGLMSRVAQPASKKIDQNKLKPEMDEKGNLTTAGFACSQCGQPLFVYKLEQVSEKGKAYTNYFGRCNVAEHEKLILLAQLKPEKDSDEAVTYSLGKFGQRALDFYSIHVTKESTHPVKPLAQIAGNRYASSPVGKALSDACMGTIASFLSKYQDIIIEHQKVVKGNQKRLESLRELAGKENLEYPSVTLPPQPHTKEGVDAYNEVIARVRMWVNLNLWQKLKLSRDDAKPLLRLKGFPSFPLVERQANEVDWWDMVCNVKKLINEKKEDGKVFWQNLAGYKRQEALRPYLSSEEDRKKGKKFARYQLGDLLLHLEKKHGEDWGKVYDEAWERIDKKVEGLSKHIKLEEERRSEDAQSKAALTDWLRAKASFVIEGLKEADKDEFCRCELKLQKWYGDLRGKPFAIEAENSILDISGFSKQYNCAFIWQKDGVKKLNLYLIINYFKGGKLRFKKIKPEAFEANRFYTVINKKSGEIVPMEVNFNFDDPNLIILPLAFGKRQGREFIWNDLLSLETGSLKLANGRVIEKTLYNRRTRQDEPALFVALTFERREVLDSSNIKPMNLIGVDRGENIPAVIALTDPEGCPLSRFKDSLGNPTHILRIGESYKEKQRTIQAKKEVEQRRAGGYSRKYASKAKNLADDMVRNTARDLLYYAVTQDAMLIFENLSRGFGRQGKRTFMAERQYTRMEDWLTAKLAYEGLPSKVYLSKTLAQYTSKTCSNCGFTITSADYDRVLEKLKKTATGWMTTINGKELKVEGQITYYNRYKRQNVVKDLSVELDRLSEESVNNDISSWTKGRSGEALSLLKKRFSHRPVQEKFVCLNCGFETHADEQAALNIARSWLFLRSQEYKKYQTNKTTGNTDKRAFVETWQSFYRKKLKEVWKPAV

SEQ ID NO: 33378 - protein, 978 aa, synthetic construct
  REGION 1..978: note = engineered CasX variant
QEIKRINGIRRRLVKDSNTKKAGKTGPMKTLLVRVMTPDLRERLENLRKKPENIPQPISNTSRANLNKLLTDYTEMKKAILHVYWEEFQKDPVGLMSRVAQPASKKIDQNKLKPEMDEKGNLTTAGFACSQCGQPLFVYKLEQVSEKGKAYTNYFGRCNVAEHEKLILLAQLKPEKDSDEAVTYSLGKFGQRALDFYSIHVTKESTHPVKPLAQIAGNRYASTPVGKALSDACMGTIASFLSKYQDIIIEHQKVVKGNQKRLESLRELAGKENLEYPSVTLPPQPHTKEGVDAYNEVIARVRMWVNLNLWQKLKLSRDDAKPLLRLKGFPSFPLVERQANEVDWWDMVCNVKKLINEKKEDGKVFWQNLAGYKRQEALRPYLSSEEDRKKGKKFARYQLGDLLLHLEKKHGEDWGKVYDEAWERIDKKVEGLSKHIKLEEERRSEDAQSKAALTDWLRAKASFVIEGLKEADKDEFCRCELKLQKWYGDLRGKPFAIEAENSILDISGFSKQYNCAFIWQKDGVKKLNLYLIINYFKGGKLRFKKIKPEAFEANRFYTVINKKSGEIVPMEVNFNFDDPNLIILPLAFGKRQGREFIWNDLLSLETGSLKLANGRVIEKTLYNRRTRQDEPALFVALTFERREVLDSSNIKPMNLIGVDRGENIPAVIALTDPEGCPLSRFKDSLGNPTHILRIGESYKEKQRTIQAKKEVEQRRAGGYSRKYASKAKNLADDMVRNTARDLLYYAVTQDAMLIFENLSRGFGRQGKRTFMAERQYTRMEDWLTAKLAYEGLPSKVYLSKTLAQYTSKTCSNCGFTITSADYDRVLEKLKKTATGWMTTINGKELKVEGQITYYNRYKRQNVVKDLSVELDRLSEESVNNDISSWTKGRSGEALSLLKKRFSHRPVQEKFVCLNCGFETHADEQAALNIARSWLFLRSQEYKKYQTNKTTGNTDKRAFVETWQSFYRKKLKEVWKPAV

SEQ ID NO: 33379 - protein, 978 aa, synthetic construct
  REGION 1..978: note = engineered CasX variant
QEIKRINGIRRRLVKDSNTKKAGKTGPMKTLLVRVMTPDLRERLENLRKKPENIPQPISNTSRANLNKLLTDYTEMKKAILHVYWEEFQKDPVGLMSRVAQPASKKIDQNKLKPEMDEKGNLTTAGFACSQCGQPLFVYKLEQVSEKGKAYTNYFGRCNVAEHEKLILLAQLKPEKDSDEAVTYSLGKFGQRALDFYSIHVTKESTHPVKPLAQIAGNRYASAPVGKALSDACMGTIASFLSKYQDIIIEHQKVVKGNQKRLESLRELAGKENLEYPSVTLPPQPHTKEGVDAYNEVIARVRMWVNLNLWQKLKLSRDDAKPLLRLKGFPSFPLVERQANEVDWWDMVCNVKKLINEKKEDGKVFWQNLAGYKRQEALRPYLSSEEDRKKGKKFARYQLGDLLLHLEKKHGEDWGKVYDEAWERIDKKVEGLSKHIKLEEERRSEDAQSKAALTDWLRAKASFVIEGLKEADKDEFCRCELKLQKWYGDLRGKPFAIEAENSILDISGFSKQYNCAFIWQKDGVKKLNLYLIINYFKGGKLRFKKIKPEAFEANRFYTVINKKSGEIVPMEVNFNFDDPNLIILPLAFGKRQGREFIWNDLLSLETGSLKLANGRVIEKTLYNRRTRQDEPALFVALTFERREVLDSSNIKPMNLIGVDRGENIPAVIALTDPEGCPLSRFKDSLGNPTHILRIGESYKEKQRTIQAKKEVEQRRAGGYSRKYASKAKNLADDMVRNTARDLLYYAVTQDAMLIFENLSRGFGRQGKRTFMAERQYTRMEDWLTAKLAYEGLPSKVYLSKTLAQYTSKTCSNCGFTITSADYDRVLEKLKKTATGWMTTINGKELKVEGQITYYNRYKRQNVVKDLSVELDRLSEESVNNDISSWTKGRSGEALSLLKKRFSHRPVQEKFVCLNCGFETHADEQAALNIARSWLFLRSQEYKKYQTNKTTGNTDKRAFVETWQSFYRKKLKEVWKPAV

SEQ ID NO: 33380 - protein, 978 aa, synthetic construct
  REGION 1..978: note = engineered CasX variant
QEIKRINGIRRRLVKDSNTKKAGKTGPMKTLLVRVMTPDLRERLENLRKKPENIPQPISNTSRANLNKLLTDYTEMKKAILHVYWEEFQKDPVGLMSRVAQPASKKIDQNKLKPEMDEKGNLTTAGFACSQCGQPLFVYKLEQVSEKGKAYTNYFGRCNVAEHEKLILLAQLKPEKDSDEAVTYSLGKFGQRALDFYSIHVTKESTHPVKPLAQIAGNRYASVPVGKALSDACMGTIASFLSKYQDIIIEHQKVVKGNQKRLESLRELAGKENLEYPSVTLPPQPHTKEGVDAYNEVIARVRMWVNLNLWQKLKLSRDDAKPLLRLKGFPSFPLVERQANEVDWWDMVCNVKKLINEKKEDGKVFWQNLAGYKRQEALRPYLSSEEDRKKGKKFARYQLGDLLLHLEKKHGEDWGKVYDEAWERIDKKVEGLSKHIKLEEERRSEDAQSKAALTDWLRAKASFVIEGLKEADKDEFCRCELKLQKWYGDLRGKPFAIEAENSILDISGFSKQYNCAFIWQKDGVKKLNLYLIINYFKGGKLRFKKIKPEAFEANRFYTVINKKSGEIVPMEVNFNFDDPNLIILPLAFGKRQGREFIWNDLLSLETGSLKLANGRVIEKTLYNRRTRQDEPALFVALTFERREVLDSSNIKPMNLIGVDRGENIPAVIALTDPEGCPLSRFKDSLGNPTHILRIGESYKEKQRTIQAKKEVEQRRAGGYSRKYASKAKNLADDMVRNTARDLLYYAVTQDAMLIFENLSRGFGRQGKRTFMAERQYTRMEDWLTAKLAYEGLPSKVYLSKTLAQYTSKTCSNCGFTITSADYDRVLEKLKKTATGWMTTINGKELKVEGQITYYNRYKRQNVVKDLSVELDRLSEESVNNDISSWTKGRSGEALSLLKKRFSHRPVQEKFVCLNCGFETHADEQAALNIARSWLFLRSQEYKKYQTNKTTGNTDKRAFVETWQSFYRKKLKEVWKPAV

SEQ ID NO: 33381 - protein, 978 aa, synthetic construct
  REGION 1..978: note = engineered CasX variant
QEIKRINGIRRRLVKDSNTKKAGKTGPMKTLLVRVMTPDLRERLENLRKKPENIPQPISNTSRANLNKLLTDYTEMKKAILHVYWEEFQKDPVGLMSRVAQPASKKIDQNKLKPEMDEKGNLTTAGFACSQCGQPLFVYKLEQVSEKGKAYTNYFGRCNVAEHEKLIKLAQLKPEKDSDEAVTYSLGKFGQRALDFYSIHVTKESTHPVKPLAQIAGNRYASGPVGKALSDACMGTIASFLSKYQDIIIEHQKVVKGNQKRLESLRELAGKENLEYPSVTLPPQPHTKEGVDAYNEVIARVRMWVNLNLWQKLKLSRDDAKPLLRLKGFPSFPLVERQANEVDWWDMVCNVKKLINEKKEDGKVFWQNLAGYKRQEALRPYLSSEEDRKKGKKFARYQLGDLLLHLEKKHGEDWGKVYDEAWERIDKKVEGLSKHIKLEEERRSEDAQSKAALTDWLRAKASFVIEGLKEADKDEFCRCELKLQKWYGDLRGKPFAIEAENSILDISGFSKQYNCAFIWQKDGVKKLNLYLIINYFKGGKLRFKKIKPEAFEANRFYTVINKKSGEIVPMEVNFNFDDPNLIILPLAFGKRQGREFIWNDLLSLETGSLKLANGRVIEKTLYNRRTRQDEPALFVALTFERREVLDSSNIKPMNLIGVDRGENIPAVIALTDPEGCPLSRFKDSLGNPTHILRIGESYKEKQRTIQAKKEVEQRRAGGYSRKYASKAKNLADDMVRNTARDLLYYAVTQDAMLIFENLSRGFGRQGKRTFMAERQYTRMEDWLTAKLAYEGLPSKVYLSKTLAQYTSKTCSNCGFTITSADYDRVLEKLKKTATGWMTTINGKELKVEGQITYYNRYKRQNVVKDLSVELDRLSEESVNNDISSWTKGRSGEALSLLKKRFSHRPVQEKFVCLNCGFETHADEQAALNIARSWLFLRSQEYKKYQTNKTTGNTDKRAFVETWQSFYRKKLKEVWKPAV

SEQ ID NO: 33382 - protein, 977 aa, synthetic construct
  REGION 1..977: note = engineered CasX variant
QEIKRINGIRRRLVKDSNTKKAGKTGPMKTLLVRVMTPDLRERLENLRKKPENIPQPISNTSRANLNKLLTDYTEMKKAILHVYWEEFQKDPVGLMSRVAQPASKKIDQNKLKPEMDEKGNLTTAGFACSQCGQPLFVYKLEQVSEKGKAYTNYFGRCNVAEHEKLILLAQLKPEKDSDEAVTYSLGKFGQRALDFYSIHVTKESTHPVKPLAQIAGNRYASPVGKALSDACMGTIASFLSKYQDIIIEHQKVVKGNQKRLESLRELAGKENLEYPSVTLPPQPHTKEGVDAYNEVIARVRMWVNLNLWQKLKLSRDDAKPLLRLKGFPSFPLVERQANEVDWWDMVCNVKKLINEKKEDGKVFWQNLAGYKRQEALRPYLSSEEDRKKGKKFARYQLGDLLLHLEKKHGEDWGKVYDEAWERIDKKVEGLSKHIKLEEERRSEDAQSKAALTDWLRAKASFVIEGLKEADKDEFCRCELKLQKWYGDLRGKPFAIEAENSILDISGFSKQYNCAFIWQKDGVKKLNLYLIINYFKGGKLRFKKIKPEAFEANRFYTVINKKSGEIVPMEVNFNFDDPNLIILPLAFGKRQGREFIWNDLLSLETGSLKLANGRVIEKTLYNRRTRQDEPALFVALTFERREVLDSSNIKPMNLIGVDRGENIPAVIALTDPEGCPLSRFKDSLGNPTHILRIGESYKEKQRTIQAKKEVEQRRAGGYSRKYASKAKNLADDMVRNTARDLLYYAVTQDAMLIFENLSRGFGRQGKRTFMAERQYTRMEDWLTAKLAYEGLPSKVYLSKTLAQYTSKTCSNCGFTITSADYDRVLEKLKKTATGWMTTINGKELKVEGQITYYNRYKRQNVVKDLSVELDRLSEESVNNDISSWTKGRSGEALSLLKKRFSHRPVQEKFVCLNCGFETHADEQAALNIARSWLFLRSQEYKKYQTNKTTGNTDKRAFVETWQSFYRKKLKEVWKPAV

SEQ ID NO: 33383 - protein, 979 aa, synthetic construct
  REGION 1..979: note = engineered CasX variant
QEIKRINGIRRRLVKDSNTKKAGKTGPMKTLLVRVMTPDLRERLENLRKKPENIPQPISNTSRANLNKLLTDYTEMKKAILHVYWEEFQKDPVGLMSRVAQPASKKIDQNKLKPEMDEKGNLTTAGFACSQCGQPLFVYKLEQVSEKGKAYTNYFGRCNVAEHEKLILLAQLKPEKDSDEAVTYSLGKFGQRALDFYSIHVTKESTHPVKPLAQIAGNRYASYPVGKALSDACMGTIASFLSKYQDIIIEHQKVVKGNQKRLESLRELAGKENLEYPSVTLPPQPHTKEGVDAYNEVIARVRMWVNLNLWQKLKLSRDDAKPLLRLKGFPSFPLVERQANEVDWWDMVCNVKKLINEKKEDGKVFWQNLAGYKRQEALRPYLSSEEDRKKGKKFARYQLGDLLLHLEKKHGEDWGKVYDEAWERIDKKVEGLSKHIKLEEERRSEDAQSKAALTDWLRAKASFVIEGLKEADKDEFCRCELKLQKWYGDLRGKPFAIEAENSILDISGFSKQYNCAFIWQKDGVKKLNLYLIINYFKGGKLRFKKIKPEAFEANRFYTVINKKSGEIVPMEVNFNFDDPNLIILPLAFGKRQGREFIWNDLLSLETGSLKLANGRVIEKTLYNRRTRQDEPALFVALTFERREVLDSSNIKPMNLIGVDRGENIPAVIALTDPEGCPLSRFKDSLGNPTHILRIGESYKEKQRTIQAKKEVEQRRAGGYSRKYASKAKNLADDMVRNTARDLLYYAVTQDAMLIFENLSRGFGRQGKRTFMAERQYTRMEDWLTAKLAYEGPLPSKTYLSKTLAQYTSKTCSNCGFTITSADYDRVLEKLKKTATGWMTTINGKELKVEGQITYYNRYKRQNVVKDLSVELDRLSEESVNNDISSWTKGRSGEALSLLKKRFSHRPVQEKFVCLNCGFETHADEQAALNIARSWLFLRSQEYKKYQTNKTTGNTDKRAFVETWQSFYRKKLKEVWKPAV

SEQ ID NO: 33384 - protein, 979 aa, synthetic construct
  REGION 1..979: note = engineered CasX variant
QEIKRINGIRRRLVKDSNTKKAGKTGPMKTLLVRVMTPDLRERLENLRKKPENIPQPISNTSRANLNKLLTDYTEMKKAILHVYWEEFQKDPVGLMSRVAQPASKKIDQNKLKPEMDEKGNLTTAGFACSQCGQPLFVYKLEQVSEKGKAYTNYFGRCNVAEHEKLILLAQLKPEKDSDEAVTYSLGKFGQRALDFYSIHVTKESTHPVKPLAQIAGNRYASHPVGKALSDACMGTIASFLSKYQDIIIEHQKVVKGNQKRLESLRELAGKENLEYPSVTLPPQPHTKEGVDAYNEVIARVRMWVNLNLWQKLKLSRDDAKPLLRLKGFPSFPLVERQANEVDWWDMVCNVKKLINEKKEDGKVFWQNLAGYKRQEALRPYLSSEEDRKKGKKFARYQLGDLLLHLEKKHGEDWGKVYDEAWERIDKKVEGLSKHIKLEEERRSEDAQSKAALTDWLRAKASFVIEGLKEADKDEFCRCELKLQKWYGDLRGKPFAIEAENSILDISGFSKQYNCAFIWQKDGVKKLNLYLIINYFKGGKLRFKKIKPEAFEANRFYTVINKKSGEIVPMEVNFNFDDPNLIILPLAFGKRQGREFIWNDLLSLETGSLKLANGRVIEKTLYNRRTRQDEPALFVALTFERREVLDSSNIKPMNLIGVDRGENIPAVIALTDPEGCPLSRFKDSLGNPTHILRIGESYKEKQRTIQAKKEVEQRRAGGYSRKYASKAKNLADDMVRNTARDLLYYAVTQDAMLIFENLSRGFGRQGKRTFMAERQYTRMEDWLTAKLAYEGPLPSKTYLSKTLAQYTSKTCSNCGFTITSADYDRVLEKLKKTATGWMTTINGKELKVEGQITYYNRYKRQNVVKDLSVELDRLSEESVNNDISSWTKGRSGEALSLLKKRFSHRPVQEKFVCLNCGFETHADEQAALNIARSWLFLRSQEYKKYQTNKTTGNTDKRAFVETWQSFYRKKLKEVWKPAV

SEQ ID NO: 33385 - protein, 979 aa, synthetic construct
  REGION 1..979: note = engineered CasX variant
QEIKRINGIRRRLVKDSNTKKAGKTGPMKTLLVRVMTPDLRERLENLRKKPENIPQPISNTSRANLNKLLTDYTEMKKAILHVYWEEFQKDPVGLMSRVAQPASKKIDQNKLKPEMDEKGNLTTAGFACSQCGQPLFVYKLEQVSEKGKAYTNYFGRCNVAEHEKLILLAQLKPEKDSDEAVTYSLGKFGQRALDFYSIHVTKESTHPVKPLAQIAGNRYASSPVGKALSDACMGTIASFLSKYQDIIIEHQKVVKGNQKRLESLRELAGKENLEYPSVTLPPQPHTKEGVDAYNEVIARVRMWVNLNLWQKLKLSRDDAKPLLRLKGFPSFPLVERQANEVDWWDMVCNVKKLINEKKEDGKVFWQNLAGYKRQEALRPYLSSEEDRKKGKKFARYQLGDLLLHLEKKHGEDWGKVYDEAWERIDKKVEGLSKHIKLEEERRSEDAQSKAALTDWLRAKASFVIEGLKEADKDEFCRCELKLQKWYGDLRGKPFAIEAENSILDISGFSKQYNCAFIWQKDGVKKLNLYLIINYFKGGKLRFKKIKPEAFEANRFYTVINKKSGEIVPMEVNFNFDDPNLIILPLAFGKRQGREFIWNDLLSLETGSLKLANGRVIEKTLYNRRTRQDEPALFVALTFERREVLDSSNIKPMNLIGVDRGENIPAVIALTDPEGCPLSRFKDSLGNPTHILRIGESYKEKQRTIQAKKEVEQRRAGGYSRKYASKAKNLADDMVRNTARDLLYYAVTQDAMLIFENLSRGFGRQGKRTFMAERQYTRMEDWLTAKLAYEGPLPSKTYLSKTLAQYTSKTCSNCGFTITSADYDRVLEKLKKTATGWMTTINGKELKVEGQITYYNRYKRQNVVKDLSVELDRLSEESVNNDISSWTKGRSGEALSLLKKRFSHRPVQEKFVCLNCGFETHADEQAALNIARSWLFLRSQEYKKYQTNKTTGNTDKRAFVETWQSFYRKKLKEVWKPAV

SEQ ID NO: 33386 - protein, 979 aa, synthetic construct
  REGION 1..979: note = engineered CasX variant
QEIKRINGIRRRLVKDSNTKKAGKTGPMKTLLVRVMTPDLRERLENLRKKPENIPQPISNTSRANLNKLLTDYTEMKKAILHVYWEEFQKDPVGLMSRVAQPASKKIDQNKLKPEMDEKGNLTTAGFACSQCGQPLFVYKLEQVSEKGKAYTNYFGRCNVAEHEKLILLAQLKPEKDSDEAVTYSLGKFGQRALDFYSIHVTKESTHPVKPLAQIAGNRYASTPVGKALSDACMGTIASFLSKYQDIIIEHQKVVKGNQKRLESLRELAGKENLEYPSVTLPPQPHTKEGVDAYNEVIARVRMWVNLNLWQKLKLSRDDAKPLLRLKGFPSFPLVERQANEVDWWDMVCNVKKLINEKKEDGKVFWQNLAGYKRQEALRPYLSSEEDRKKGKKFARYQLGDLLLHLEKKHGEDWGKVYDEAWERIDKKVEGLSKHIKLEEERRSEDAQSKAALTDWLRAKASFVIEGLKEADKDEFCRCELKLQKWYGDLRGKPFAIEAENSILDISGFSKQYNCAFIWQKDGVKKLNLYLIINYFKGGKLRFKKIKPEAFEANRFYTVINKKSGEIVPMEVNFNFDDPNLIILPLAFGKRQGREFIWNDLLSLETGSLKLANGRVIEKTLYNRRTRQDEPALFVALTFERREVLDSSNIKPMNLIGVDRGENIPAVIALTDPEGCPLSRFKDSLGNPTHILRIGESYKEKQRTIQAKKEVEQRRAGGYSRKYASKAKNLADDMVRNTARDLLYYAVTQDAMLIFENLSRGFGRQGKRTFMAERQYTRMEDWLTAKLAYEGPLPSKTYLSKTLAQYTSKTCSNCGFTITSADYDRVLEKLKKTATGWMTTINGKELKVEGQITYYNRYKRQNVVKDLSVELDRLSEESVNNDISSWTKGRSGEALSLLKKRFSHRPVQEKFVCLNCGFETHADEQAALNIARSWLFLRSQEYKKYQTNKTTGNTDKRAFVETWQSFYRKKLKEVWKPAV

SEQ ID NO: 33387 - protein, 979 aa, synthetic construct
  REGION 1..979: note = engineered CasX variant
QEIKRINGIRRRLVKDSNTKKAGKTGPMKTLLVRVMTPDLRERLENLRKKPENIPQPISNTSRANLNKLLTDYTEMKKAILHVYWEEFQKDPVGLMSRVAQPASKKIDQNKLKPEMDEKGNLTTAGFACSQCGQPLFVYKLEQVSEKGKAYTNYFGRCNVAEHEKLILLAQLKPEKDSDEAVTYSLGKFGQRALDFYSIHVTKESTHPVKPLAQIAGNRYASAPVGKALSDACMGTIASFLSKYQDIIIEHQKVVKGNQKRLESLRELAGKENLEYPSVTLPPQPHTKEGVDAYNEVIARVRMWVNLNLWQKLKLSRDDAKPLLRLKGFPSFPLVERQANEVDWWDMVCNVKKLINEKKEDGKVFWQNLAGYKRQEALRPYLSSEEDRKKGKKFARYQLGDLLLHLEKKHGEDWGKVYDEAWERIDKKVEGLSKHIKLEEERRSEDAQSKAALTDWLRAKASFVIEGLKEADKDEFCRCELKLQKWYGDLRGKPFAIEAENSILDISGFSKQYNCAFIWQKDGVKKLNLYLIINYFKGGKLRFKKIKPEAFEANRFYTVINKKSGEIVPMEVNFNFDDPNLIILPLAFGKRQGREFIWNDLLSLETGSLKLANGRVIEKTLYNRRTRQDEPALFVALTFERREVLDSSNIKPMNLIGVDRGENIPAVIALTDPEGCPLSRFKDSLGNPTHILRIGESYKEKQRTIQAKKEVEQRRAGGYSRKYASKAKNLADDMVRNTARDLLYYAVTQDAMLIFENLSRGFGRQGKRTFMAERQYTRMEDWLTAKLAYEGPLPSKTYLSKTLAQYTSKTCSNCGFTITSADYDRVLEKLKKTATGWMTTINGKELKVEGQITYYNRYKRQNVVKDLSVELDRLSEESVNNDISSWTKGRSGEALSLLKKRFSHRPVQEKFVCLNCGFETHADEQAALNIARSWLFLRSQEYKKYQTNKTTGNTDKRAFVETWQSFYRKKLKEVWKPAV

SEQ ID NO: 33388 - protein, 979 aa, synthetic construct
  REGION 1..979: note = engineered CasX variant
QEIKRINGIRRRLVKDSNTKKAGKTGPMKTLLVRVMTPDLRERLENLRKKPENIPQPISNTSRANLNKLLTDYTEMKKAILHVYWEEFQKDPVGLMSRVAQPASKKIDQNKLKPEMDEKGNLTTAGFACSQCGQPLFVYKLEQVSEKGKAYTNYFGRCNVAEHEKLILLAQLKPEKDSDEAVTYSLGKFGQRALDFYSIHVTKESTHPVKPLAQIAGNRYASVPVGKALSDACMGTIASFLSKYQDIIIEHQKVVKGNQKRLESLRELAGKENLEYPSVTLPPQPHTKEGVDAYNEVIARVRMWVNLNLWQKLKLSRDDAKPLLRLKGFPSFPLVERQANEVDWWDMVCNVKKLINEKKEDGKVFWQNLAGYKRQEALRPYLSSEEDRKKGKKFARYQLGDLLLHLEKKHGEDWGKVYDEAWERIDKKVEGLSKHIKLEEERRSEDAQSKAALTDWLRAKASFVIEGLKEADKDEFCRCELKLQKWYGDLRGKPFAIEAENSILDISGFSKQYNCAFIWQKDGVKKLNLYLIINYFKGGKLRFKKIKPEAFEANRFYTVINKKSGEIVPMEVNFNFDDPNLIILPLAFGKRQGREFIWNDLLSLETGSLKLANGRVIEKTLYNRRTRQDEPALFVALTFERREVLDSSNIKPMNLIGVDRGENIPAVIALTDPEGCPLSRFKDSLGNPTHILRIGESYKEKQRTIQAKKEVEQRRAGGYSRKYASKAKNLADDMVRNTARDLLYYAVTQDAMLIFENLSRGFGRQGKRTFMAERQYTRMEDWLTAKLAYEGPLPSKTYLSKTLAQYTSKTCSNCGFTITSADYDRVLEKLKKTATGWMTTINGKELKVEGQITYYNRYKRQNVVKDLSVELDRLSEESVNNDISSWTKGRSGEALSLLKKRFSHRPVQEKFVCLNCGFETHADEQAALNIARSWLFLRSQEYKKYQTNKTTGNTDKRAFVETWQSFYRKKLKEVWKPAV

SEQ ID NO: 33389 - protein, 979 aa, synthetic construct
  REGION 1..979: note = engineered CasX variant
QEIKRINGIRRRLVKDSNTKKAGKTGPMKTLLVRVMTPDLRERLENLRKKPENIPQPISNTSRANLNKLLTDYTEMKKAILHVYWEEFQKDPVGLMSRVAQPASKKIDQNKLKPEMDEKGNLTTAGFACSQCGQPLFVYKLEQVSEKGKAYTNYFGRCNVAEHEKLIKLAQLKPEKDSDEAVTYSLGKFGQRALDFYSIHVTKESTHPVKPLAQIAGNRYASGPVGKALSDACMGTIASFLSKYQDIIIEHQKVVKGNQKRLESLRELAGKENLEYPSVTLPPQPHTKEGVDAYNEVIARVRMWVNLNLWQKLKLSRDDAKPLLRLKGFPSFPLVERQANEVDWWDMVCNVKKLINEKKEDGKVFWQNLAGYKRQEALRPYLSSEEDRKKGKKFARYQLGDLLLHLEKKHGEDWGKVYDEAWERIDKKVEGLSKHIKLEEERRSEDAQSKAALTDWLRAKASFVIEGLKEADKDEFCRCELKLQKWYGDLRGKPFAIEAENSILDISGFSKQYNCAFIWQKDGVKKLNLYLIINYFKGGKLRFKKIKPEAFEANRFYTVINKKSGEIVPMEVNFNFDDPNLIILPLAFGKRQGREFIWNDLLSLETGSLKLANGRVIEKTLYNRRTRQDEPALFVALTFERREVLDSSNIKPMNLIGVDRGENIPAVIALTDPEGCPLSRFKDSLGNPTHILRIGESYKEKQRTIQAKKEVEQRRAGGYSRKYASKAKNLADDMVRNTARDLLYYAVTQDAMLIFENLSRGFGRQGKRTFMAERQYTRMEDWLTAKLAYEGPLPSKTYLSKTLAQYTSKTCSNCGFTITSADYDRVLEKLKKTATGWMTTINGKELKVEGQITYYNRYKRQNVVKDLSVELDRLSEESVNNDISSWTKGRSGEALSLLKKRFSHRPVQEKFVCLNCGFETHADEQAALNIARSWLFLRSQEYKKYQTNKTTGNTDKRAFVETWQSFYRKKLKEVWKPAV

SEQ ID NO: 33390 - protein, 978 aa, synthetic construct
  REGION 1..978: note = engineered CasX variant
QEIKRINGIRRRLVKDSNTKKAGKTGPMKTLLVRVMTPDLRERLENLRKKPENIPQPISNTSRANLNKLLTDYTEMKKAILHVYWEEFQKDPVGLMSRVAQPASKKIDQNKLKPEMDEKGNLTTAGFACSQCGQPLFVYKLEQVSEKGKAYTNYFGRCNVAEHEKLILLAQLKPEKDSDEAVTYSLGKFGQRALDFYSIHVTKESTHPVKPLAQIAGNRYASPVGKALSDACMGTIASFLSKYQDIIIEHQKVVKGNQKRLESLRELAGKENLEYPSVTLPPQPHTKEGVDAYNEVIARVRMWVNLNLWQKLKLSRDDAKPLLRLKGFPSFPLVERQANEVDWWDMVCNVKKLINEKKEDGKVFWQNLAGYKRQEALRPYLSSEEDRKKGKKFARYQLGDLLLHLEKKHGEDWGKVYDEAWERIDKKVEGLSKHIKLEEERRSEDAQSKAALTDWLRAKASFVIEGLKEADKDEFCRCELKLQKWYGDLRGKPFAIEAENSILDISGFSKQYNCAFIWQKDGVKKLNLYLIINYFKGGKLRFKKIKPEAFEANRFYTVINKKSGEIVPMEVNFNFDDPNLIILPLAFGKRQGREFIWNDLLSLETGSLKLANGRVIEKTLYNRRTRQDEPALFVALTFERREVLDSSNIKPMNLIGVDRGENIPAVIALTDPEGCPLSRFKDSLGNPTHILRIGESYKEKQRTIQAKKEVEQRRAGGYSRKYASKAKNLADDMVRNTARDLLYYAVTQDAMLIFENLSRGFGRQGKRTFMAERQYTRMEDWLTAKLAYEGPLPSKTYLSKTLAQYTSKTCSNCGFTITSADYDRVLEKLKKTATGWMTTINGKELKVEGQITYYNRYKRQNVVKDLSVELDRLSEESVNNDISSWTKGRSGEALSLLKKRFSHRPVQEKFVCLNCGFETHADEQAALNIARSWLFLRSQEYKKYQTNKTTGNTDKRAFVETWQSFYRKKLKEVWKPAV

SEQ ID NO: 33391 - protein, 979 aa, synthetic construct
  REGION 1..979: note = engineered CasX variant
QEIKRINGIRRRLVKDSNTKKAGKTGPMKTLLVRVMTPDLRERLENLRKKPENIPQPISNTSRANLNKLLTDYTEMKKAILHVYWEEFQKDPVGLMSRVAQPASKKIDQNKLKPEMDEKGNLTTAGFACSQCGQPLFVYKLEQVSEKGKAYTNYFGRCNVAEHEKLILLAQLKPEKDSDEAVTYSLGKFGQRALDFYSIHVTKESTHPVKPLAQIAGNRYASYPVGKALSDACMGTIASFLSKYQDIIIEHQKVVKGNQKRLESLRELAGKENLEYPSVTLPPQPHTKEGVDAYNEVIARVRMWVNLNLWQKLKLSRDDAKPLLRLKGFPSFPLVERQANEVDWWDMVCNVKKLINEKKEDGKVFWQNLAGYKRQEALRPYLSSEEDVRKKGKKFARYQLGDLLLHLEKKHGEDWGKVYDEAWERIDKKVEGLSKHIKLEEERRSEDAQSKAALTDWLRAKASFVIEGLKEADKDEFCRCELKLQKWYGDLRGKPFAIEAENSILDISGFSKQYNCAFIWQKDGVKKLNLYLIINYFKGGKLRFKKIKPEAFEANRFYTVINKKSGEIVPMEVNFNFDDPNLIILPLAFGKRQGREFIWNDLLSLETGSLKLANGRVIEKTLYNRRTRQDEPALFVALTFERREVLDSSNIKPMNLIGVDRGENIPAVIALTDPEGCPLSRFKDSLGNPTHILRIGESYKEKQRTIQAKKEVEQRRAGGYSRKYASKAKNLADDMVRNTARDLLYYAVTQDAMLIFENLSRGFGRQGKRTFMAERQYTRMEDWLTAKLAYEGLPSKTYLSKTLAQYTSKTCSNCGFTITSADYDRVLEKLKKTATGWMTTINGKELKVEGQITYYNRYKRQNVVKDLSVELDRLSEESVNNDISSWTKGRSGEALSLLKKRFSHRPVQEKFVCLNCGFETHADEQAALNIARSWLFLRSQEYKKYQTNKTTGNTDKRAFVETWQSFYRKKLKEVWKPAV

SEQ ID NO: 33392 - protein, 979 aa, synthetic construct
  REGION 1..979: note = engineered CasX variant
QEIKRINGIRRRLVKDSNTKKAGKTGPMKTLLVRVMTPDLRERLENLRKKPENIPQPISNTSRANLNKLLTDYTEMKKAILHVYWEEFQKDPVGLMSRVAQPASKKIDQNKLKPEMDEKGNLTTAGFACSQCGQPLFVYKLEQVSEKGKAYTNYFGRCNVAEHEKLILLAQLKPEKDSDEAVTYSLGKFGQRALDFYSIHVTKESTHPVKPLAQIAGNRYASHPVGKALSDACMGTIASFLSKYQDIIIEHQKVVKGNQKRLESLRELAGKENLEYPSVTLPPQPHTKEGVDAYNEVIARVRMWVNLNLWQKLKLSRDDAKPLLRLKGFPSFPLVERQANEVDWWDMVCNVKKLINEKKEDGKVFWQNLAGYKRQEALRPYLSSEEDVRKKGKKFARYQLGDLLLHLEKKHGEDWGKVYDEAWERIDKKVEGLSKHIKLEEERRSEDAQSKAALTDWLRAKASFVIEGLKEADKDEFCRCELKLQKWYGDLRGKPFAIEAENSILDISGFSKQYNCAFIWQKDGVKKLNLYLIINYFKGGKLRFKKIKPEAFEANRFYTVINKKSGEIVPMEVNFNFDDPNLIILPLAFGKRQGREFIWNDLLSLETGSLKLANGRVIEKTLYNRRTRQDEPALFVALTFERREVLDSSNIKPMNLIGVDRGENIPAVIALTDPEGCPLSRFKDSLGNPTHILRIGESYKEKQRTIQAKKEVEQRRAGGYSRKYASKAKNLADDMVRNTARDLLYYAVTQDAMLIFENLSRGFGRQGKRTFMAERQYTRMEDWLTAKLAYEGLPSKTYLSKTLAQYTSKTCSNCGFTITSADYDRVLEKLKKTATGWMTTINGKELKVEGQITYYNRYKRQNVVKDLSVELDRLSEESVNNDISSWTKGRSGEALSLLKKRFSHRPVQEKFVCLNCGFETHADEQAALNIARSWLFLRSQEYKKYQTNKTTGNTDKRAFVETWQSFYRKKLKEVWKPAV

SEQ ID NO: 33393 - protein, 979 aa, synthetic construct
  REGION 1..979: note = engineered CasX variant
QEIKRINGIRRRLVKDSNTKKAGKTGPMKTLLVRVMTPDLRERLENLRKKPENIPQPISNTSRANLNKLLTDYTEMKKAILHVYWEEFQKDPVGLMSRVAQPASKKIDQNKLKPEMDEKGNLTTAGFACSQCGQPLFVYKLEQVSEKGKAYTNYFGRCNVAEHEKLILLAQLKPEKDSDEAVTYSLGKFGQRALDFYSIHVTKESTHPVKPLAQIAGNRYASSPVGKALSDACMGTIASFLSKYQDIIIEHQKVVKGNQKRLESLRELAGKENLEYPSVTLPPQPHTKEGVDAYNEVIARVRMWVNLNLWQKLKLSRDDAKPLLRLKGFPSFPLVERQANEVDWWDMVCNVKKLINEKKEDGKVFWQNLAGYKRQEALRPYLSSEEDVRKKGKKFARYQLGDLLLHLEKKHGEDWGKVYDEAWERIDKKVEGLSKHIKLEEERRSEDAQSKAALTDWLRAKASFVIEGLKEADKDEFCRCELKLQKWYGDLRGKPFAIEAENSILDISGFSKQYNCAFIWQKDGVKKLNLYLIINYFKGGKLRFKKIKPEAFEANRFYTVINKKSGEIVPMEVNFNFDDPNLIILPLAFGKRQGREFIWNDLLSLETGSLKLANGRVIEKTLYNRRTRQDEPALFVALTFERREVLDSSNIKPMNLIGVDRGENIPAVIALTDPEGCPLSRFKDSLGNPTHILRIGESYKEKQRTIQAKKEVEQRRAGGYSRKYASKAKNLADDMVRNTARDLLYYAVTQDAMLIFENLSRGFGRQGKRTFMAERQYTRMEDWLTAKLAYEGLPSKTYLSKTLAQYTSKTCSNCGFTITSADYDRVLEKLKKTATGWMTTINGKELKVEGQITYYNRYKRQNVVKDLSVELDRLSEESVNNDISSWTKGRSGEALSLLKKRFSHRPVQEKFVCLNCGFETHADEQAALNIARSWLFLRSQEYKKYQTNKTTGNTDKRAFVETWQSFYRKKLKEVWKPAV

SEQ ID NO: 33394 - protein, 979 aa, synthetic construct
  REGION 1..979: note = engineered CasX variant
QEIKRINGIRRRLVKDSNTKKAGKTGPMKTLLVRVMTPDLRERLENLRKKPENIPQPISNTSRANLNKLLTDYTEMKKAILHVYWEEFQKDPVGLMSRVAQPASKKIDQNKLKPEMDEKGNLTTAGFACSQCGQPLFVYKLEQVSEKGKAYTNYFGRCNVAEHEKLILLAQLKPEKDSDEAVTYSLGKFGQRALDFYSIHVTKESTHPVKPLAQIAGNRYASTPVGKALSDACMGTIASFLSKYQDIIIEHQKVVKGNQKRLESLRELAGKENLEYPSVTLPPQPHTKEGVDAYNEVIARVRMWVNLNLWQKLKLSRDDAKPLLRLKGFPSFPLVERQANEVDWWDMVCNVKKLINEKKEDGKVFWQNLAGYKRQEALRPYLSSEEDVRKKGKKFARYQLGDLLLHLEKKHGEDWGKVYDEAWERIDKKVEGLSKHIKLEEERRSEDAQSKAALTDWLRAKASFVIEGLKEADKDEFCRCELKLQKWYGDLRGKPFAIEAENSILDISGFSKQYNCAFIWQKDGVKKLNLYLIINYFKGGKLRFKKIKPEAFEANRFYTVINKKSGEIVPMEVNFNFDDPNLIILPLAFGKRQGREFIWNDLLSLETGSLKLANGRVIEKTLYNRRTRQDEPALFVALTFERREVLDSSNIKPMNLIGVDRGENIPAVIALTDPEGCPLSRFKDSLGNPTHILRIGESYKEKQRTIQAKKEVEQRRAGGYSRKYASKAKNLADDMVRNTARDLLYYAVTQDAMLIFENLSRGFGRQGKRTFMAERQYTRMEDWLTAKLAYEGLPSKTYLSKTLAQYTSKTCSNCGFTITSADYDRVLEKLKKTATGWMTTINGKELKVEGQITYYNRYKRQNVVKDLSVELDRLSEESVNNDISSWTKGRSGEALSLLKKRFSHRPVQEKFVCLNCGFETHADEQAALNIARSWLFLRSQEYKKYQTNKTTGNTDKRAFVETWQSFYRKKLKEVWKPAV

SEQ ID NO: 33395 - protein, 979 aa, synthetic construct
  REGION 1..979: note = engineered CasX variant
QEIKRINGIRRRLVKDSNTKKAGKTGPMKTLLVRVMTPDLRERLENLRKKPENIPQPISNTSRANLNKLLTDYTEMKKAILHVYWEEFQKDPVGLMSRVAQPASKKIDQNKLKPEMDEKGNLTTAGFACSQCGQPLFVYKLEQVSEKGKAYTNYFGRCNVAEHEKLILLAQLKPEKDSDEAVTYSLGKFGQRALDFYSIHVTKESTHPVKPLAQIAGNRYASAPVGKALSDACMGTIASFLSKYQDIIIEHQKVVKGNQKRLESLRELAGKENLEYPSVTLPPQPHTKEGVDAYNEVIARVRMWVNLNLWQKLKLSRDDAKPLLRLKGFPSFPLVERQANEVDWWDMVCNVKKLINEKKEDGKVFWQNLAGYKRQEALRPYLSSEEDVRKKGKKFARYQLGDLLLHLEKKHGEDWGKVYDEAWERIDKKVEGLSKHIKLEEERRSEDAQSKAALTDWLRAKASFVIEGLKEADKDEFCRCELKLQKWYGDLRGKPFAIEAENSILDISGFSKQYNCAFIWQKDGVKKLNLYLIINYFKGGKLRFKKIKPEAFEANRFYTVINKKSGEIVPMEVNFNFDDPNLIILPLAFGKRQGREFIWNDLLSLETGSLKLANGRVIEKTLYNRRTRQDEPALFVALTFERREVLDSSNIKPMNLIGVDRGENIPAVIALTDPEGCPLSRFKDSLGNPTHILRIGESYKEKQRTIQAKKEVEQRRAGGYSRKYASKAKNLADDMVRNTARDLLYYAVTQDAMLIFENLSRGFGRQGKRTFMAERQYTRMEDWLTAKLAYEGLPSKTYLSKTLAQYTSKTCSNCGFTITSADYDRVLEKLKKTATGWMTTINGKELKVEGQITYYNRYKRQNVVKDLSVELDRLSEESVNNDISSWTKGRSGEALSLLKKRFSHRPVQEKFVCLNCGFETHADEQAALNIARSWLFLRSQEYKKYQTNKTTGNTDKRAFVETWQSFYRKKLKEVWKPAV

SEQ ID NO: 33396 - protein, 979 aa, synthetic construct
  REGION 1..979: note = engineered CasX variant
QEIKRINGIRRRLVKDSNTKKAGKTGPMKTLLVRVMTPDLRERLENLRKKPENIPQPISNTSRANLNKLLTDYTEMKKAILHVYWEEFQKDPVGLMSRVAQPASKKIDQNKLKPEMDEKGNLTTAGFACSQCGQPLFVYKLEQVSEKGKAYTNYFGRCNVAEHEKLILLAQLKPEKDSDEAVTYSLGKFGQRALDFYSIHVTKESTHPVKPLAQIAGNRYASVPVGKALSDACMGTIASFLSKYQDIIIEHQKVVKGNQKRLESLRELAGKENLEYPSVTLPPQPHTKEGVDAYNEVIARVRMWVNLNLWQKLKLSRDDAKPLLRLKGFPSFPLVERQANEVDWWDMVCNVKKLINEKKEDGKVFWQNLAGYKRQEALRPYLSSEEDVRKKGKKFARYQLGDLLLHLEKKHGEDWGKVYDEAWERIDKKVEGLSKHIKLEEERRSEDAQSKAALTDWLRAKASFVIEGLKEADKDEFCRCELKLQKWYGDLRGKPFAIEAENSILDISGFSKQYNCAFIWQKDGVKKLNLYLIINYFKGGKLRFKKIKPEAFEANRFYTVINKKSGEIVPMEVNFNFDDPNLIILPLAFGKRQGREFIWNDLLSLETGSLKLANGRVIEKTLYNRRTRQDEPALFVALTFERREVLDSSNIKPMNLIGVDRGENIPAVIALTDPEGCPLSRFKDSLGNPTHILRIGESYKEKQRTIQAKKEVEQRRAGGYSRKYASKAKNLADDMVRNTARDLLYYAVTQDAMLIFENLSRGFGRQGKRTFMAERQYTRMEDWLTAKLAYEGLPSKTYLSKTLAQYTSKTCSNCGFTITSADYDRVLEKLKKTATGWMTTINGKELKVEGQITYYNRYKRQNVVKDLSVELDRLSEESVNNDISSWTKGRSGEALSLLKKRFSHRPVQEKFVCLNCGFETHADEQAALNIARSWLFLRSQEYKKYQTNKTTGNTDKRAFVETWQSFYRKKLKEVWKPAV

SEQ ID NO: 33397 - protein, 979 aa, synthetic construct
  REGION 1..979: note = engineered CasX variant
QEIKRINGIRRRLVKDSNTKKAGKTGPMKTLLVRVMTPDLRERLENLRKKPENIPQPISNTSRANLNKLLTDYTEMKKAILHVYWEEFQKDPVGLMSRVAQPASKKIDQNKLKPEMDEKGNLTTAGFACSQCGQPLFVYKLEQVSEKGKAYTNYFGRCNVAEHEKLIKLAQLKPEKDSDEAVTYSLGKFGQRALDFYSIHVTKESTHPVKPLAQIAGNRYASGPVGKALSDACMGTIASFLSKYQDIIIEHQKVVKGNQKRLESLRELAGKENLEYPSVTLPPQPHTKEGVDAYNEVIARVRMWVNLNLWQKLKLSRDDAKPLLRLKGFPSFPLVERQANEVDWWDMVCNVKKLINEKKEDGKVFWQNLAGYKRQEALRPYLSSEEDVRKKGKKFARYQLGDLLLHLEKKHGEDWGKVYDEAWERIDKKVEGLSKHIKLEEERRSEDAQSKAALTDWLRAKASFVIEGLKEADKDEFCRCELKLQKWYGDLRGKPFAIEAENSILDISGFSKQYNCAFIWQKDGVKKLNLYLIINYFKGGKLRFKKIKPEAFEANRFYTVINKKSGEIVPMEVNFNFDDPNLIILPLAFGKRQGREFIWNDLLSLETGSLKLANGRVIEKTLYNRRTRQDEPALFVALTFERREVLDSSNIKPMNLIGVDRGENIPAVIALTDPEGCPLSRFKDSLGNPTHILRIGESYKEKQRTIQAKKEVEQRRAGGYSRKYASKAKNLADDMVRNTARDLLYYAVTQDAMLIFENLSRGFGRQGKRTFMAERQYTRMEDWLTAKLAYEGLPSKTYLSKTLAQYTSKTCSNCGFTITSADYDRVLEKLKKTATGWMTTINGKELKVEGQITYYNRYKRQNVVKDLSVELDRLSEESVNNDISSWTKGRSGEALSLLKKRFSHRPVQEKFVCLNCGFETHADEQAALNIARSWLFLRSQEYKKYQTNKTTGNTDKRAFVETWQSFYRKKLKEVWKPAV

SEQ ID NO: 33398 - protein, 978 aa, synthetic construct
  REGION 1..978: note = engineered CasX variant
QEIKRINGIRRRLVKDSNTKKAGKTGPMKTLLVRVMTPDLRERLENLRKKPENIPQPISNTSRANLNKLLTDYTEMKKAILHVYWEEFQKDPVGLMSRVAQPASKKIDQNKLKPEMDEKGNLTTAGFACSQCGQPLFVYKLEQVSEKGKAYTNYFGRCNVAEHEKLILLAQLKPEKDSDEAVTYSLGKFGQRALDFYSIHVTKESTHPVKPLAQIAGNRYASPVGKALSDACMGTIASFLSKYQDIIIEHQKVVKGNQKRLESLRELAGKENLEYPSVTLPPQPHTKEGVDAYNEVIARVRMWVNLNLWQKLKLSRDDAKPLLRLKGFPSFPLVERQANEVDWWDMVCNVKKLINEKKEDGKVFWQNLAGYKRQEALRPYLSSEEDVRKKGKKFARYQLGDLLLHLEKKHGEDWGKVYDEAWERIDKKVEGLSKHIKLEEERRSEDAQSKAALTDWLRAKASFVIEGLKEADKDEFCRCELKLQKWYGDLRGKPFAIEAENSILDISGFSKQYNCAFIWQKDGVKKLNLYLIINYFKGGKLRFKKIKPEAFEANRFYTVINKKSGEIVPMEVNFNFDDPNLIILPLAFGKRQGREFIWNDLLSLETGSLKLANGRVIEKTLYNRRTRQDEPALFVALTFERREVLDSSNIKPMNLIGVDRGENIPAVIALTDPEGCPLSRFKDSLGNPTHILRIGESYKEKQRTIQAKKEVEQRRAGGYSRKYASKAKNLADDMVRNTARDLLYYAVTQDAMLIFENLSRGFGRQGKRTFMAERQYTRMEDWLTAKLAYEGLPSKTYLSKTLAQYTSKTCSNCGFTITSADYDRVLEKLKKTATGWMTTINGKELKVEGQITYYNRYKRQNVVKDLSVELDRLSEESVNNDISSWTKGRSGEALSLLKKRFSHRPVQEKFVCLNCGFETHADEQAALNIARSWLFLRSQEYKKYQTNKTTGNTDKRAFVETWQSFYRKKLKEVWKPAV

SEQ ID NO: 33399 - protein, 978 aa, synthetic construct
  REGION 1..978: note = engineered CasX variant
QEIKRINGIRRRLVKDSNTKKAGKTGPMKTLLVRVMTPDLRERLENLRKKPENIPQPISNTSRANLNKLLTDYTEMKKAILHVYWEEFQKDPVGLMSRVAQPASKKIDQNKLKPEMDEKGNLTTAGFACSQCGQPLFVYKLEQVSEKGKAYTNYFGRCNVAEHEKLILLAQLKPEKDSDEAVTYSLGKFGQRALDFYSIHVTKESTHPVKPLAQIAGNRYASYPVGKALSDACMGTIASFLSKYQDIIIEHQKVVKGNQKRLESLRELAGKENLEYPSVTLPPQPHTKEGVDAYNEVIARVRMWVNLNLWQKLKLSRDDAKPLLRLKGFPSFPLVERQANEVDWWDMVCNVKKLINEKKEDGKVFWQNLAGYKRQEALRPYLSSEEDRKKGKKFARYQLGDLLLHLEKKHGEDWGKVYDEAWERIDKKVEGLSKHIKLEEERRSEDAQSKAALTDWLRAKASFVIEGLKEADKDEFCRCELKLQKWYGDLRGKPFAIEAENSILDISGFSKQYNCAFIWQKDGVKKLNLYLIINYFKGGKLRFKKIKPEAFEANRFYTVINKKSGEIVPMEVNFNFDDPNLIILPLAFGKRQGREFIWNDLLSLETGSLKLANGRVIEKTLYNRRTRQDEPALFVALTFERREVLDSSNIKPMNLIGVDRGENIPAVIALTDPEGCPLSRFKDSLGNPTHILRIGESYKEKQRTIQAKKEVEQRRAGGYSRKYASKAKNLADDMVRNTARDLLYYAVTQDAMLIFENLSRGFGRQGKRTFMAERQYTRMEDWLTAKLAYEGLPSKTYLSKTLAQYTSKTCSNCGFTITSADYDRMLEKLKKTATGWMTTINGKELKVEGQITYYNRYKRQNVVKDLSVELDRLSEESVNNDISSWTKGRSGEALSLLKKRFSHRPVQEKFVCLNCGFETHADEQAALNIARSWLFLRSQEYKKYQTNKTTGNTDKRAFVETWQSFYRKKLKEVWKPAV

SEQ ID NO: 33400 - protein, 978 aa, synthetic construct
  REGION 1..978: note = engineered CasX variant
QEIKRINGIRRRLVKDSNTKKAGKTGPMKTLLVRVMTPDLRERLENLRKKPENIPQPISNTSRANLNKLLTDYTEMKKAILHVYWEEFQKDPVGLMSRVAQPASKKIDQNKLKPEMDEKGNLTTAGFACSQCGQPLFVYKLEQVSEKGKAYTNYFGRCNVAEHEKLILLAQLKPEKDSDEAVTYSLGKFGQRALDFYSIHVTKESTHPVKPLAQIAGNRYASHPVGKALSDACMGTIASFLSKYQDIIIEHQKVVKGNQKRLESLRELAGKENLEYPSVTLPPQPHTKEGVDAYNEVIARVRMWVNLNLWQKLKLSRDDAKPLLRLKGFPSFPLVERQANEVDWWDMVCNVKKLINEKKEDGKVFWQNLAGYKRQEALRPYLSSEEDRKKGKKFARYQLGDLLLHLEKKHGEDWGKVYDEAWERIDKKVEGLSKHIKLEEERRSEDAQSKAALTDWLRAKASFVIEGLKEADKDEFCRCELKLQKWYGDLRGKPFAIEAENSILDISGFSKQYNCAFIWQKDGVKKLNLYLIINYFKGGKLRFKKIKPEAFEANRFYTVINKKSGEIVPMEVNFNFDDPNLIILPLAFGKRQGREFIWNDLLSLETGSLKLANGRVIEKTLYNRRTRQDEPALFVALTFERREVLDSSNIKPMNLIGVDRGENIPAVIALTDPEGCPLSRFKDSLGNPTHILRIGESYKEKQRTIQAKKEVEQRRAGGYSRKYASKAKNLADDMVRNTARDLLYYAVTQDAMLIFENLSRGFGRQGKRTFMAERQYTRMEDWLTAKLAYEGLPSKTYLSKTLAQYTSKTCSNCGFTITSADYDRMLEKLKKTATGWMTTINGKELKVEGQITYYNRYKRQNVVKDLSVELDRLSEESVNNDISSWTKGRSGEALSLLKKRFSHRPVQEKFVCLNCGFETHADEQAALNIARSWLFLRSQEYKKYQTNKTTGNTDKRAFVETWQSFYRKKLKEVWKPAV

SEQ ID NO: 33401 - protein, 978 aa, synthetic construct
  REGION 1..978: note = engineered CasX variant
QEIKRINGIRRRLVKDSNTKKAGKTGPMKTLLVRVMTPDLRERLENLRKKPENIPQPISNTSRANLNKLLTDYTEMKKAILHVYWEEFQKDPVGLMSRVAQPASKKIDQNKLKPEMDEKGNLTTAGFACSQCGQPLFVYKLEQVSEKGKAYTNYFGRCNVAEHEKLILLAQLKPEKDSDEAVTYSLGKFGQRALDFYSIHVTKESTHPVKPLAQIAGNRYASSPVGKALSDACMGTIASFLSKYQDIIIEHQKVVKGNQKRLESLRELAGKENLEYPSVTLPPQPHTKEGVDAYNEVIARVRMWVNLNLWQKLKLSRDDAKPLLRLKGFPSFPLVERQANEVDWWDMVCNVKKLINEKKEDGKVFWQNLAGYKRQEALRPYLSSEEDRKKGKKFARYQLGDLLLHLEKKHGEDWGKVYDEAWERIDKKVEGLSKHIKLEEERRSEDAQSKAALTDWLRAKASFVIEGLKEADKDEFCRCELKLQKWYGDLRGKPFAIEAENSILDISGFSKQYNCAFIWQKDGVKKLNLYLIINYFKGGKLRFKKIKPEAFEANRFYTVINKKSGEIVPMEVNFNFDDPNLIILPLAFGKRQGREFIWNDLLSLETGSLKLANGRVIEKTLYNRRTRQDEPALFVALTFERREVLDSSNIKPMNLIGVDRGENIPAVIALTDPEGCPLSRFKDSLGNPTHILRIGESYKEKQRTIQAKKEVEQRRAGGYSRKYASKAKNLADDMVRNTARDLLYYAVTQDAMLIFENLSRGFGRQGKRTFMAERQYTRMEDWLTAKLAYEGLPSKTYLSKTLAQYTSKTCSNCGFTITSADYDRMLEKLKKTATGWMTTINGKELKVEGQITYYNRYKRQNVVKDLSVELDRLSEESVNNDISSWTKGRSGEALSLLKKRFSHRPVQEKFVCLNCGFETHADEQAALNIARSWLFLRSQEYKKYQTNKTTGNTDKRAFVETWQSFYRKKLKEVWKPAV

SEQ ID NO: 33402 - protein, 978 aa, synthetic construct
  REGION 1..978: note = engineered CasX variant
QEIKRINGIRRRLVKDSNTKKAGKTGPMKTLLVRVMTPDLRERLENLRKKPENIPQPISNTSRANLNKLLTDYTEMKKAILHVYWEEFQKDPVGLMSRVAQPASKKIDQNKLKPEMDEKGNLTTAGFACSQCGQPLFVYKLEQVSEKGKAYTNYFGRCNVAEHEKLILLAQLKPEKDSDEAVTYSLGKFGQRALDFYSIHVTKESTHPVKPLAQIAGNRYASTPVGKALSDACMGTIASFLSKYQDIIIEHQKVVKGNQKRLESLRELAGKENLEYPSVTLPPQPHTKEGVDAYNEVIARVRMWVNLNLWQKLKLSRDDAKPLLRLKGFPSFPLVERQANEVDWWDMVCNVKKLINEKKEDGKVFWQNLAGYKRQEALRPYLSSEEDRKKGKKFARYQLGDLLLHLEKKHGEDWGKVYDEAWERIDKKVEGLSKHIKLEEERRSEDAQSKAALTDWLRAKASFVIEGLKEADKDEFCRCELKLQKWYGDLRGKPFAIEAENSILDISGFSKQYNCAFIWQKDGVKKLNLYLIINYFKGGKLRFKKIKPEAFEANRFYTVINKKSGEIVPMEVNFNFDDPNLIILPLAFGKRQGREFIWNDLLSLETGSLKLANGRVIEKTLYNRRTRQDEPALFVALTFERREVLDSSNIKPMNLIGVDRGENIPAVIALTDPEGCPLSRFKDSLGNPTHILRIGESYKEKQRTIQAKKEVEQRRAGGYSRKYASKAKNLADDMVRNTARDLLYYAVTQDAMLIFENLSRGFGRQGKRTFMAERQYTRMEDWLTAKLAYEGLPSKTYLSKTLAQYTSKTCSNCGFTITSADYDRMLEKLKKTATGWMTTINGKELKVEGQITYYNRYKRQNVVKDLSVELDRLSEESVNNDISSWTKGRSGEALSLLKKRFSHRPVQEKFVCLNCGFETHADEQAALNIARSWLFLRSQEYKKYQTNKTTGNTDKRAFVETWQSFYRKKLKEVWKPAV

SEQ ID NO: 33403 - protein, 978 aa, synthetic construct
  REGION 1..978: note = engineered CasX variant
QEIKRINGIRRRLVKDSNTKKAGKTGPMKTLLVRVMTPDLRERLENLRKKPENIPQPISNTSRANLNKLLTDYTEMKKAILHVYWEEFQKDPVGLMSRVAQPASKKIDQNKLKPEMDEKGNLTTAGFACSQCGQPLFVYKLEQVSEKGKAYTNYFGRCNVAEHEKLILLAQLKPEKDSDEAVTYSLGKFGQRALDFYSIHVTKESTHPVKPLAQIAGNRYASAPVGKALSDACMGTIASFLSKYQDIIIEHQKVVKGNQKRLESLRELAGKENLEYPSVTLPPQPHTKEGVDAYNEVIARVRMWVNLNLWQKLKLSRDDAKPLLRLKGFPSFPLVERQANEVDWWDMVCNVKKLINEKKEDGKVFWQNLAGYKRQEALRPYLSSEEDRKKGKKFARYQLGDLLLHLEKKHGEDWGKVYDEAWERIDKKVEGLSKHIKLEEERRSEDAQSKAALTDWLRAKASFVIEGLKEADKDEFCRCELKLQKWYGDLRGKPFAIEAENSILDISGFSKQYNCAFIWQKDGVKKLNLYLIINYFKGGKLRFKKIKPEAFEANRFYTVINKKSGEIVPMEVNFNFDDPNLIILPLAFGKRQGREFIWNDLLSLETGSLKLANGRVIEKTLYNRRTRQDEPALFVALTFERREVLDSSNIKPMNLIGVDRGENIPAVIALTDPEGCPLSRFKDSLGNPTHILRIGESYKEKQRTIQAKKEVEQRRAGGYSRKYASKAKNLADDMVRNTARDLLYYAVTQDAMLIFENLSRGFGRQGKRTFMAERQYTRMEDWLTAKLAYEGLPSKTYLSKTLAQYTSKTCSNCGFTITSADYDRMLEKLKKTATGWMTTINGKELKVEGQITYYNRYKRQNVVKDLSVELDRLSEESVNNDISSWTKGRSGEALSLLKKRFSHRPVQEKFVCLNCGFETHADEQAALNIARSWLFLRSQEYKKYQTNKTTGNTDKRAFVETWQSFYRKKLKEVWKPAV

SEQ ID NO: 33404 - protein, 978 aa, synthetic construct
  REGION 1..978: note = engineered CasX variant
QEIKRINGIRRRLVKDSNTKKAGKTGPMKTLLVRVMTPDLRERLENLRKKPENIPQPISNTSRANLNKLLTDYTEMKKAILHVYWEEFQKDPVGLMSRVAQPASKKIDQNKLKPEMDEKGNLTTAGFACSQCGQPLFVYKLEQVSEKGKAYTNYFGRCNVAEHEKLILLAQLKPEKDSDEAVTYSLGKFGQRALDFYSIHVTKESTHPVKPLAQIAGNRYASVPVGKALSDACMGTIASFLSKYQDIIIEHQKVVKGNQKRLESLRELAGKENLEYPSVTLPPQPHTKEGVDAYNEVIARVRMWVNLNLWQKLKLSRDDAKPLLRLKGFPSFPLVERQANEVDWWDMVCNVKKLINEKKEDGKVFWQNLAGYKRQEALRPYLSSEEDRKKGKKFARYQLGDLLLHLEKKHGEDWGKVYDEAWERIDKKVEGLSKHIKLEEERRSEDAQSKAALTDWLRAKASFVIEGLKEADKDEFCRCELKLQKWYGDLRGKPFAIEAENSILDISGFSKQYNCAFIWQKDGVKKLNLYLIINYFKGGKLRFKKIKPEAFEANRFYTVINKKSGEIVPMEVNFNFDDPNLIILPLAFGKRQGREFIWNDLLSLETGSLKLANGRVIEKTLYNRRTRQDEPALFVALTFERREVLDSSNIKPMNLIGVDRGENIPAVIALTDPEGCPLSRFKDSLGNPTHILRIGESYKEKQRTIQAKKEVEQRRAGGYSRKYASKAKNLADDMVRNTARDLLYYAVTQDAMLIFENLSRGFGRQGKRTFMAERQYTRMEDWLTAKLAYEGLPSKTYLSKTLAQYTSKTCSNCGFTITSADYDRMLEKLKKTATGWMTTINGKELKVEGQITYYNRYKRQNVVKDLSVELDRLSEESVNNDISSWTKGRSGEALSLLKKRFSHRPVQEKFVCLNCGFETHADEQAALNIARSWLFLRSQEYKKYQTNKTTGNTDKRAFVETWQSFYRKKLKEVWKPAV

SEQ ID NO: 33405 - protein, 978 aa, synthetic construct
  REGION 1..978: note = engineered CasX variant
QEIKRINGIRRRLVKDSNTKKAGKTGPMKTLLVRVMTPDLRERLENLRKKPENIPQPISNTSRANLNKLLTDYTEMKKAILHVYWEEFQKDPVGLMSRVAQPASKKIDQNKLKPEMDEKGNLTTAGFACSQCGQPLFVYKLEQVSEKGKAYTNYFGRCNVAEHEKLIKLAQLKPEKDSDEAVTYSLGKFGQRALDFYSIHVTKESTHPVKPLAQIAGNRYASGPVGKALSDACMGTIASFLSKYQDIIIEHQKVVKGNQKRLESLRELAGKENLEYPSVTLPPQPHTKEGVDAYNEVIARVRMWVNLNLWQKLKLSRDDAKPLLRLKGFPSFPLVERQANEVDWWDMVCNVKKLINEKKEDGKVFWQNLAGYKRQEALRPYLSSEEDRKKGKKFARYQLGDLLLHLEKKHGEDWGKVYDEAWERIDKKVEGLSKHIKLEEERRSEDAQSKAALTDWLRAKASFVIEGLKEADKDEFCRCELKLQKWYGDLRGKPFAIEAENSILDISGFSKQYNCAFIWQKDGVKKLNLYLIINYFKGGKLRFKKIKPEAFEANRFYTVINKKSGEIVPMEVNFNFDDPNLIILPLAFGKRQGREFIWNDLLSLETGSLKLANGRVIEKTLYNRRTRQDEPALFVALTFERREVLDSSNIKPMNLIGVDRGENIPAVIALTDPEGCPLSRFKDSLGNPTHILRIGESYKEKQRTIQAKKEVEQRRAGGYSRKYASKAKNLADDMVRNTARDLLYYAVTQDAMLIFENLSRGFGRQGKRTFMAERQYTRMEDWLTAKLAYEGLPSKTYLSKTLAQYTSKTCSNCGFTITSADYDRMLEKLKKTATGWMTTINGKELKVEGQITYYNRYKRQNVVKDLSVELDRLSEESVNNDISSWTKGRSGEALSLLKKRFSHRPVQEKFVCLNCGFETHADEQAALNIARSWLFLRSQEYKKYQTNKTTGNTDKRAFVETWQSFYRKKLKEVWKPAV

SEQ ID NO: 33406 - protein, 977 aa, synthetic construct
  REGION 1..977: note = engineered CasX variant
QEIKRINGIRRRLVKDSNTKKAGKTGPMKTLLVRVMTPDLRERLENLRKKPENIPQPISNTSRANLNKLLTDYTEMKKAILHVYWEEFQKDPVGLMSRVAQPASKKIDQNKLKPEMDEKGNLTTAGFACSQCGQPLFVYKLEQVSEKGKAYTNYFGRCNVAEHEKLILLAQLKPEKDSDEAVTYSLGKFGQRALDFYSIHVTKESTHPVKPLAQIAGNRYASPVGKALSDACMGTIASFLSKYQDIIIEHQKVVKGNQKRLESLRELAGKENLEYPSVTLPPQPHTKEGVDAYNEVIARVRMWVNLNLWQKLKLSRDDAKPLLRLKGFPSFPLVERQANEVDWWDMVCNVKKLINEKKEDGKVFWQNLAGYKRQEALRPYLSSEEDRKKGKKFARYQLGDLLLHLEKKHGEDWGKVYDEAWERIDKKVEGLSKHIKLEEERRSEDAQSKAALTDWLRAKASFVIEGLKEADKDEFCRCELKLQKWYGDLRGKPFAIEAENSILDISGFSKQYNCAFIWQKDGVKKLNLYLIINYFKGGKLRFKKIKPEAFEANRFYTVINKKSGEIVPMEVNFNFDDPNLIILPLAFGKRQGREFIWNDLLSLETGSLKLANGRVIEKTLYNRRTRQDEPALFVALTFERREVLDSSNIKPMNLIGVDRGENIPAVIALTDPEGCPLSRFKDSLGNPTHILRIGESYKEKQRTIQAKKEVEQRRAGGYSRKYASKAKNLADDMVRNTARDLLYYAVTQDAMLIFENLSRGFGRQGKRTFMAERQYTRMEDWLTAKLAYEGLPSKTYLSKTLAQYTSKTCSNCGFTITSADYDRMLEKLKKTATGWMTTINGKELKVEGQITYYNRYKRQNVVKDLSVELDRLSEESVNNDISSWTKGRSGEALSLLKKRFSHRPVQEKFVCLNCGFETHADEQAALNIARSWLFLRSQEYKKYQTNKTTGNTDKRAFVETWQSFYRKKLKEVWKPAV

SEQ ID NO: 33407 - protein, 978 aa, synthetic construct
  REGION 1..978: note = engineered CasX variant
QEIKRINGIRRRLVKDSNTKKAGKTGPMKTLLVRVMTPDLRERLENLRKKPENIPQPISNTSRANLNKLLTDYTEMKKAILHVYWEEFQKDPVGLMSRVAQPASKKIDQNKLKPEMDEKGNLTTAGFACSQCGQPLFVYKLEQVSEKGKAYTNYFGRCNVAEHEKLILLAQLKPEKDSDEAVTYSLGKFGQRALDFYSIHVTKESTHPVKPLAQIAGNRYASYPVGKALSDACMGTIASFLSKYQDIIIEHQKVVKGNQKRLESLRELAGKENLEYPSVTLPPQPHTKEGVDAYNEVIARVRMWVNLNLWQKLKLSRDDAKPLLRLKGFPSFPLVERQANEVDWWDMVCNVKKLINEKKEDGKVFWQNLAGYKRQEALRPYLSSEEDRKKGKKFARYQLGDLLLHLEKKHGEDWGKVYDEAWERIDKKVEGLSKHIKLEEERRSEDAQSKAALTDWLRAKASFVIEGLKEADKDEFCRCELKLQKWYGDLRGKPFAIEAENSILDISGFSKQYNCAFIWQKDGVKKLNLYLIINYFKGGKLRFKKIKPEAFEANRFYTVINKKSGEIVPMEVNFNFDDPNLIILPLAFGKRQGREFIWNDLLSLETGSLKLANGRVIEKTLYNRRTRQDEPALFVALTFERREVLDSSNIKPMNLIGVDRGENIPAVIALTDPEGCPLSRFKDSLGNPTHILRIGESYKEKQRTIQAKKEVEQRRAGGYSRKYASKAKNLADDMVRNTARDLLYYAVTQDAMLIFENLSRGFGRQGKRTFMAERQYTRMEDWLTAKLAYEGLPSKTYLSKTLAQYTSKTCSNCGFTITSADYDRVLEKLKKTATGWMTTINGKELKVEGQITYYNRYKRQNVVKDLSVELDRLSEESVNNDISSWTKGRQGEALSLLKKRFSHRPVQEKFVCLNCGFETHADEQAALNIARSWLFLRSQEYKKYQTNKTTGNTDKRAFVETWQSFYRKKLKEVWKPAV

SEQ ID NO: 33408 - protein, 978 aa, synthetic construct
  REGION 1..978: note = engineered CasX variant
QEIKRINGIRRRLVKDSNTKKAGKTGPMKTLLVRVMTPDLRERLENLRKKPENIPQPISNTSRANLNKLLTDYTEMKKAILHVYWEEFQKDPVGLMSRVAQPASKKIDQNKLKPEMDEKGNLTTAGFACSQCGQPLFVYKLEQVSEKGKAYTNYFGRCNVAEHEKLILLAQLKPEKDSDEAVTYSLGKFGQRALDFYSIHVTKESTHPVKPLAQIAGNRYASHPVGKALSDACMGTIASFLSKYQDIIIEHQKVVKGNQKRLESLRELAGKENLEYPSVTLPPQPHTKEGVDAYNEVIARVRMWVNLNLWQKLKLSRDDAKPLLRLKGFPSFPLVERQANEVDWWDMVCNVKKLINEKKEDGKVFWQNLAGYKRQEALRPYLSSEEDRKKGKKFARYQLGDLLLHLEKKHGEDWGKVYDEAWERIDKKVEGLSKHIKLEEERRSEDAQSKAALTDWLRAKASFVIEGLKEADKDEFCRCELKLQKWYGDLRGKPFAIEAENSILDISGFSKQYNCAFIWQKDGVKKLNLYLIINYFKGGKLRFKKIKPEAFEANRFYTVINKKSGEIVPMEVNFNFDDPNLIILPLAFGKRQGREFIWNDLLSLETGSLKLANGRVIEKTLYNRRTRQDEPALFVALTFERREVLDSSNIKPMNLIGVDRGENIPAVIALTDPEGCPLSRFKDSLGNPTHILRIGESYKEKQRTIQAKKEVEQRRAGGYSRKYASKAKNLADDMVRNTARDLLYYAVTQDAMLIFENLSRGFGRQGKRTFMAERQYTRMEDWLTAKLAYEGLPSKTYLSKTLAQYTSKTCSNCGFTITSADYDRVLEKLKKTATGWMTTINGKELKVEGQITYYNRYKRQNVVKDLSVELDRLSEESVNNDISSWTKGRQGEALSLLKKRFSHRPVQEKFVCLNCGFETHADEQAALNIARSWLFLRSQEYKKYQTNKTTGNTDKRAFVETWQSFYRKKLKEVWKPAV

SEQ ID NO: 33409 - protein, 978 aa, synthetic construct
  REGION 1..978: note = engineered CasX variant
QEIKRINGIRRRLVKDSNTKKAGKTGPMKTLLVRVMTPDLRERLENLRKKPENIPQPISNTSRANLNKLLTDYTEMKKAILHVYWEEFQKDPVGLMSRVAQPASKKIDQNKLKPEMDEKGNLTTAGFACSQCGQPLFVYKLEQVSEKGKAYTNYFGRCNVAEHEKLILLAQLKPEKDSDEAVTYSLGKFGQRALDFYSIHVTKESTHPVKPLAQIAGNRYASSPVGKALSDACMGTIASFLSKYQDIIIEHQKVVKGNQKRLESLRELAGKENLEYPSVTLPPQPHTKEGVDAYNEVIARVRMWVNLNLWQKLKLSRDDAKPLLRLKGFPSFPLVERQANEVDWWDMVCNVKKLINEKKEDGKVFWQNLAGYKRQEALRPYLSSEEDRKKGKKFARYQLGDLLLHLEKKHGEDWGKVYDEAWERIDKKVEGLSKHIKLEEERRSEDAQSKAALTDWLRAKASFVIEGLKEADKDEFCRCELKLQKWYGDLRGKPFAIEAENSILDISGFSKQYNCAFIWQKDGVKKLNLYLIINYFKGGKLRFKKIKPEAFEANRFYTVINKKSGEIVPMEVNFNFDDPNLIILPLAFGKRQGREFIWNDLLSLETGSLKLANGRVIEKTLYNRRTRQDEPALFVALTFERREVLDSSNIKPMNLIGVDRGENIPAVIALTDPEGCPLSRFKDSLGNPTHILRIGESYKEKQRTIQAKKEVEQRRAGGYSRKYASKAKNLADDMVRNTARDLLYYAVTQDAMLIFENLSRGFGRQGKRTFMAERQYTRMEDWLTAKLAYEGLPSKTYLSKTLAQYTSKTCSNCGFTITSADYDRVLEKLKKTATGWMTTINGKELKVEGQITYYNRYKRQNVVKDLSVELDRLSEESVNNDISSWTKGRQGEALSLLKKRFSHRPVQEKFVCLNCGFETHADEQAALNIARSWLFLRSQEYKKYQTNKTTGNTDKRAFVETWQSFYRKKLKEVWKPAV

SEQ ID NO: 33410 - protein, 978 aa, synthetic construct
  REGION 1..978: note = engineered CasX variant
QEIKRINGIRRRLVKDSNTKKAGKTGPMKTLLVRVMTPDLRERLENLRKKPENIPQPISNTSRANLNKLLTDYTEMKKAILHVYWEEFQKDPVGLMSRVAQPASKKIDQNKLKPEMDEKGNLTTAGFACSQCGQPLFVYKLEQVSEKGKAYTNYFGRCNVAEHEKLILLAQLKPEKDSDEAVTYSLGKFGQRALDFYSIHVTKESTHPVKPLAQIAGNRYASTPVGKALSDACMGTIASFLSKYQDIIIEHQKVVKGNQKRLESLRELAGKENLEYPSVTLPPQPHTKEGVDAYNEVIARVRMWVNLNLWQKLKLSRDDAKPLLRLKGFPSFPLVERQANEVDWWDMVCNVKKLINEKKEDGKVFWQNLAGYKRQEALRPYLSSEEDRKKGKKFARYQLGDLLLHLEKKHGEDWGKVYDEAWERIDKKVEGLSKHIKLEEERRSEDAQSKAALTDWLRAKASFVIEGLKEADKDEFCRCELKLQKWYGDLRGKPFAIEAENSILDISGFSKQYNCAFIWQKDGVKKLNLYLIINYFKGGKLRFKKIKPEAFEANRFYTVINKKSGEIVPMEVNFNFDDPNLIILPLAFGKRQGREFIWNDLLSLETGSLKLANGRVIEKTLYNRRTRQDEPALFVALTFERREVLDSSNIKPMNLIGVDRGENIPAVIALTDPEGCPLSRFKDSLGNPTHILRIGESYKEKQRTIQAKKEVEQRRAGGYSRKYASKAKNLADDMVRNTARDLLYYAVTQDAMLIFENLSRGFGRQGKRTFMAERQYTRMEDWLTAKLAYEGLPSKTYLSKTLAQYTSKTCSNCGFTITSADYDRVLEKLKKTATGWMTTINGKELKVEGQITYYNRYKRQNVVKDLSVELDRLSEESVNNDISSWTKGRQGEALSLLKKRFSHRPVQEKFVCLNCGFETHADEQAALNIARSWLFLRSQEYKKYQTNKTTGNTDKRAFVETWQSFYRKKLKEVWKPAV

SEQ ID NO: 33411 - protein, 978 aa, synthetic construct
  REGION 1..978: note = engineered CasX variant
QEIKRINGIRRRLVKDSNTKKAGKTGPMKTLLVRVMTPDLRERLENLRKKPENIPQPISNTSRANLNKLLTDYTEMKKAILHVYWEEFQKDPVGLMSRVAQPASKKIDQNKLKPEMDEKGNLTTAGFACSQCGQPLFVYKLEQVSEKGKAYTNYFGRCNVAEHEKLILLAQLKPEKDSDEAVTYSLGKFGQRALDFYSIHVTKESTHPVKPLAQIAGNRYASAPVGKALSDACMGTIASFLSKYQDIIIEHQKVVKGNQKRLESLRELAGKENLEYPSVTLPPQPHTKEGVDAYNEVIARVRMWVNLNLWQKLKLSRDDAKPLLRLKGFPSFPLVERQANEVDWWDMVCNVKKLINEKKEDGKVFWQNLAGYKRQEALRPYLSSEEDRKKGKKFARYQLGDLLLHLEKKHGEDWGKVYDEAWERIDKKVEGLSKHIKLEEERRSEDAQSKAALTDWLRAKASFVIEGLKEADKDEFCRCELKLQKWYGDLRGKPFAIEAENSILDISGFSKQYNCAFIWQKDGVKKLNLYLIINYFKGGKLRFKKIKPEAFEANRFYTVINKKSGEIVPMEVNFNFDDPNLIILPLAFGKRQGREFIWNDLLSLETGSLKLANGRVIEKTLYNRRTRQDEPALFVALTFERREVLDSSNIKPMNLIGVDRGENIPAVIALTDPEGCPLSRFKDSLGNPTHILRIGESYKEKQRTIQAKKEVEQRRAGGYSRKYASKAKNLADDMVRNTARDLLYYAVTQDAMLIFENLSRGFGRQGKRTFMAERQYTRMEDWLTAKLAYEGLPSKTYLSKTLAQYTSKTCSNCGFTITSADYDRVLEKLKKTATGWMTTINGKELKVEGQITYYNRYKRQNVVKDLSVELDRLSEESVNNDISSWTKGRQGEALSLLKKRFSHRPVQEKFVCLNCGFETHADEQAALNIARSWLFLRSQEYKKYQTNKTTGNTDKRAFVETWQSFYRKKLKEVWKPAV

SEQ ID NO: 33412 - protein, 978 aa, synthetic construct
  REGION 1..978: note = engineered CasX variant
QEIKRINGIRRRLVKDSNTKKAGKTGPMKTLLVRVMTPDLRERLENLRKKPENIPQPISNTSRANLNKLLTDYTEMKKAILHVYWEEFQKDPVGLMSRVAQPASKKIDQNKLKPEMDEKGNLTTAGFACSQCGQPLFVYKLEQVSEKGKAYTNYFGRCNVAEHEKLILLAQLKPEKDSDEAVTYSLGKFGQRALDFYSIHVTKESTHPVKPLAQIAGNRYASVPVGKALSDACMGTIASFLSKYQDIIIEHQKVVKGNQKRLESLRELAGKENLEYPSVTLPPQPHTKEGVDAYNEVIARVRMWVNLNLWQKLKLSRDDAKPLLRLKGFPSFPLVERQANEVDWWDMVCNVKKLINEKKEDGKVFWQNLAGYKRQEALRPYLSSEEDRKKGKKFARYQLGDLLLHLEKKHGEDWGKVYDEAWERIDKKVEGLSKHIKLEEERRSEDAQSKAALTDWLRAKASFVIEGLKEADKDEFCRCELKLQKWYGDLRGKPFAIEAENSILDISGFSKQYNCAFIWQKDGVKKLNLYLIINYFKGGKLRFKKIKPEAFEANRFYTVINKKSGEIVPMEVNFNFDDPNLIILPLAFGKRQGREFIWNDLLSLETGSLKLANGRVIEKTLYNRRTRQDEPALFVALTFERREVLDSSNIKPMNLIGVDRGENIPAVIALTDPEGCPLSRFKDSLGNPTHILRIGESYKEKQRTIQAKKEVEQRRAGGYSRKYASKAKNLADDMVRNTARDLLYYAVTQDAMLIFENLSRGFGRQGKRTFMAERQYTRMEDWLTAKLAYEGLPSKTYLSKTLAQYTSKTCSNCGFTITSADYDRVLEKLKKTATGWMTTINGKELKVEGQITYYNRYKRQNVVKDLSVELDRLSEESVNNDISSWTKGRQGEALSLLKKRFSHRPVQEKFVCLNCGFETHADEQAALNIARSWLFLRSQEYKKYQTNKTTGNTDKRAFVETWQSFYRKKLKEVWKPAV

SEQ ID NO: 33413 - protein, 978 aa, synthetic construct
  REGION 1..978: note = engineered CasX variant
QEIKRINGIRRRLVKDSNTKKAGKTGPMKTLLVRVMTPDLRERLENLRKKPENIPQPISNTSRANLNKLLTDYTEMKKAILHVYWEEFQKDPVGLMSRVAQPASKKIDQNKLKPEMDEKGNLTTAGFACSQCGQPLFVYKLEQVSEKGKAYTNYFGRCNVAEHEKLIKLAQLKPEKDSDEAVTYSLGKFGQRALDFYSIHVTKESTHPVKPLAQIAGNRYASGPVGKALSDACMGTIASFLSKYQDIIIEHQKVVKGNQKRLESLRELAGKENLEYPSVTLPPQPHTKEGVDAYNEVIARVRMWVNLNLWQKLKLSRDDAKPLLRLKGFPSFPLVERQANEVDWWDMVCNVKKLINEKKEDGKVFWQNLAGYKRQEALRPYLSSEEDRKKGKKFARYQLGDLLLHLEKKHGEDWGKVYDEAWERIDKKVEGLSKHIKLEEERRSEDAQSKAALTDWLRAKASFVIEGLKEADKDEFCRCELKLQKWYGDLRGKPFAIEAENSILDISGFSKQYNCAFIWQKDGVKKLNLYLIINYFKGGKLRFKKIKPEAFEANRFYTVINKKSGEIVPMEVNFNFDDPNLIILPLAFGKRQGREFIWNDLLSLETGSLKLANGRVIEKTLYNRRTRQDEPALFVALTFERREVLDSSNIKPMNLIGVDRGENIPAVIALTDPEGCPLSRFKDSLGNPTHILRIGESYKEKQRTIQAKKEVEQRRAGGYSRKYASKAKNLADDMVRNTARDLLYYAVTQDAMLIFENLSRGFGRQGKRTFMAERQYTRMEDWLTAKLAYEGLPSKTYLSKTLAQYTSKTCSNCGFTITSADYDRVLEKLKKTATGWMTTINGKELKVEGQITYYNRYKRQNVVKDLSVELDRLSEESVNNDISSWTKGRQGEALSLLKKRFSHRPVQEKFVCLNCGFETHADEQAALNIARSWLFLRSQEYKKYQTNKTTGNTDKRAFVETWQSFYRKKLKEVWKPAV

SEQ ID NO: 33414 - protein, 977 aa, synthetic construct
  REGION 1..977: note = engineered CasX variant
QEIKRINGIRRRLVKDSNTKKAGKTGPMKTLLVRVMTPDLRERLENLRKKPENIPQPISNTSRANLNKLLTDYTEMKKAILHVYWEEFQKDPVGLMSRVAQPASKKIDQNKLKPEMDEKGNLTTAGFACSQCGQPLFVYKLEQVSEKGKAYTNYFGRCNVAEHEKLILLAQLKPEKDSDEAVTYSLGKFGQRALDFYSIHVTKESTHPVKPLAQIAGNRYASPVGKALSDACMGTIASFLSKYQDIIIEHQKVVKGNQKRLESLRELAGKENLEYPSVTLPPQPHTKEGVDAYNEVIARVRMWVNLNLWQKLKLSRDDAKPLLRLKGFPSFPLVERQANEVDWWDMVCNVKKLINEKKEDGKVFWQNLAGYKRQEALRPYLSSEEDRKKGKKFARYQLGDLLLHLEKKHGEDWGKVYDEAWERIDKKVEGLSKHIKLEEERRSEDAQSKAALTDWLRAKASFVIEGLKEADKDEFCRCELKLQKWYGDLRGKPFAIEAENSILDISGFSKQYNCAFIWQKDGVKKLNLYLIINYFKGGKLRFKKIKPEAFEANRFYTVINKKSGEIVPMEVNFNFDDPNLIILPLAFGKRQGREFIWNDLLSLETGSLKLANGRVIEKTLYNRRTRQDEPALFVALTFERREVLDSSNIKPMNLIGVDRGENIPAVIALTDPEGCPLSRFKDSLGNPTHILRIGESYKEKQRTIQAKKEVEQRRAGGYSRKYASKAKNLADDMVRNTARDLLYYAVTQDAMLIFENLSRGFGRQGKRTFMAERQYTRMEDWLTAKLAYEGLPSKTYLSKTLAQYTSKTCSNCGFTITSADYDRVLEKLKKTATGWMTTINGKELKVEGQITYYNRYKRQNVVKDLSVELDRLSEESVNNDISSWTKGRQGEALSLLKKRFSHRPVQEKFVCLNCGFETHADEQAALNIARSWLFLRSQEYKKYQTNKTTGNTDKRAFVETWQSFYRKKLKEVWKPAV

SEQ ID NO: 33415 - protein, 978 aa, synthetic construct
  REGION 1..978: note = engineered CasX variant
QEIKRINGIRRRLVKDSNTKKAGKTGPMKTLLVRVMTPDLRERLENLRKKPENIPQPISNTSRANLNKLLTDYTEMKKAILHVYWEEFQKDPVGLMSRVAQPASKKIDQNKLKPEMDEKGNLTTAGFACSQCGQPLFVYKLEQVSEKGKAYTNYFGRCNVAEHEKLILLAQLKPEKDSDEAVTYSLGKFGQRALDFYSIHVTKESTHPVKPLAQIAGNRYASYPVGKALSDACMGTIASFLSKYQDIIIEHQKVVKGNQKRLESLRELAGKENLEYPSVTLPPQPHTKEGVDAYNEVIARVRMWVNLNLWQKLKLSRDDAKPLLRLKGFPSFPLVERQANEVDWWDMVCNVKKLINEKKEDGKVFWQNLAGYKRQEALRPYLSSEEDRKKGKKFARYQLGDLLLHLEKKHGEDWGKVYDEAWERIDKKVEGLSKHIKLEEERRSEDAQSKAALTDWLRAKASFVIEGLKEADKDEFCRCELKLQKWYGDLRGKPFAIEAENSILDISGFSKQYNCAFIWQKDGVKKLNLYLIINYFKGGKLRFKKIKPEAFEANRFYTVINKKSGEIVPMEVNFNFDDPNLIILPLAFGKRQGREFIWNDLLSLETGSLKLANGRVIEKTLYNRRTRQDEPALFVALTFERREVLDSSNIKPMNLIGVDRGENIPAVIALTDPEGCPLSRFKDSLGNPTHILRIGESYKEKQRTIQAKKEVEQRRAGGYSRKYASKAKNLADDMVRNTARDLLYYAVTQDAMLIFENLSRGFGRQGKRTFMAERQYTRMEDWLTAKLAYEGLPSKTYLSKTLAQYTSKTCSNCGFTITSADYDRVLEKLKKTATGWMTTINGKELKVEGQITYYNRYKRQNVVKDLSVELDRLSEESVNNDISSWTKGRSGEALSLLKKRFSHRPVQEKFVCLNCEFETHADEQAALNIARSWLFLRSQEYKKYQTNKTTGNTDKRAFVETWQSFYRKKLKEVWKPAV

SEQ ID NO: 33416 - protein, 978 aa, synthetic construct
  REGION 1..978: note = engineered CasX variant
QEIKRINGIRRRLVKDSNTKKAGKTGPMKTLLVRVMTPDLRERLENLRKKPENIPQPISNTSRANLNKLLTDYTEMKKAILHVYWEEFQKDPVGLMSRVAQPASKKIDQNKLKPEMDEKGNLTTAGFACSQCGQPLFVYKLEQVSEKGKAYTNYFGRCNVAEHEKLILLAQLKPEKDSDEAVTYSLGKFGQRALDFYSIHVTKESTHPVKPLAQIAGNRYASHPVGKALSDACMGTIASFLSKYQDIIIEHQKVVKGNQKRLESLRELAGKENLEYPSVTLPPQPHTKEGVDAYNEVIARVRMWVNLNLWQKLKLSRDDAKPLLRLKGFPSFPLVERQANEVDWWDMVCNVKKLINEKKEDGKVFWQNLAGYKRQEALRPYLSSEEDRKKGKKFARYQLGDLLLHLEKKHGEDWGKVYDEAWERIDKKVEGLSKHIKLEEERRSEDAQSKAALTDWLRAKASFVIEGLKEADKDEFCRCELKLQKWYGDLRGKPFAIEAENSILDISGFSKQYNCAFIWQKDGVKKLNLYLIINYFKGGKLRFKKIKPEAFEANRFYTVINKKSGEIVPMEVNFNFDDPNLIILPLAFGKRQGREFIWNDLLSLETGSLKLANGRVIEKTLYNRRTRQDEPALFVALTFERREVLDSSNIKPMNLIGVDRGENIPAVIALTDPEGCPLSRFKDSLGNPTHILRIGESYKEKQRTIQAKKEVEQRRAGGYSRKYASKAKNLADDMVRNTARDLLYYAVTQDAMLIFENLSRGFGRQGKRTFMAERQYTRMEDWLTAKLAYEGLPSKTYLSKTLAQYTSKTCSNCGFTITSADYDRVLEKLKKTATGWMTTINGKELKVEGQITYYNRYKRQNVVKDLSVELDRLSEESVNNDISSWTKGRSGEALSLLKKRFSHRPVQEKFVCLNCEFETHADEQAALNIARSWLFLRSQEYKKYQTNKTTGNTDKRAFVETWQSFYRKKLKEVWKPAV

SEQ ID NO: 33417 - protein, 978 aa, synthetic construct
  REGION 1..978: note = engineered CasX variant
QEIKRINGIRRRLVKDSNTKKAGKTGPMKTLLVRVMTPDLRERLENLRKKPENIPQPISNTSRANLNKLLTDYTEMKKAILHVYWEEFQKDPVGLMSRVAQPASKKIDQNKLKPEMDEKGNLTTAGFACSQCGQPLFVYKLEQVSEKGKAYTNYFGRCNVAEHEKLILLAQLKPEKDSDEAVTYSLGKFGQRALDFYSIHVTKESTHPVKPLAQIAGNRYASSPVGKALSDACMGTIASFLSKYQDIIIEHQKVVKGNQKRLESLRELAGKENLEYPSVTLPPQPHTKEGVDAYNEVIARVRMWVNLNLWQKLKLSRDDAKPLLRLKGFPSFPLVERQANEVDWWDMVCNVKKLINEKKEDGKVFWQNLAGYKRQEALRPYLSSEEDRKKGKKFARYQLGDLLLHLEKKHGEDWGKVYDEAWERIDKKVEGLSKHIKLEEERRSEDAQSKAALTDWLRAKASFVIEGLKEADKDEFCRCELKLQKWYGDLRGKPFAIEAENSILDISGFSKQYNCAFIWQKDGVKKLNLYLIINYFKGGKLRFKKIKPEAFEANRFYTVINKKSGEIVPMEVNFNFDDPNLIILPLAFGKRQGREFIWNDLLSLETGSLKLANGRVIEKTLYNRRTRQDEPALFVALTFERREVLDSSNIKPMNLIGVDRGENIPAVIALTDPEGCPLSRFKDSLGNPTHILRIGESYKEKQRTIQAKKEVEQRRAGGYSRKYASKAKNLADDMVRNTARDLLYYAVTQDAMLIFENLSRGFGRQGKRTFMAERQYTRMEDWLTAKLAYEGLPSKTYLSKTLAQYTSKTCSNCGFTITSADYDRVLEKLKKTATGWMTTINGKELKVEGQITYYNRYKRQNVVKDLSVELDRLSEESVNNDISSWTKGRSGEALSLLKKRFSHRPVQEKFVCLNCEFETHADEQAALNIARSWLFLRSQEYKKYQTNKTTGNTDKRAFVETWQSFYRKKLKEVWKPAV

SEQ ID NO: 33418 - protein, 978 aa, synthetic construct
  REGION 1..978: note = engineered CasX variant
QEIKRINGIRRRLVKDSNTKKAGKTGPMKTLLVRVMTPDLRERLENLRKKPENIPQPISNTSRANLNKLLTDYTEMKKAILHVYWEEFQKDPVGLMSRVAQPASKKIDQNKLKPEMDEKGNLTTAGFACSQCGQPLFVYKLEQVSEKGKAYTNYFGRCNVAEHEKLILLAQLKPEKDSDEAVTYSLGKFGQRALDFYSIHVTKESTHPVKPLAQIAGNRYASTPVGKALSDACMGTIASFLSKYQDIIIEHQKVVKGNQKRLESLRELAGKENLEYPSVTLPPQPHTKEGVDAYNEVIARVRMWVNLNLWQKLKLSRDDAKPLLRLKGFPSFPLVERQANEVDWWDMVCNVKKLINEKKEDGKVFWQNLAGYKRQEALRPYLSSEEDRKKGKKFARYQLGDLLLHLEKKHGEDWGKVYDEAWERIDKKVEGLSKHIKLEEERRSEDAQSKAALTDWLRAKASFVIEGLKEADKDEFCRCELKLQKWYGDLRGKPFAIEAENSILDISGFSKQYNCAFIWQKDGVKKLNLYLIINYFKGGKLRFKKIKPEAFEANRFYTVINKKSGEIVPMEVNFNFDDPNLIILPLAFGKRQGREFIWNDLLSLETGSLKLANGRVIEKTLYNRRTRQDEPALFVALTFERREVLDSSNIKPMNLIGVDRGENIPAVIALTDPEGCPLSRFKDSLGNPTHILRIGESYKEKQRTIQAKKEVEQRRAGGYSRKYASKAKNLADDMVRNTARDLLYYAVTQDAMLIFENLSRGFGRQGKRTFMAERQYTRMEDWLTAKLAYEGLPSKTYLSKTLAQYTSKTCSNCGFTITSADYDRVLEKLKKTATGWMTTINGKELKVEGQITYYNRYKRQNVVKDLSVELDRLSEESVNNDISSWTKGRSGEALSLLKKRFSHRPVQEKFVCLNCEFETHADEQAALNIARSWLFLRSQEYKKYQTNKTTGNTDKRAFVETWQSFYRKKLKEVWKPAV

SEQ ID NO: 33419 - protein, 978 aa, synthetic construct
  REGION 1..978: note = engineered CasX variant
QEIKRINGIRRRLVKDSNTKKAGKTGPMKTLLVRVMTPDLRERLENLRKKPENIPQPISNTSRANLNKLLTDYTEMKKAILHVYWEEFQKDPVGLMSRVAQPASKKIDQNKLKPEMDEKGNLTTAGFACSQCGQPLFVYKLEQVSEKGKAYTNYFGRCNVAEHEKLILLAQLKPEKDSDEAVTYSLGKFGQRALDFYSIHVTKESTHPVKPLAQIAGNRYASAPVGKALSDACMGTIASFLSKYQDIIIEHQKVVKGNQKRLESLRELAGKENLEYPSVTLPPQPHTKEGVDAYNEVIARVRMWVNLNLWQKLKLSRDDAKPLLRLKGFPSFPLVERQANEVDWWDMVCNVKKLINEKKEDGKVFWQNLAGYKRQEALRPYLSSEEDRKKGKKFARYQLGDLLLHLEKKHGEDWGKVYDEAWERIDKKVEGLSKHIKLEEERRSEDAQSKAALTDWLRAKASFVIEGLKEADKDEFCRCELKLQKWYGDLRGKPFAIEAENSILDISGFSKQYNCAFIWQKDGVKKLNLYLIINYFKGGKLRFKKIKPEAFEANRFYTVINKKSGEIVPMEVNFNFDDPNLIILPLAFGKRQGREFIWNDLLSLETGSLKLANGRVIEKTLYNRRTRQDEPALFVALTFERREVLDSSNIKPMNLIGVDRGENIPAVIALTDPEGCPLSRFKDSLGNPTHILRIGESYKEKQRTIQAKKEVEQRRAGGYSRKYASKAKNLADDMVRNTARDLLYYAVTQDAMLIFENLSRGFGRQGKRTFMAERQYTRMEDWLTAKLAYEGLPSKTYLSKTLAQYTSKTCSNCGFTITSADYDRVLEKLKKTATGWMTTINGKELKVEGQITYYNRYKRQNVVKDLSVELDRLSEESVNNDISSWTKGRSGEALSLLKKRFSHRPVQEKFVCLNCEFETHADEQAALNIARSWLFLRSQEYKKYQTNKTTGNTDKRAFVETWQSFYRKKLKEVWKPAV

SEQ ID NO: 33420 - protein, 978 aa, synthetic construct
  REGION 1..978: note = engineered CasX variant
QEIKRINGIRRRLVKDSNTKKAGKTGPMKTLLVRVMTPDLRERLENLRKKPENIPQPISNTSRANLNKLLTDYTEMKKAILHVYWEEFQKDPVGLMSRVAQPASKKIDQNKLKPEMDEKGNLTTAGFACSQCGQPLFVYKLEQVSEKGKAYTNYFGRCNVAEHEKLILLAQLKPEKDSDEAVTYSLGKFGQRALDFYSIHVTKESTHPVKPLAQIAGNRYASVPVGKALSDACMGTIASFLSKYQDIIIEHQKVVKGNQKRLESLRELAGKENLEYPSVTLPPQPHTKEGVDAYNEVIARVRMWVNLNLWQKLKLSRDDAKPLLRLKGFPSFPLVERQANEVDWWDMVCNVKKLINEKKEDGKVFWQNLAGYKRQEALRPYLSSEEDRKKGKKFARYQLGDLLLHLEKKHGEDWGKVYDEAWERIDKKVEGLSKHIKLEEERRSEDAQSKAALTDWLRAKASFVIEGLKEADKDEFCRCELKLQKWYGDLRGKPFAIEAENSILDISGFSKQYNCAFIWQKDGVKKLNLYLIINYFKGGKLRFKKIKPEAFEANRFYTVINKKSGEIVPMEVNFNFDDPNLIILPLAFGKRQGREFIWNDLLSLETGSLKLANGRVIEKTLYNRRTRQDEPALFVALTFERREVLDSSNIKPMNLIGVDRGENIPAVIALTDPEGCPLSRFKDSLGNPTHILRIGESYKEKQRTIQAKKEVEQRRAGGYSRKYASKAKNLADDMVRNTARDLLYYAVTQDAMLIFENLSRGFGRQGKRTFMAERQYTRMEDWLTAKLAYEGLPSKTYLSKTLAQYTSKTCSNCGFTITSADYDRVLEKLKKTATGWMTTINGKELKVEGQITYYNRYKRQNVVKDLSVELDRLSEESVNNDISSWTKGRSGEALSLLKKRFSHRPVQEKFVCLNCEFETHADEQAALNIARSWLFLRSQEYKKYQTNKTTGNTDKRAFVETWQSFYRKKLKEVWKPAV

SEQ ID NO: 33421 - protein, 978 aa, synthetic construct
  REGION 1..978: note = engineered CasX variant
QEIKRINGIRRRLVKDSNTKKAGKTGPMKTLLVRVMTPDLRERLENLRKKPENIPQPISNTSRANLNKLLTDYTEMKKAILHVYWEEFQKDPVGLMSRVAQPASKKIDQNKLKPEMDEKGNLTTAGFACSQCGQPLFVYKLEQVSEKGKAYTNYFGRCNVAEHEKLIKLAQLKPEKDSDEAVTYSLGKFGQRALDFYSIHVTKESTHPVKPLAQIAGNRYASGPVGKALSDACMGTIASFLSKYQDIIIEHQKVVKGNQKRLESLRELAGKENLEYPSVTLPPQPHTKEGVDAYNEVIARVRMWVNLNLWQKLKLSRDDAKPLLRLKGFPSFPLVERQANEVDWWDMVCNVKKLINEKKEDGKVFWQNLAGYKRQEALRPYLSSEEDRKKGKKFARYQLGDLLLHLEKKHGEDWGKVYDEAWERIDKKVEGLSKHIKLEEERRSEDAQSKAALTDWLRAKASFVIEGLKEADKDEFCRCELKLQKWYGDLRGKPFAIEAENSILDISGFSKQYNCAFIWQKDGVKKLNLYLIINYFKGGKLRFKKIKPEAFEANRFYTVINKKSGEIVPMEVNFNFDDPNLIILPLAFGKRQGREFIWNDLLSLETGSLKLANGRVIEKTLYNRRTRQDEPALFVALTFERREVLDSSNIKPMNLIGVDRGENIPAVIALTDPEGCPLSRFKDSLGNPTHILRIGESYKEKQRTIQAKKEVEQRRAGGYSRKYASKAKNLADDMVRNTARDLLYYAVTQDAMLIFENLSRGFGRQGKRTFMAERQYTRMEDWLTAKLAYEGLPSKTYLSKTLAQYTSKTCSNCGFTITSADYDRVLEKLKKTATGWMTTINGKELKVEGQITYYNRYKRQNVVKDLSVELDRLSEESVNNDISSWTKGRSGEALSLLKKRFSHRPVQEKFVCLNCEFETHADEQAALNIARSWLFLRSQEYKKYQTNKTTGNTDKRAFVETWQSFYRKKLKEVWKPAV

SEQ ID NO: 33422 - protein, 977 aa, synthetic construct
  REGION 1..977: note = engineered CasX variant
QEIKRINGIRRRLVKDSNTKKAGKTGPMKTLLVRVMTPDLRERLENLRKKPENIPQPISNTSRANLNKLLTDYTEMKKAILHVYWEEFQKDPVGLMSRVAQPASKKIDQNKLKPEMDEKGNLTTAGFACSQCGQPLFVYKLEQVSEKGKAYTNYFGRCNVAEHEKLILLAQLKPEKDSDEAVTYSLGKFGQRALDFYSIHVTKESTHPVKPLAQIAGNRYASPVGKALSDACMGTIASFLSKYQDIIIEHQKVVKGNQKRLESLRELAGKENLEYPSVTLPPQPHTKEGVDAYNEVIARVRMWVNLNLWQKLKLSRDDAKPLLRLKGFPSFPLVERQANEVDWWDMVCNVKKLINEKKEDGKVFWQNLAGYKRQEALRPYLSSEEDRKKGKKFARYQLGDLLLHLEKKHGEDWGKVYDEAWERIDKKVEGLSKHIKLEEERRSEDAQSKAALTDWLRAKASFVIEGLKEADKDEFCRCELKLQKWYGDLRGKPFAIEAENSILDISGFSKQYNCAFIWQKDGVKKLNLYLIINYFKGGKLRFKKIKPEAFEANRFYTVINKKSGEIVPMEVNFNFDDPNLIILPLAFGKRQGREFIWNDLLSLETGSLKLANGRVIEKTLYNRRTRQDEPALFVALTFERREVLDSSNIKPMNLIGVDRGENIPAVIALTDPEGCPLSRFKDSLGNPTHILRIGESYKEKQRTIQAKKEVEQRRAGGYSRKYASKAKNLADDMVRNTARDLLYYAVTQDAMLIFENLSRGFGRQGKRTFMAERQYTRMEDWLTAKLAYEGLPSKTYLSKTLAQYTSKTCSNCGFTITSADYDRVLEKLKKTATGWMTTINGKELKVEGQITYYNRYKRQNVVKDLSVELDRLSEESVNNDISSWTKGRSGEALSLLKKRFSHRPVQEKFVCLNCEFETHADEQAALNIARSWLFLRSQEYKKYQTNKTTGNTDKRAFVETWQSFYRKKLKEVWKPAV

SEQ ID NO: 33423 - protein, 979 aa, synthetic construct
  REGION 1..979: note = engineered CasX variant
QEIKRINGIRRRLVKDSNTKKAGKTGPMKTLLVRVMTPDLRERLENLRKKPENIPQPISNTSRANLNKLLTDYTEMKKAILHVYWEEFQKDPVGLMSRVAQPASKKIDQNKLKPEMDEKGNLTTAGFACSQCGQPLFVYKLEQVSEKGKAYTNYFGRCNVAEHEKLILLAQLKPEKDSDEAVTYSLGKFGQRALDFYSIHVTKESTHPVKPLAQIAGNRYASYPVGKALSDACMGTIASFLSKYQDIIIEHQKVVKGNQKRLESLRELAGKENLEYPSVTLPPQPHTKEGVDAYNEVIARVRMWVNLNLWQKLKLSRDDAKPLLRLKGFPSFPLVERQANEVDWWDMVCNVKKLINEKKEDGKVFWQNLAGYKRQEALRPYLSSEEDRKKGKKFARYQLGDLLLHLEKKHGEDWGKVYDEAWERIDKKVEGLSKHIKLEEERRSEDAQSKAALTDWLRAKASFVIEGLKEADKDEFCRCELKLQKWYGDLRGKPFAIEAENSILDISGFSKQYNCAFIWQKDGVKKLNLYLIINYFKGGKLRFKKIKPEAFEANRFYTVINKKSGEIVPMEVNFNFDDPNLIILPLAFGKRQGREFIWNDLLSLETGSLKLANGRVIEKTLYNRRTRQDEPALFVALTFERREVLDSSNIKPMNLIGVDRGENIPAVIALTDPEGCPLSRFKDSLGNPTHILRIGESYKEKQRTIQAKKEVEQRRAGGYSRKYASKAKNLADDMVRNTARDLLYYAVTQDAMLIFENLSRGFGRQGKRTFMAERQYTRMEDWLTAKLAYEGLPSKTYLSKTLAQYTSKTCSNCGFTITSADYDRVLEKLKKTATGWMTTINGKELKVEGQITYYNRYKRQNVVKDLSVELDRLSEESVNNDISSWTKGRSGEALSLLKKRFSHRPVQEKFVCLNCGFETHADEQAALNIARSWLFLRSQEYKKYQTNKTSTGNTDKRAFVETWQSFYRKKLKEVWKPAV

SEQ ID NO: 33424 - protein, 979 aa, synthetic construct
  REGION 1..979: note = engineered CasX variant
QEIKRINGIRRRLVKDSNTKKAGKTGPMKTLLVRVMTPDLRERLENLRKKPENIPQPISNTSRANLNKLLTDYTEMKKAILHVYWEEFQKDPVGLMSRVAQPASKKIDQNKLKPEMDEKGNLTTAGFACSQCGQPLFVYKLEQVSEKGKAYTNYFGRCNVAEHEKLILLAQLKPEKDSDEAVTYSLGKFGQRALDFYSIHVTKESTHPVKPLAQIAGNRYASHPVGKALSDACMGTIASFLSKYQDIIIEHQKVVKGNQKRLESLRELAGKENLEYPSVTLPPQPHTKEGVDAYNEVIARVRMWVNLNLWQKLKLSRDDAKPLLRLKGFPSFPLVERQANEVDWWDMVCNVKKLINEKKEDGKVFWQNLAGYKRQEALRPYLSSEEDRKKGKKFARYQLGDLLLHLEKKHGEDWGKVYDEAWERIDKKVEGLSKHIKLEEERRSEDAQSKAALTDWLRAKASFVIEGLKEADKDEFCRCELKLQKWYGDLRGKPFAIEAENSILDISGFSKQYNCAFIWQKDGVKKLNLYLIINYFKGGKLRFKKIKPEAFEANRFYTVINKKSGEIVPMEVNFNFDDPNLIILPLAFGKRQGREFIWNDLLSLETGSLKLANGRVIEKTLYNRRTRQDEPALFVALTFERREVLDSSNIKPMNLIGVDRGENIPAVIALTDPEGCPLSRFKDSLGNPTHILRIGESYKEKQRTIQAKKEVEQRRAGGYSRKYASKAKNLADDMVRNTARDLLYYAVTQDAMLIFENLSRGFGRQGKRTFMAERQYTRMEDWLTAKLAYEGLPSKTYLSKTLAQYTSKTCSNCGFTITSADYDRVLEKLKKTATGWMTTINGKELKVEGQITYYNRYKRQNVVKDLSVELDRLSEESVNNDISSWTKGRSGEALSLLKKRFSHRPVQEKFVCLNCGFETHADEQAALNIARSWLFLRSQEYKKYQTNKTSTGNTDKRAFVETWQSFYRKKLKEVWKPAV

SEQ ID NO: 33425 - protein, 979 aa, synthetic construct
  REGION 1..979: note = engineered CasX variant
QEIKRINGIRRRLVKDSNTKKAGKTGPMKTLLVRVMTPDLRERLENLRKKPENIPQPISNTSRANLNKLLTDYTEMKKAILHVYWEEFQKDPVGLMSRVAQPASKKIDQNKLKPEMDEKGNLTTAGFACSQCGQPLFVYKLEQVSEKGKAYTNYFGRCNVAEHEKLILLAQLKPEKDSDEAVTYSLGKFGQRALDFYSIHVTKESTHPVKPLAQIAGNRYASSPVGKALSDACMGTIASFLSKYQDIIIEHQKVVKGNQKRLESLRELAGKENLEYPSVTLPPQPHTKEGVDAYNEVIARVRMWVNLNLWQKLKLSRDDAKPLLRLKGFPSFPLVERQANEVDWWDMVCNVKKLINEKKEDGKVFWQNLAGYKRQEALRPYLSSEEDRKKGKKFARYQLGDLLLHLEKKHGEDWGKVYDEAWERIDKKVEGLSKHIKLEEERRSEDAQSKAALTDWLRAKASFVIEGLKEADKDEFCRCELKLQKWYGDLRGKPFAIEAENSILDISGFSKQYNCAFIWQKDGVKKLNLYLIINYFKGGKLRFKKIKPEAFEANRFYTVINKKSGEIVPMEVNFNFDDPNLIILPLAFGKRQGREFIWNDLLSLETGSLKLANGRVIEKTLYNRRTRQDEPALFVALTFERREVLDSSNIKPMNLIGVDRGENIPAVIALTDPEGCPLSRFKDSLGNPTHILRIGESYKEKQRTIQAKKEVEQRRAGGYSRKYASKAKNLADDMVRNTARDLLYYAVTQDAMLIFENLSRGFGRQGKRTFMAERQYTRMEDWLTAKLAYEGLPSKTYLSKTLAQYTSKTCSNCGFTITSADYDRVLEKLKKTATGWMTTINGKELKVEGQITYYNRYKRQNVVKDLSVELDRLSEESVNNDISSWTKGRSGEALSLLKKRFSHRPVQEKFVCLNCGFETHADEQAALNIARSWLFLRSQEYKKYQTNKTSTGNTDKRAFVETWQSFYRKKLKEVWKPAV

SEQ ID NO: 33426 - protein, 979 aa, synthetic construct
  REGION 1..979: note = engineered CasX variant
QEIKRINGIRRRLVKDSNTKKAGKTGPMKTLLVRVMTPDLRERLENLRKKPENIPQPISNTSRANLNKLLTDYTEMKKAILHVYWEEFQKDPVGLMSRVAQPASKKIDQNKLKPEMDEKGNLTTAGFACSQCGQPLFVYKLEQVSEKGKAYTNYFGRCNVAEHEKLILLAQLKPEKDSDEAVTYSLGKFGQRALDFYSIHVTKESTHPVKPLAQIAGNRYASTPVGKALSDACMGTIASFLSKYQDIIIEHQKVVKGNQKRLESLRELAGKENLEYPSVTLPPQPHTKEGVDAYNEVIARVRMWVNLNLWQKLKLSRDDAKPLLRLKGFPSFPLVERQANEVDWWDMVCNVKKLINEKKEDGKVFWQNLAGYKRQEALRPYLSSEEDRKKGKKFARYQLGDLLLHLEKKHGEDWGKVYDEAWERIDKKVEGLSKHIKLEEERRSEDAQSKAALTDWLRAKASFVIEGLKEADKDEFCRCELKLQKWYGDLRGKPFAIEAENSILDISGFSKQYNCAFIWQKDGVKKLNLYLIINYFKGGKLRFKKIKPEAFEANRFYTVINKKSGEIVPMEVNFNFDDPNLIILPLAFGKRQGREFIWNDLLSLETGSLKLANGRVIEKTLYNRRTRQDEPALFVALTFERREVLDSSNIKPMNLIGVDRGENIPAVIALTDPEGCPLSRFKDSLGNPTHILRIGESYKEKQRTIQAKKEVEQRRAGGYSRKYASKAKNLADDMVRNTARDLLYYAVTQDAMLIFENLSRGFGRQGKRTFMAERQYTRMEDWLTAKLAYEGLPSKTYLSKTLAQYTSKTCSNCGFTITSADYDRVLEKLKKTATGWMTTINGKELKVEGQITYYNRYKRQNVVKDLSVELDRLSEESVNNDISSWTKGRSGEALSLLKKRFSHRPVQEKFVCLNCGFETHADEQAALNIARSWLFLRSQEYKKYQTNKTSTGNTDKRAFVETWQSFYRKKLKEVWKPAV

SEQ ID NO: 33427 - protein, 979 aa, synthetic construct
  REGION 1..979: note = engineered CasX variant
QEIKRINGIRRRLVKDSNTKKAGKTGPMKTLLVRVMTPDLRERLENLRKKPENIPQPISNTSRANLNKLLTDYTEMKKAILHVYWEEFQKDPVGLMSRVAQPASKKIDQNKLKPEMDEKGNLTTAGFACSQCGQPLFVYKLEQVSEKGKAYTNYFGRCNVAEHEKLILLAQLKPEKDSDEAVTYSLGKFGQRALDFYSIHVTKESTHPVKPLAQIAGNRYASAPVGKALSDACMGTIASFLSKYQDIIIEHQKVVKGNQKRLESLRELAGKENLEYPSVTLPPQPHTKEGVDAYNEVIARVRMWVNLNLWQKLKLSRDDAKPLLRLKGFPSFPLVERQANEVDWWDMVCNVKKLINEKKEDGKVFWQNLAGYKRQEALRPYLSSEEDRKKGKKFARYQLGDLLLHLEKKHGEDWGKVYDEAWERIDKKVEGLSKHIKLEEERRSEDAQSKAALTDWLRAKASFVIEGLKEADKDEFCRCELKLQKWYGDLRGKPFAIEAENSILDISGFSKQYNCAFIWQKDGVKKLNLYLIINYFKGGKLRFKKIKPEAFEANRFYTVINKKSGEIVPMEVNFNFDDPNLIILPLAFGKRQGREFIWNDLLSLETGSLKLANGRVIEKTLYNRRTRQDEPALFVALTFERREVLDSSNIKPMNLIGVDRGENIPAVIALTDPEGCPLSRFKDSLGNPTHILRIGESYKEKQRTIQAKKEVEQRRAGGYSRKYASKAKNLADDMVRNTARDLLYYAVTQDAMLIFENLSRGFGRQGKRTFMAERQYTRMEDWLTAKLAYEGLPSKTYLSKTLAQYTSKTCSNCGFTITSADYDRVLEKLKKTATGWMTTINGKELKVEGQITYYNRYKRQNVVKDLSVELDRLSEESVNNDISSWTKGRSGEALSLLKKRFSHRPVQEKFVCLNCGFETHADEQAALNIARSWLFLRSQEYKKYQTNKTSTGNTDKRAFVETWQSFYRKKLKEVWKPAV

SEQ ID NO: 33428 - protein, 979 aa, synthetic construct
  REGION 1..979: note = engineered CasX variant
QEIKRINGIRRRLVKDSNTKKAGKTGPMKTLLVRVMTPDLRERLENLRKKPENIPQPISNTSRANLNKLLTDYTEMKKAILHVYWEEFQKDPVGLMSRVAQPASKKIDQNKLKPEMDEKGNLTTAGFACSQCGQPLFVYKLEQVSEKGKAYTNYFGRCNVAEHEKLILLAQLKPEKDSDEAVTYSLGKFGQRALDFYSIHVTKESTHPVKPLAQIAGNRYASVPVGKALSDACMGTIASFLSKYQDIIIEHQKVVKGNQKRLESLRELAGKENLEYPSVTLPPQPHTKEGVDAYNEVIARVRMWVNLNLWQKLKLSRDDAKPLLRLKGFPSFPLVERQANEVDWWDMVCNVKKLINEKKEDGKVFWQNLAGYKRQEALRPYLSSEEDRKKGKKFARYQLGDLLLHLEKKHGEDWGKVYDEAWERIDKKVEGLSKHIKLEEERRSEDAQSKAALTDWLRAKASFVIEGLKEADKDEFCRCELKLQKWYGDLRGKPFAIEAENSILDISGFSKQYNCAFIWQKDGVKKLNLYLIINYFKGGKLRFKKIKPEAFEANRFYTVINKKSGEIVPMEVNFNFDDPNLIILPLAFGKRQGREFIWNDLLSLETGSLKLANGRVIEKTLYNRRTRQDEPALFVALTFERREVLDSSNIKPMNLIGVDRGENIPAVIALTDPEGCPLSRFKDSLGNPTHILRIGESYKEKQRTIQAKKEVEQRRAGGYSRKYASKAKNLADDMVRNTARDLLYYAVTQDAMLIFENLSRGFGRQGKRTFMAERQYTRMEDWLTAKLAYEGLPSKTYLSKTLAQYTSKTCSNCGFTITSADYDRVLEKLKKTATGWMTTINGKELKVEGQITYYNRYKRQNVVKDLSVELDRLSEESVNNDISSWTKGRSGEALSLLKKRFSHRPVQEKFVCLNCGFETHADEQAALNIARSWLFLRSQEYKKYQTNKTSTGNTDKRAFVETWQSFYRKKLKEVWKPAV

SEQ ID NO: 33429 - protein, 979 aa, synthetic construct
  REGION 1..979: note = engineered CasX variant
QEIKRINGIRRRLVKDSNTKKAGKTGPMKTLLVRVMTPDLRERLENLRKKPENIPQPISNTSRANLNKLLTDYTEMKKAILHVYWEEFQKDPVGLMSRVAQPASKKIDQNKLKPEMDEKGNLTTAGFACSQCGQPLFVYKLEQVSEKGKAYTNYFGRCNVAEHEKLIKLAQLKPEKDSDEAVTYSLGKFGQRALDFYSIHVTKESTHPVKPLAQIAGNRYASGPVGKALSDACMGTIASFLSKYQDIIIEHQKVVKGNQKRLESLRELAGKENLEYPSVTLPPQPHTKEGVDAYNEVIARVRMWVNLNLWQKLKLSRDDAKPLLRLKGFPSFPLVERQANEVDWWDMVCNVKKLINEKKEDGKVFWQNLAGYKRQEALRPYLSSEEDRKKGKKFARYQLGDLLLHLEKKHGEDWGKVYDEAWERIDKKVEGLSKHIKLEEERRSEDAQSKAALTDWLRAKASFVIEGLKEADKDEFCRCELKLQKWYGDLRGKPFAIEAENSILDISGFSKQYNCAFIWQKDGVKKLNLYLIINYFKGGKLRFKKIKPEAFEANRFYTVINKKSGEIVPMEVNFNFDDPNLIILPLAFGKRQGREFIWNDLLSLETGSLKLANGRVIEKTLYNRRTRQDEPALFVALTFERREVLDSSNIKPMNLIGVDRGENIPAVIALTDPEGCPLSRFKDSLGNPTHILRIGESYKEKQRTIQAKKEVEQRRAGGYSRKYASKAKNLADDMVRNTARDLLYYAVTQDAMLIFENLSRGFGRQGKRTFMAERQYTRMEDWLTAKLAYEGLPSKTYLSKTLAQYTSKTCSNCGFTITSADYDRVLEKLKKTATGWMTTINGKELKVEGQITYYNRYKRQNVVKDLSVELDRLSEESVNNDISSWTKGRSGEALSLLKKRFSHRPVQEKFVCLNCGFETHADEQAALNIARSWLFLRSQEYKKYQTNKTSTGNTDKRAFVETWQSFYRKKLKEVWKPAV

SEQ ID NO: 33430 - protein, 978 aa, synthetic construct
  REGION 1..978: note = engineered CasX variant
QEIKRINGIRRRLVKDSNTKKAGKTGPMKTLLVRVMTPDLRERLENLRKKPENIPQPISNTSRANLNKLLTDYTEMKKAILHVYWEEFQKDPVGLMSRVAQPASKKIDQNKLKPEMDEKGNLTTAGFACSQCGQPLFVYKLEQVSEKGKAYTNYFGRCNVAEHEKLILLAQLKPEKDSDEAVTYSLGKFGQRALDFYSIHVTKESTHPVKPLAQIAGNRYASPVGKALSDACMGTIASFLSKYQDIIIEHQKVVKGNQKRLESLRELAGKENLEYPSVTLPPQPHTKEGVDAYNEVIARVRMWVNLNLWQKLKLSRDDAKPLLRLKGFPSFPLVERQANEVDWWDMVCNVKKLINEKKEDGKVFWQNLAGYKRQEALRPYLSSEEDRKKGKKFARYQLGDLLLHLEKKHGEDWGKVYDEAWERIDKKVEGLSKHIKLEEERRSEDAQSKAALTDWLRAKASFVIEGLKEADKDEFCRCELKLQKWYGDLRGKPFAIEAENSILDISGFSKQYNCAFIWQKDGVKKLNLYLIINYFKGGKLRFKKIKPEAFEANRFYTVINKKSGEIVPMEVNFNFDDPNLIILPLAFGKRQGREFIWNDLLSLETGSLKLANGRVIEKTLYNRRTRQDEPALFVALTFERREVLDSSNIKPMNLIGVDRGENIPAVIALTDPEGCPLSRFKDSLGNPTHILRIGESYKEKQRTIQAKKEVEQRRAGGYSRKYASKAKNLADDMVRNTARDLLYYAVTQDAMLIFENLSRGFGRQGKRTFMAERQYTRMEDWLTAKLAYEGLPSKTYLSKTLAQYTSKTCSNCGFTITSADYDRVLEKLKKTATGWMTTINGKELKVEGQITYYNRYKRQNVVKDLSVELDRLSEESVNNDISSWTKGRSGEALSLLKKRFSHRPVQEKFVCLNCGFETHADEQAALNIARSWLFLRSQEYKKYQTNKTSTGNTDKRAFVETWQSFYRKKLKEVWKPAV

SEQ ID NO: 33431 - protein, 979 aa, synthetic construct
  REGION 1..979: note = engineered CasX variant
QEIKRINGIRRRLVKDSNTKKAGKTGPMKTLLVRVMTPDLRERLENLRKKPENIPQPISNTSRANLNKLLTDYTEMKKAILHVYWEEFQKDPVGLMSRVAQPASKKIDQNKLKPEMDEKGNLTTAGFACSQCGQPLFVYKLEQVSEKGKAYTNYFGRCNVAEHEKLILLAQLKPEKDSDEAVTYSLGKFGQRALDFYSIHVTKESTHPVKPLAQIAGNRYASYPVGKALSDACMGTIASFLSKYQDIIIEHQKVVKGNQKRLESLRELAGKENLEYPSVTLPPQPHTKEGVDAYNEVIARVRMWVNLNLWQKLKLSRDDAKPLLRLKGFPSFPLVERQANEVDWWDMVCNVKKLINEKKEDGKVFWQNLAGYKRQEALRPYLSSEEDRKKGKKFARYQLGDLLLHLEKKHGEDWGKVYDEAWERIDKKVEGLSKHIKLEEERRSEDAQSKAALTDWLRAKASFVIEGLKEADKDEFCRCELKLQKWYGDLRGKPFAIEAENSILDISGFSKQYNCAFIWQKDGVKKLNLYLIINYFKGGKLRFKKIKPEAFEANRFYTVINKKSGEIVPMEVNFNFDDPNLIILPLAFGKRQGREFIWNDLLSLETGSLKLANGRVIEKTLYNRRTRQDEPALFVALTFERREVLDSSNIKPMNLIGVDRGENIPAVIALTDPEGCPLSRFKDSLGNPTHILRIGESYKEKQRTIQAKKEVEQRRAGGYSRKYASKAKNLADDMVRNTARDLLYYAVTQDAMLIFENLSRGFGRQGKRTFMAERQYTRMEDWLTAKLAYEGLPSKTYLSKTLAQYTSKTCSNCGFTITSADYDRVLEKLKKTATGWMTTINGKELKVEGQITYYNRYKRQNVVKDLSVELDRLSEESVNNDISSWTKGRSGEALSLLKKRFSHRPVQEKFVCLNCGFETHADEQAALNIARSWLFLRSQEYKKYQTNKTTGKNTDKRAFVETWQSFYRKKLKEVWKPAV

SEQ ID NO: 33432 - protein, 979 aa, synthetic construct
  REGION 1..979: note = engineered CasX variant
QEIKRINGIRRRLVKDSNTKKAGKTGPMKTLLVRVMTPDLRERLENLRKKPENIPQPISNTSRANLNKLLTDYTEMKKAILHVYWEEFQKDPVGLMSRVAQPASKKIDQNKLKPEMDEKGNLTTAGFACSQCGQPLFVYKLEQVSEKGKAYTNYFGRCNVAEHEKLILLAQLKPEKDSDEAVTYSLGKFGQRALDFYSIHVTKESTHPVKPLAQIAGNRYASHPVGKALSDACMGTIASFLSKYQDIIIEHQKVVKGNQKRLESLRELAGKENLEYPSVTLPPQPHTKEGVDAYNEVIARVRMWVNLNLWQKLKLSRDDAKPLLRLKGFPSFPLVERQANEVDWWDMVCNVKKLINEKKEDGKVFWQNLAGYKRQEALRPYLSSEEDRKKGKKFARYQLGDLLLHLEKKHGEDWGKVYDEAWERIDKKVEGLSKHIKLEEERRSEDAQSKAALTDWLRAKASFVIEGLKEADKDEFCRCELKLQKWYGDLRGKPFAIEAENSILDISGFSKQYNCAFIWQKDGVKKLNLYLIINYFKGGKLRFKKIKPEAFEANRFYTVINKKSGEIVPMEVNFNFDDPNLIILPLAFGKRQGREFIWNDLLSLETGSLKLANGRVIEKTLYNRRTRQDEPALFVALTFERREVLDSSNIKPMNLIGVDRGENIPAVIALTDPEGCPLSRFKDSLGNPTHILRIGESYKEKQRTIQAKKEVEQRRAGGYSRKYASKAKNLADDMVRNTARDLLYYAVTQDAMLIFENLSRGFGRQGKRTFMAERQYTRMEDWLTAKLAYEGLPSKTYLSKTLAQYTSKTCSNCGFTITSADYDRVLEKLKKTATGWMTTINGKELKVEGQITYYNRYKRQNVVKDLSVELDRLSEESVNNDISSWTKGRSGEALSLLKKRFSHRPVQEKFVCLNCGFETHADEQAALNIARSWLFLRSQEYKKYQTNKTTGKNTDKRAFVETWQSFYRKKLKEVWKPAV

SEQ ID NO: 33433 - protein, 979 aa, synthetic construct
  REGION 1..979: note = engineered CasX variant
QEIKRINGIRRRLVKDSNTKKAGKTGPMKTLLVRVMTPDLRERLENLRKKPENIPQPISNTSRANLNKLLTDYTEMKKAILHVYWEEFQKDPVGLMSRVAQPASKKIDQNKLKPEMDEKGNLTTAGFACSQCGQPLFVYKLEQVSEKGKAYTNYFGRCNVAEHEKLILLAQLKPEKDSDEAVTYSLGKFGQRALDFYSIHVTKESTHPVKPLAQIAGNRYASSPVGKALSDACMGTIASFLSKYQDIIIEHQKVVKGNQKRLESLRELAGKENLEYPSVTLPPQPHTKEGVDAYNEVIARVRMWVNLNLWQKLKLSRDDAKPLLRLKGFPSFPLVERQANEVDWWDMVCNVKKLINEKKEDGKVFWQNLAGYKRQEALRPYLSSEEDRKKGKKFARYQLGDLLLHLEKKHGEDWGKVYDEAWERIDKKVEGLSKHIKLEEERRSEDAQSKAALTDWLRAKASFVIEGLKEADKDEFCRCELKLQKWYGDLRGKPFAIEAENSILDISGFSKQYNCAFIWQKDGVKKLNLYLIINYFKGGKLRFKKIKPEAFEANRFYTVINKKSGEIVPMEVNFNFDDPNLIILPLAFGKRQGREFIWNDLLSLETGSLKLANGRVIEKTLYNRRTRQDEPALFVALTFERREVLDSSNIKPMNLIGVDRGENIPAVIALTDPEGCPLSRFKDSLGNPTHILRIGESYKEKQRTIQAKKEVEQRRAGGYSRKYASKAKNLADDMVRNTARDLLYYAVTQDAMLIFENLSRGFGRQGKRTFMAERQYTRMEDWLTAKLAYEGLPSKTYLSKTLAQYTSKTCSNCGFTITSADYDRVLEKLKKTATGWMTTINGKELKVEGQITYYNRYKRQNVVKDLSVELDRLSEESVNNDISSWTKGRSGEALSLLKKRFSHRPVQEKFVCLNCGFETHADEQAALNIARSWLFLRSQEYKKYQTNKTTGKNTDKRAFVETWQSFYRKKLKEVWKPAV

SEQ ID NO: 33434 - protein, 979 aa, synthetic construct
  REGION 1..979: note = engineered CasX variant
QEIKRINGIRRRLVKDSNTKKAGKTGPMKTLLVRVMTPDLRERLENLRKKPENIPQPISNTSRANLNKLLTDYTEMKKAILHVYWEEFQKDPVGLMSRVAQPASKKIDQNKLKPEMDEKGNLTTAGFACSQCGQPLFVYKLEQVSEKGKAYTNYFGRCNVAEHEKLILLAQLKPEKDSDEAVTYSLGKFGQRALDFYSIHVTKESTHPVKPLAQIAGNRYASTPVGKALSDACMGTIASFLSKYQDIIIEHQKVVKGNQKRLESLRELAGKENLEYPSVTLPPQPHTKEGVDAYNEVIARVRMWVNLNLWQKLKLSRDDAKPLLRLKGFPSFPLVERQANEVDWWDMVCNVKKLINEKKEDGKVFWQNLAGYKRQEALRPYLSSEEDRKKGKKFARYQLGDLLLHLEKKHGEDWGKVYDEAWERIDKKVEGLSKHIKLEEERRSEDAQSKAALTDWLRAKASFVIEGLKEADKDEFCRCELKLQKWYGDLRGKPFAIEAENSILDISGFSKQYNCAFIWQKDGVKKLNLYLIINYFKGGKLRFKKIKPEAFEANRFYTVINKKSGEIVPMEVNFNFDDPNLIILPLAFGKRQGREFIWNDLLSLETGSLKLANGRVIEKTLYNRRTRQDEPALFVALTFERREVLDSSNIKPMNLIGVDRGENIPAVIALTDPEGCPLSRFKDSLGNPTHILRIGESYKEKQRTIQAKKEVEQRRAGGYSRKYASKAKNLADDMVRNTARDLLYYAVTQDAMLIFENLSRGFGRQGKRTFMAERQYTRMEDWLTAKLAYEGLPSKTYLSKTLAQYTSKTCSNCGFTITSADYDRVLEKLKKTATGWMTTINGKELKVEGQITYYNRYKRQNVVKDLSVELDRLSEESVNNDISSWTKGRSGEALSLLKKRFSHRPVQEKFVCLNCGFETHADEQAALNIARSWLFLRSQEYKKYQTNKTTGKNTDKRAFVETWQSFYRKKLKEVWKPAV

SEQ ID NO: 33435 - protein, 979 aa, synthetic construct
  REGION 1..979: note = engineered CasX variant
QEIKRINGIRRRLVKDSNTKKAGKTGPMKTLLVRVMTPDLRERLENLRKKPENIPQPISNTSRANLNKLLTDYTEMKKAILHVYWEEFQKDPVGLMSRVAQPASKKIDQNKLKPEMDEKGNLTTAGFACSQCGQPLFVYKLEQVSEKGKAYTNYFGRCNVAEHEKLILLAQLKPEKDSDEAVTYSLGKFGQRALDFYSIHVTKESTHPVKPLAQIAGNRYASAPVGKALSDACMGTIASFLSKYQDIIIEHQKVVKGNQKRLESLRELAGKENLEYPSVTLPPQPHTKEGVDAYNEVIARVRMWVNLNLWQKLKLSRDDAKPLLRLKGFPSFPLVERQANEVDWWDMVCNVKKLINEKKEDGKVFWQNLAGYKRQEALRPYLSSEEDRKKGKKFARYQLGDLLLHLEKKHGEDWGKVYDEAWERIDKKVEGLSKHIKLEEERRSEDAQSKAALTDWLRAKASFVIEGLKEADKDEFCRCELKLQKWYGDLRGKPFAIEAENSILDISGFSKQYNCAFIWQKDGVKKLNLYLIINYFKGGKLRFKKIKPEAFEANRFYTVINKKSGEIVPMEVNFNFDDPNLIILPLAFGKRQGREFIWNDLLSLETGSLKLANGRVIEKTLYNRRTRQDEPALFVALTFERREVLDSSNIKPMNLIGVDRGENIPAVIALTDPEGCPLSRFKDSLGNPTHILRIGESYKEKQRTIQAKKEVEQRRAGGYSRKYASKAKNLADDMVRNTARDLLYYAVTQDAMLIFENLSRGFGRQGKRTFMAERQYTRMEDWLTAKLAYEGLPSKTYLSKTLAQYTSKTCSNCGFTITSADYDRVLEKLKKTATGWMTTINGKELKVEGQITYYNRYKRQNVVKDLSVELDRLSEESVNNDISSWTKGRSGEALSLLKKRFSHRPVQEKFVCLNCGFETHADEQAALNIARSWLFLRSQEYKKYQTNKTTGKNTDKRAFVETWQSFYRKKLKEVWKPAV

SEQ ID NO: 33436 - protein, 979 aa, synthetic construct
  REGION 1..979: note = engineered CasX variant
QEIKRINGIRRRLVKDSNTKKAGKTGPMKTLLVRVMTPDLRERLENLRKKPENIPQPISNTSRANLNKLLTDYTEMKKAILHVYWEEFQKDPVGLMSRVAQPASKKIDQNKLKPEMDEKGNLTTAGFACSQCGQPLFVYKLEQVSEKGKAYTNYFGRCNVAEHEKLILLAQLKPEKDSDEAVTYSLGKFGQRALDFYSIHVTKESTHPVKPLAQIAGNRYASVPVGKALSDACMGTIASFLSKYQDIIIEHQKVVKGNQKRLESLRELAGKENLEYPSVTLPPQPHTKEGVDAYNEVIARVRMWVNLNLWQKLKLSRDDAKPLLRLKGFPSFPLVERQANEVDWWDMVCNVKKLINEKKEDGKVFWQNLAGYKRQEALRPYLSSEEDRKKGKKFARYQLGDLLLHLEKKHGEDWGKVYDEAWERIDKKVEGLSKHIKLEEERRSEDAQSKAALTDWLRAKASFVIEGLKEADKDEFCRCELKLQKWYGDLRGKPFAIEAENSILDISGFSKQYNCAFIWQKDGVKKLNLYLIINYFKGGKLRFKKIKPEAFEANRFYTVINKKSGEIVPMEVNFNFDDPNLIILPLAFGKRQGREFIWNDLLSLETGSLKLANGRVIEKTLYNRRTRQDEPALFVALTFERREVLDSSNIKPMNLIGVDRGENIPAVIALTDPEGCPLSRFKDSLGNPTHILRIGESYKEKQRTIQAKKEVEQRRAGGYSRKYASKAKNLADDMVRNTARDLLYYAVTQDAMLIFENLSRGFGRQGKRTFMAERQYTRMEDWLTAKLAYEGLPSKTYLSKTLAQYTSKTCSNCGFTITSADYDRVLEKLKKTATGWMTTINGKELKVEGQITYYNRYKRQNVVKDLSVELDRLSEESVNNDISSWTKGRSGEALSLLKKRFSHRPVQEKFVCLNCGFETHADEQAALNIARSWLFLRSQEYKKYQTNKTTGKNTDKRAFVETWQSFYRKKLKEVWKPAV

SEQ ID NO: 33437 - protein, 979 aa, synthetic construct
  REGION 1..979: note = engineered CasX variant
QEIKRINGIRRRLVKDSNTKKAGKTGPMKTLLVRVMTPDLRERLENLRKKPENIPQPISNTSRANLNKLLTDYTEMKKAILHVYWEEFQKDPVGLMSRVAQPASKKIDQNKLKPEMDEKGNLTTAGFACSQCGQPLFVYKLEQVSEKGKAYTNYFGRCNVAEHEKLIKLAQLKPEKDSDEAVTYSLGKFGQRALDFYSIHVTKESTHPVKPLAQIAGNRYASGPVGKALSDACMGTIASFLSKYQDIIIEHQKVVKGNQKRLESLRELAGKENLEYPSVTLPPQPHTKEGVDAYNEVIARVRMWVNLNLWQKLKLSRDDAKPLLRLKGFPSFPLVERQANEVDWWDMVCNVKKLINEKKEDGKVFWQNLAGYKRQEALRPYLSSEEDRKKGKKFARYQLGDLLLHLEKKHGEDWGKVYDEAWERIDKKVEGLSKHIKLEEERRSEDAQSKAALTDWLRAKASFVIEGLKEADKDEFCRCELKLQKWYGDLRGKPFAIEAENSILDISGFSKQYNCAFIWQKDGVKKLNLYLIINYFKGGKLRFKKIKPEAFEANRFYTVINKKSGEIVPMEVNFNFDDPNLIILPLAFGKRQGREFIWNDLLSLETGSLKLANGRVIEKTLYNRRTRQDEPALFVALTFERREVLDSSNIKPMNLIGVDRGENIPAVIALTDPEGCPLSRFKDSLGNPTHILRIGESYKEKQRTIQAKKEVEQRRAGGYSRKYASKAKNLADDMVRNTARDLLYYAVTQDAMLIFENLSRGFGRQGKRTFMAERQYTRMEDWLTAKLAYEGLPSKTYLSKTLAQYTSKTCSNCGFTITSADYDRVLEKLKKTATGWMTTINGKELKVEGQITYYNRYKRQNVVKDLSVELDRLSEESVNNDISSWTKGRSGEALSLLKKRFSHRPVQEKFVCLNCGFETHADEQAALNIARSWLFLRSQEYKKYQTNKTTGKNTDKRAFVETWQSFYRKKLKEVWKPAV

SEQ ID NO: 33438 - protein, 978 aa, synthetic construct
  REGION 1..978: note = engineered CasX variant
QEIKRINGIRRRLVKDSNTKKAGKTGPMKTLLVRVMTPDLRERLENLRKKPENIPQPISNTSRANLNKLLTDYTEMKKAILHVYWEEFQKDPVGLMSRVAQPASKKIDQNKLKPEMDEKGNLTTAGFACSQCGQPLFVYKLEQVSEKGKAYTNYFGRCNVAEHEKLILLAQLKPEKDSDEAVTYSLGKFGQRALDFYSIHVTKESTHPVKPLAQIAGNRYASPVGKALSDACMGTIASFLSKYQDIIIEHQKVVKGNQKRLESLRELAGKENLEYPSVTLPPQPHTKEGVDAYNEVIARVRMWVNLNLWQKLKLSRDDAKPLLRLKGFPSFPLVERQANEVDWWDMVCNVKKLINEKKEDGKVFWQNLAGYKRQEALRPYLSSEEDRKKGKKFARYQLGDLLLHLEKKHGEDWGKVYDEAWERIDKKVEGLSKHIKLEEERRSEDAQSKAALTDWLRAKASFVIEGLKEADKDEFCRCELKLQKWYGDLRGKPFAIEAENSILDISGFSKQYNCAFIWQKDGVKKLNLYLIINYFKGGKLRFKKIKPEAFEANRFYTVINKKSGEIVPMEVNFNFDDPNLIILPLAFGKRQGREFIWNDLLSLETGSLKLANGRVIEKTLYNRRTRQDEPALFVALTFERREVLDSSNIKPMNLIGVDRGENIPAVIALTDPEGCPLSRFKDSLGNPTHILRIGESYKEKQRTIQAKKEVEQRRAGGYSRKYASKAKNLADDMVRNTARDLLYYAVTQDAMLIFENLSRGFGRQGKRTFMAERQYTRMEDWLTAKLAYEGLPSKTYLSKTLAQYTSKTCSNCGFTITSADYDRVLEKLKKTATGWMTTINGKELKVEGQITYYNRYKRQNVVKDLSVELDRLSEESVNNDISSWTKGRSGEALSLLKKRFSHRPVQEKFVCLNCGFETHADEQAALNIARSWLFLRSQEYKKYQTNKTTGKNTDKRAFVETWQSFYRKKLKEVWKPAV

SEQ ID NO: 33439 - protein, 978 aa, synthetic construct
  REGION 1..978: note = engineered CasX variant
QEIKRINGIRRRLVKDSNTKKAGKTGPMKTLLVRVMTPDLRERLENLRKKPENIPQPISNTSRANLNKLLTDYTEMKKAILHVYWEEFQKDPVGLMSRVAQPASKKIDQNKLKPEMDEKGNLTTAGFACSQCGQPLFVYKLEQVSEKGKAYTNYFGRCNVAEHEKLILLAQLKPEKDSDEAVTYSLGKFGQRALDFYSIHVTKESTHPVKPLAQIAGNRYASYPVGKALSDACMGTIASFLSKYQDIIIEHQKVVKGNQKRLESLRELAGKENLEYPSVTLPPQPHTKEGVDAYNEVIARVRMWVNLNLWQKLKLSRDDAKPLLRLKKFPSFPLVERQANEVDWWDMVCNVKKLINEKKEDGKVFWQNLAGYKRQEALRPYLSSEEDRKKGKKFARYQLGDLLLHLEKKHGEDWGKVYDEAWERIDKKVEGLSKHIKLEEERRSEDAQSKAALTDWLRAKASFVIEGLKEADKDEFCRCELKLQKWYGDLRGKPFAIEAENSILDISGFSKQYNCAFIWQKDGVKKLNLYLIINYFKGGKLRFKKIKPEAFEANRFYTVINKKSGEIVPMEVNFNFDDPNLIILPLAFGKRQGREFIWNDLLSLETGSLKLANGRVIEKTLYNRRTRQDEPALFVALTFERREVLDSSNIKPMNLIGVDRGENIPAVIALTDPEGCPLSRFKDSLGNPTHILRIGESYKEKQRTIQAKKEVEQRRAGGYSRKYASKAKNLADDMVRNTARDLLYYAVTQDAMLIFENLSRGFGRQGKRTFMAERQYTRMEDWLTAKLAYEGLPSKTYLSKTLAQYTSKTCSNCGFTITSADYDRVLEKLKKTATGWMTTINGKELKVEGQITYYNRYKRQNVVKDLSVELDRLSEESVNNDISSWTKGRSGEALSLLKKRFSHRPVQEKFVCLNCGFETHADEQAALNIARSWLFLRSQEYKKYQTNKTTGNTDKRAFVETWQSFYRKKLKEVWKPAV

SEQ ID NO: 33440 - protein, 978 aa, synthetic construct
  REGION 1..978: note = engineered CasX variant
QEIKRINGIRRRLVKDSNTKKAGKTGPMKTLLVRVMTPDLRERLENLRKKPENIPQPISNTSRANLNKLLTDYTEMKKAILHVYWEEFQKDPVGLMSRVAQPASKKIDQNKLKPEMDEKGNLTTAGFACSQCGQPLFVYKLEQVSEKGKAYTNYFGRCNVAEHEKLILLAQLKPEKDSDEAVTYSLGKFGQRALDFYSIHVTKESTHPVKPLAQIAGNRYASHPVGKALSDACMGTIASFLSKYQDIIIEHQKVVKGNQKRLESLRELAGKENLEYPSVTLPPQPHTKEGVDAYNEVIARVRMWVNLNLWQKLKLSRDDAKPLLRLKKFPSFPLVERQANEVDWWDMVCNVKKLINEKKEDGKVFWQNLAGYKRQEALRPYLSSEEDRKKGKKFARYQLGDLLLHLEKKHGEDWGKVYDEAWERIDKKVEGLSKHIKLEEERRSEDAQSKAALTDWLRAKASFVIEGLKEADKDEFCRCELKLQKWYGDLRGKPFAIEAENSILDISGFSKQYNCAFIWQKDGVKKLNLYLIINYFKGGKLRFKKIKPEAFEANRFYTVINKKSGEIVPMEVNFNFDDPNLIILPLAFGKRQGREFIWNDLLSLETGSLKLANGRVIEKTLYNRRTRQDEPALFVALTFERREVLDSSNIKPMNLIGVDRGENIPAVIALTDPEGCPLSRFKDSLGNPTHILRIGESYKEKQRTIQAKKEVEQRRAGGYSRKYASKAKNLADDMVRNTARDLLYYAVTQDAMLIFENLSRGFGRQGKRTFMAERQYTRMEDWLTAKLAYEGLPSKTYLSKTLAQYTSKTCSNCGFTITSADYDRVLEKLKKTATGWMTTINGKELKVEGQITYYNRYKRQNVVKDLSVELDRLSEESVNNDISSWTKGRSGEALSLLKKRFSHRPVQEKFVCLNCGFETHADEQAALNIARSWLFLRSQEYKKYQTNKTTGNTDKRAFVETWQSFYRKKLKEVWKPAV

SEQ ID NO: 33441 - protein, 978 aa, synthetic construct
  REGION 1..978: note = engineered CasX variant
QEIKRINGIRRRLVKDSNTKKAGKTGPMKTLLVRVMTPDLRERLENLRKKPENIPQPISNTSRANLNKLLTDYTEMKKAILHVYWEEFQKDPVGLMSRVAQPASKKIDQNKLKPEMDEKGNLTTAGFACSQCGQPLFVYKLEQVSEKGKAYTNYFGRCNVAEHEKLILLAQLKPEKDSDEAVTYSLGKFGQRALDFYSIHVTKESTHPVKPLAQIAGNRYASSPVGKALSDACMGTIASFLSKYQDIIIEHQKVVKGNQKRLESLRELAGKENLEYPSVTLPPQPHTKEGVDAYNEVIARVRMWVNLNLWQKLKLSRDDAKPLLRLKKFPSFPLVERQANEVDWWDMVCNVKKLINEKKEDGKVFWQNLAGYKRQEALRPYLSSEEDRKKGKKFARYQLGDLLLHLEKKHGEDWGKVYDEAWERIDKKVEGLSKHIKLEEERRSEDAQSKAALTDWLRAKASFVIEGLKEADKDEFCRCELKLQKWYGDLRGKPFAIEAENSILDISGFSKQYNCAFIWQKDGVKKLNLYLIINYFKGGKLRFKKIKPEAFEANRFYTVINKKSGEIVPMEVNFNFDDPNLIILPLAFGKRQGREFIWNDLLSLETGSLKLANGRVIEKTLYNRRTRQDEPALFVALTFERREVLDSSNIKPMNLIGVDRGENIPAVIALTDPEGCPLSRFKDSLGNPTHILRIGESYKEKQRTIQAKKEVEQRRAGGYSRKYASKAKNLADDMVRNTARDLLYYAVTQDAMLIFENLSRGFGRQGKRTFMAERQYTRMEDWLTAKLAYEGLPSKTYLSKTLAQYTSKTCSNCGFTITSADYDRVLEKLKKTATGWMTTINGKELKVEGQITYYNRYKRQNVVKDLSVELDRLSEESVNNDISSWTKGRSGEALSLLKKRFSHRPVQEKFVCLNCGFETHADEQAALNIARSWLFLRSQEYKKYQTNKTTGNTDKRAFVETWQSFYRKKLKEVWKPAV

SEQ ID NO: 33442 - protein, 978 aa, synthetic construct
  REGION 1..978: note = engineered CasX variant
QEIKRINGIRRRLVKDSNTKKAGKTGPMKTLLVRVMTPDLRERLENLRKKPENIPQPISNTSRANLNKLLTDYTEMKKAILHVYWEEFQKDPVGLMSRVAQPASKKIDQNKLKPEMDEKGNLTTAGFACSQCGQPLFVYKLEQVSEKGKAYTNYFGRCNVAEHEKLILLAQLKPEKDSDEAVTYSLGKFGQRALDFYSIHVTKESTHPVKPLAQIAGNRYASTPVGKALSDACMGTIASFLSKYQDIIIEHQKVVKGNQKRLESLRELAGKENLEYPSVTLPPQPHTKEGVDAYNEVIARVRMWVNLNLWQKLKLSRDDAKPLLRLKKFPSFPLVERQANEVDWWDMVCNVKKLINEKKEDGKVFWQNLAGYKRQEALRPYLSSEEDRKKGKKFARYQLGDLLLHLEKKHGEDWGKVYDEAWERIDKKVEGLSKHIKLEEERRSEDAQSKAALTDWLRAKASFVIEGLKEADKDEFCRCELKLQKWYGDLRGKPFAIEAENSILDISGFSKQYNCAFIWQKDGVKKLNLYLIINYFKGGKLRFKKIKPEAFEANRFYTVINKKSGEIVPMEVNFNFDDPNLIILPLAFGKRQGREFIWNDLLSLETGSLKLANGRVIEKTLYNRRTRQDEPALFVALTFERREVLDSSNIKPMNLIGVDRGENIPAVIALTDPEGCPLSRFKDSLGNPTHILRIGESYKEKQRTIQAKKEVEQRRAGGYSRKYASKAKNLADDMVRNTARDLLYYAVTQDAMLIFENLSRGFGRQGKRTFMAERQYTRMEDWLTAKLAYEGLPSKTYLSKTLAQYTSKTCSNCGFTITSADYDRVLEKLKKTATGWMTTINGKELKVEGQITYYNRYKRQNVVKDLSVELDRLSEESVNNDISSWTKGRSGEALSLLKKRFSHRPVQEKFVCLNCGFETHADEQAALNIARSWLFLRSQEYKKYQTNKTTGNTDKRAFVETWQSFYRKKLKEVWKPAV

SEQ ID NO: 33443 - protein, 978 aa, synthetic construct
  REGION 1..978: note = engineered CasX variant
QEIKRINGIRRRLVKDSNTKKAGKTGPMKTLLVRVMTPDLRERLENLRKKPENIPQPISNTSRANLNKLLTDYTEMKKAILHVYWEEFQKDPVGLMSRVAQPASKKIDQNKLKPEMDEKGNLTTAGFACSQCGQPLFVYKLEQVSEKGKAYTNYFGRCNVAEHEKLILLAQLKPEKDSDEAVTYSLGKFGQRALDFYSIHVTKESTHPVKPLAQIAGNRYASAPVGKALSDACMGTIASFLSKYQDIIIEHQKVVKGNQKRLESLRELAGKENLEYPSVTLPPQPHTKEGVDAYNEVIARVRMWVNLNLWQKLKLSRDDAKPLLRLKKFPSFPLVERQANEVDWWDMVCNVKKLINEKKEDGKVFWQNLAGYKRQEALRPYLSSEEDRKKGKKFARYQLGDLLLHLEKKHGEDWGKVYDEAWERIDKKVEGLSKHIKLEEERRSEDAQSKAALTDWLRAKASFVIEGLKEADKDEFCRCELKLQKWYGDLRGKPFAIEAENSILDISGFSKQYNCAFIWQKDGVKKLNLYLIINYFKGGKLRFKKIKPEAFEANRFYTVINKKSGEIVPMEVNFNFDDPNLIILPLAFGKRQGREFIWNDLLSLETGSLKLANGRVIEKTLYNRRTRQDEPALFVALTFERREVLDSSNIKPMNLIGVDRGENIPAVIALTDPEGCPLSRFKDSLGNPTHILRIGESYKEKQRTIQAKKEVEQRRAGGYSRKYASKAKNLADDMVRNTARDLLYYAVTQDAMLIFENLSRGFGRQGKRTFMAERQYTRMEDWLTAKLAYEGLPSKTYLSKTLAQYTSKTCSNCGFTITSADYDRVLEKLKKTATGWMTTINGKELKVEGQITYYNRYKRQNVVKDLSVELDRLSEESVNNDISSWTKGRSGEALSLLKKRFSHRPVQEKFVCLNCGFETHADEQAALNIARSWLFLRSQEYKKYQTNKTTGNTDKRAFVETWQSFYRKKLKEVWKPAV

SEQ ID NO: 33444 - protein, 978 aa, synthetic construct
  REGION 1..978: note = engineered CasX variant
QEIKRINGIRRRLVKDSNTKKAGKTGPMKTLLVRVMTPDLRERLENLRKKPENIPQPISNTSRANLNKLLTDYTEMKKAILHVYWEEFQKDPVGLMSRVAQPASKKIDQNKLKPEMDEKGNLTTAGFACSQCGQPLFVYKLEQVSEKGKAYTNYFGRCNVAEHEKLILLAQLKPEKDSDEAVTYSLGKFGQRALDFYSIHVTKESTHPVKPLAQIAGNRYASVPVGKALSDACMGTIASFLSKYQDIIIEHQKVVKGNQKRLESLRELAGKENLEYPSVTLPPQPHTKEGVDAYNEVIARVRMWVNLNLWQKLKLSRDDAKPLLRLKKFPSFPLVERQANEVDWWDMVCNVKKLINEKKEDGKVFWQNLAGYKRQEALRPYLSSEEDRKKGKKFARYQLGDLLLHLEKKHGEDWGKVYDEAWERIDKKVEGLSKHIKLEEERRSEDAQSKAALTDWLRAKASFVIEGLKEADKDEFCRCELKLQKWYGDLRGKPFAIEAENSILDISGFSKQYNCAFIWQKDGVKKLNLYLIINYFKGGKLRFKKIKPEAFEANRFYTVINKKSGEIVPMEVNFNFDDPNLIILPLAFGKRQGREFIWNDLLSLETGSLKLANGRVIEKTLYNRRTRQDEPALFVALTFERREVLDSSNIKPMNLIGVDRGENIPAVIALTDPEGCPLSRFKDSLGNPTHILRIGESYKEKQRTIQAKKEVEQRRAGGYSRKYASKAKNLADDMVRNTARDLLYYAVTQDAMLIFENLSRGFGRQGKRTFMAERQYTRMEDWLTAKLAYEGLPSKTYLSKTLAQYTSKTCSNCGFTITSADYDRVLEKLKKTATGWMTTINGKELKVEGQITYYNRYKRQNVVKDLSVELDRLSEESVNNDISSWTKGRSGEALSLLKKRFSHRPVQEKFVCLNCGFETHADEQAALNIARSWLFLRSQEYKKYQTNKTTGNTDKRAFVETWQSFYRKKLKEVWKPAV

SEQ ID NO: 33445 - protein, 978 aa, synthetic construct
  REGION 1..978: note = engineered CasX variant
QEIKRINGIRRRLVKDSNTKKAGKTGPMKTLLVRVMTPDLRERLENLRKKPENIPQPISNTSRANLNKLLTDYTEMKKAILHVYWEEFQKDPVGLMSRVAQPASKKIDQNKLKPEMDEKGNLTTAGFACSQCGQPLFVYKLEQVSEKGKAYTNYFGRCNVAEHEKLIKLAQLKPEKDSDEAVTYSLGKFGQRALDFYSIHVTKESTHPVKPLAQIAGNRYASGPVGKALSDACMGTIASFLSKYQDIIIEHQKVVKGNQKRLESLRELAGKENLEYPSVTLPPQPHTKEGVDAYNEVIARVRMWVNLNLWQKLKLSRDDAKPLLRLKKFPSFPLVERQANEVDWWDMVCNVKKLINEKKEDGKVFWQNLAGYKRQEALRPYLSSEEDRKKGKKFARYQLGDLLLHLEKKHGEDWGKVYDEAWERIDKKVEGLSKHIKLEEERRSEDAQSKAALTDWLRAKASFVIEGLKEADKDEFCRCELKLQKWYGDLRGKPFAIEAENSILDISGFSKQYNCAFIWQKDGVKKLNLYLIINYFKGGKLRFKKIKPEAFEANRFYTVINKKSGEIVPMEVNFNFDDPNLIILPLAFGKRQGREFIWNDLLSLETGSLKLANGRVIEKTLYNRRTRQDEPALFVALTFERREVLDSSNIKPMNLIGVDRGENIPAVIALTDPEGCPLSRFKDSLGNPTHILRIGESYKEKQRTIQAKKEVEQRRAGGYSRKYASKAKNLADDMVRNTARDLLYYAVTQDAMLIFENLSRGFGRQGKRTFMAERQYTRMEDWLTAKLAYEGLPSKTYLSKTLAQYTSKTCSNCGFTITSADYDRVLEKLKKTATGWMTTINGKELKVEGQITYYNRYKRQNVVKDLSVELDRLSEESVNNDISSWTKGRSGEALSLLKKRFSHRPVQEKFVCLNCGFETHADEQAALNIARSWLFLRSQEYKKYQTNKTTGNTDKRAFVETWQSFYRKKLKEVWKPAV

SEQ ID NO: 33446 - protein, 977 aa, synthetic construct
  REGION 1..977: note = engineered CasX variant
QEIKRINGIRRRLVKDSNTKKAGKTGPMKTLLVRVMTPDLRERLENLRKKPENIPQPISNTSRANLNKLLTDYTEMKKAILHVYWEEFQKDPVGLMSRVAQPASKKIDQNKLKPEMDEKGNLTTAGFACSQCGQPLFVYKLEQVSEKGKAYTNYFGRCNVAEHEKLILLAQLKPEKDSDEAVTYSLGKFGQRALDFYSIHVTKESTHPVKPLAQIAGNRYASPVGKALSDACMGTIASFLSKYQDIIIEHQKVVKGNQKRLESLRELAGKENLEYPSVTLPPQPHTKEGVDAYNEVIARVRMWVNLNLWQKLKLSRDDAKPLLRLKKFPSFPLVERQANEVDWWDMVCNVKKLINEKKEDGKVFWQNLAGYKRQEALRPYLSSEEDRKKGKKFARYQLGDLLLHLEKKHGEDWGKVYDEAWERIDKKVEGLSKHIKLEEERRSEDAQSKAALTDWLRAKASFVIEGLKEADKDEFCRCELKLQKWYGDLRGKPFAIEAENSILDISGFSKQYNCAFIWQKDGVKKLNLYLIINYFKGGKLRFKKIKPEAFEANRFYTVINKKSGEIVPMEVNFNFDDPNLIILPLAFGKRQGREFIWNDLLSLETGSLKLANGRVIEKTLYNRRTRQDEPALFVALTFERREVLDSSNIKPMNLIGVDRGENIPAVIALTDPEGCPLSRFKDSLGNPTHILRIGESYKEKQRTIQAKKEVEQRRAGGYSRKYASKAKNLADDMVRNTARDLLYYAVTQDAMLIFENLSRGFGRQGKRTFMAERQYTRMEDWLTAKLAYEGLPSKTYLSKTLAQYTSKTCSNCGFTITSADYDRVLEKLKKTATGWMTTINGKELKVEGQITYYNRYKRQNVVKDLSVELDRLSEESVNNDISSWTKGRSGEALSLLKKRFSHRPVQEKFVCLNCGFETHADEQAALNIARSWLFLRSQEYKKYQTNKTTGNTDKRAFVETWQSFYRKKLKEVWKPAV

SEQ ID NO: 33447 - protein, 978 aa, synthetic construct
  REGION 1..978: note = engineered CasX variant
QEIKRINGIRRRLVKDSNTKKAGKTGPMKTLLVRVMTPDLRERLENLRKKPENIPQPISNTSRANLNKLLTDYTEMKKAILHVYWEEFQKDPVGLMSRVAQPASKKIDQNKLKPEMDEKGNLTTAGFACSQCGQPLFVYKLEQVSEKGKAYTNYFGRCNVAEHEKLILLAQLKPEKDSDEAVTYSLGKFGQRALDFYSIHVTKESTHPVKPLAQIAGNRYASYPVGKALSDACMGTIASFLSKYQDIIIEHQKVVKGNQKRLESLRELAGKENLEYPSVTLPPQPHTKEGVDAYNEVIARVRMWVNLNLWQKLKLSRDDAKPLLRLKGFPSFPLVERQANEVDWWDMVCNVKKLINEKKEDGKVFWQNLAGYKRQEALRPYLSSEEDRKKGKKFARYQLGDLLLHLEKKHGEDWGKVYDEAWERIDKKVEGLSKHIKLEEERRSEDAQSKAALTDWLRAKASFVIEGLKEADKDEFCRCELKLQKWYGDLRGKPFAIEAENSILDISGFSKQYNCAFIWQKDGVKKLNLYLIINYFKGGKLRFKKIKPEAFEANRFYTVINKKSGEIVPMEVNFNFDDPNLIILPLAFGKRQGREFIWNDLLSLETGSLKLANGRVIEKTLYNRRTRQDEPALFVALTFERREVLDSSNIKPMNLIGVDRGENIPAVIALTDPEGCPLSRFKDSLGNPTHILRIGERYKEKQRTIQAKKEVEQRRAGGYSRKYASKAKNLADDMVRNTARDLLYYAVTQDAMLIFENLSRGFGRQGKRTFMAERQYTRMEDWLTAKLAYEGLPSKTYLSKTLAQYTSKTCSNCGFTITSADYDRVLEKLKKTATGWMTTINGKELKVEGQITYYNRYKRQNVVKDLSVELDRLSEESVNNDISSWTKGRSGEALSLLKKRFSHRPVQEKFVCLNCGFETHADEQAALNIARSWLFLRSQEYKKYQTNKTTGNTDKRAFVETWQSFYRKKLKEVWKPAV

SEQ ID NO: 33448 - protein, 978 aa, synthetic construct
  REGION 1..978: note = engineered CasX variant
QEIKRINGIRRRLVKDSNTKKAGKTGPMKTLLVRVMTPDLRERLENLRKKPENIPQPISNTSRANLNKLLTDYTEMKKAILHVYWEEFQKDPVGLMSRVAQPASKKIDQNKLKPEMDEKGNLTTAGFACSQCGQPLFVYKLEQVSEKGKAYTNYFGRCNVAEHEKLILLAQLKPEKDSDEAVTYSLGKFGQRALDFYSIHVTKESTHPVKPLAQIAGNRYASHPVGKALSDACMGTIASFLSKYQDIIIEHQKVVKGNQKRLESLRELAGKENLEYPSVTLPPQPHTKEGVDAYNEVIARVRMWVNLNLWQKLKLSRDDAKPLLRLKGFPSFPLVERQANEVDWWDMVCNVKKLINEKKEDGKVFWQNLAGYKRQEALRPYLSSEEDRKKGKKFARYQLGDLLLHLEKKHGEDWGKVYDEAWERIDKKVEGLSKHIKLEEERRSEDAQSKAALTDWLRAKASFVIEGLKEADKDEFCRCELKLQKWYGDLRGKPFAIEAENSILDISGFSKQYNCAFIWQKDGVKKLNLYLIINYFKGGKLRFKKIKPEAFEANRFYTVINKKSGEIVPMEVNFNFDDPNLIILPLAFGKRQGREFIWNDLLSLETGSLKLANGRVIEKTLYNRRTRQDEPALFVALTFERREVLDSSNIKPMNLIGVDRGENIPAVIALTDPEGCPLSRFKDSLGNPTHILRIGERYKEKQRTIQAKKEVEQRRAGGYSRKYASKAKNLADDMVRNTARDLLYYAVTQDAMLIFENLSRGFGRQGKRTFMAERQYTRMEDWLTAKLAYEGLPSKTYLSKTLAQYTSKTCSNCGFTITSADYDRVLEKLKKTATGWMTTINGKELKVEGQITYYNRYKRQNVVKDLSVELDRLSEESVNNDISSWTKGRSGEALSLLKKRFSHRPVQEKFVCLNCGFETHADEQAALNIARSWLFLRSQEYKKYQTNKTTGNTDKRAFVETWQSFYRKKLKEVWKPAV

SEQ ID NO: 33449 - protein, 978 aa, synthetic construct
  REGION 1..978: note = engineered CasX variant
QEIKRINGIRRRLVKDSNTKKAGKTGPMKTLLVRVMTPDLRERLENLRKKPENIPQPISNTSRANLNKLLTDYTEMKKAILHVYWEEFQKDPVGLMSRVAQPASKKIDQNKLKPEMDEKGNLTTAGFACSQCGQPLFVYKLEQVSEKGKAYTNYFGRCNVAEHEKLILLAQLKPEKDSDEAVTYSLGKFGQRALDFYSIHVTKESTHPVKPLAQIAGNRYASSPVGKALSDACMGTIASFLSKYQDIIIEHQKVVKGNQKRLESLRELAGKENLEYPSVTLPPQPHTKEGVDAYNEVIARVRMWVNLNLWQKLKLSRDDAKPLLRLKGFPSFPLVERQANEVDWWDMVCNVKKLINEKKEDGKVFWQNLAGYKRQEALRPYLSSEEDRKKGKKFARYQLGDLLLHLEKKHGEDWGKVYDEAWERIDKKVEGLSKHIKLEEERRSEDAQSKAALTDWLRAKASFVIEGLKEADKDEFCRCELKLQKWYGDLRGKPFAIEAENSILDISGFSKQYNCAFIWQKDGVKKLNLYLIINYFKGGKLRFKKIKPEAFEANRFYTVINKKSGEIVPMEVNFNFDDPNLIILPLAFGKRQGREFIWNDLLSLETGSLKLANGRVIEKTLYNRRTRQDEPALFVALTFERREVLDSSNIKPMNLIGVDRGENIPAVIALTDPEGCPLSRFKDSLGNPTHILRIGERYKEKQRTIQAKKEVEQRRAGGYSRKYASKAKNLADDMVRNTARDLLYYAVTQDAMLIFENLSRGFGRQGKRTFMAERQYTRMEDWLTAKLAYEGLPSKTYLSKTLAQYTSKTCSNCGFTITSADYDRVLEKLKKTATGWMTTINGKELKVEGQITYYNRYKRQNVVKDLSVELDRLSEESVNNDISSWTKGRSGEALSLLKKRFSHRPVQEKFVCLNCGFETHADEQAALNIARSWLFLRSQEYKKYQTNKTTGNTDKRAFVETWQSFYRKKLKEVWKPAV

SEQ ID NO: 33450 - protein, 978 aa, synthetic construct
  REGION 1..978: note = engineered CasX variant
QEIKRINGIRRRLVKDSNTKKAGKTGPMKTLLVRVMTPDLRERLENLRKKPENIPQPISNTSRANLNKLLTDYTEMKKAILHVYWEEFQKDPVGLMSRVAQPASKKIDQNKLKPEMDEKGNLTTAGFACSQCGQPLFVYKLEQVSEKGKAYTNYFGRCNVAEHEKLILLAQLKPEKDSDEAVTYSLGKFGQRALDFYSIHVTKESTHPVKPLAQIAGNRYASTPVGKALSDACMGTIASFLSKYQDIIIEHQKVVKGNQKRLESLRELAGKENLEYPSVTLPPQPHTKEGVDAYNEVIARVRMWVNLNLWQKLKLSRDDAKPLLRLKGFPSFPLVERQANEVDWWDMVCNVKKLINEKKEDGKVFWQNLAGYKRQEALRPYLSSEEDRKKGKKFARYQLGDLLLHLEKKHGEDWGKVYDEAWERIDKKVEGLSKHIKLEEERRSEDAQSKAALTDWLRAKASFVIEGLKEADKDEFCRCELKLQKWYGDLRGKPFAIEAENSILDISGFSKQYNCAFIWQKDGVKKLNLYLIINYFKGGKLRFKKIKPEAFEANRFYTVINKKSGEIVPMEVNFNFDDPNLIILPLAFGKRQGREFIWNDLLSLETGSLKLANGRVIEKTLYNRRTRQDEPALFVALTFERREVLDSSNIKPMNLIGVDRGENIPAVIALTDPEGCPLSRFKDSLGNPTHILRIGERYKEKQRTIQAKKEVEQRRAGGYSRKYASKAKNLADDMVRNTARDLLYYAVTQDAMLIFENLSRGFGRQGKRTFMAERQYTRMEDWLTAKLAYEGLPSKTYLSKTLAQYTSKTCSNCGFTITSADYDRVLEKLKKTATGWMTTINGKELKVEGQITYYNRYKRQNVVKDLSVELDRLSEESVNNDISSWTKGRSGEALSLLKKRFSHRPVQEKFVCLNCGFETHADEQAALNIARSWLFLRSQEYKKYQTNKTTGNTDKRAFVETWQSFYRKKLKEVWKPAV

SEQ ID NO: 33451 - protein, 978 aa, synthetic construct
  REGION 1..978: note = engineered CasX variant
QEIKRINGIRRRLVKDSNTKKAGKTGPMKTLLVRVMTPDLRERLENLRKKPENIPQPISNTSRANLNKLLTDYTEMKKAILHVYWEEFQKDPVGLMSRVAQPASKKIDQNKLKPEMDEKGNLTTAGFACSQCGQPLFVYKLEQVSEKGKAYTNYFGRCNVAEHEKLILLAQLKPEKDSDEAVTYSLGKFGQRALDFYSIHVTKESTHPVKPLAQIAGNRYASAPVGKALSDACMGTIASFLSKYQDIIIEHQKVVKGNQKRLESLRELAGKENLEYPSVTLPPQPHTKEGVDAYNEVIARVRMWVNLNLWQKLKLSRDDAKPLLRLKGFPSFPLVERQANEVDWWDMVCNVKKLINEKKEDGKVFWQNLAGYKRQEALRPYLSSEEDRKKGKKFARYQLGDLLLHLEKKHGEDWGKVYDEAWERIDKKVEGLSKHIKLEEERRSEDAQSKAALTDWLRAKASFVIEGLKEADKDEFCRCELKLQKWYGDLRGKPFAIEAENSILDISGFSKQYNCAFIWQKDGVKKLNLYLIINYFKGGKLRFKKIKPEAFEANRFYTVINKKSGEIVPMEVNFNFDDPNLIILPLAFGKRQGREFIWNDLLSLETGSLKLANGRVIEKTLYNRRTRQDEPALFVALTFERREVLDSSNIKPMNLIGVDRGENIPAVIALTDPEGCPLSRFKDSLGNPTHILRIGERYKEKQRTIQAKKEVEQRRAGGYSRKYASKAKNLADDMVRNTARDLLYYAVTQDAMLIFENLSRGFGRQGKRTFMAERQYTRMEDWLTAKLAYEGLPSKTYLSKTLAQYTSKTCSNCGFTITSADYDRVLEKLKKTATGWMTTINGKELKVEGQITYYNRYKRQNVVKDLSVELDRLSEESVNNDISSWTKGRSGEALSLLKKRFSHRPVQEKFVCLNCGFETHADEQAALNIARSWLFLRSQEYKKYQTNKTTGNTDKRAFVETWQSFYRKKLKEVWKPAV

SEQ ID NO: 33452 - protein, 978 aa, synthetic construct
  REGION 1..978: note = engineered CasX variant
QEIKRINGIRRRLVKDSNTKKAGKTGPMKTLLVRVMTPDLRERLENLRKKPENIPQPISNTSRANLNKLLTDYTEMKKAILHVYWEEFQKDPVGLMSRVAQPASKKIDQNKLKPEMDEKGNLTTAGFACSQCGQPLFVYKLEQVSEKGKAYTNYFGRCNVAEHEKLILLAQLKPEKDSDEAVTYSLGKFGQRALDFYSIHVTKESTHPVKPLAQIAGNRYASVPVGKALSDACMGTIASFLSKYQDIIIEHQKVVKGNQKRLESLRELAGKENLEYPSVTLPPQPHTKEGVDAYNEVIARVRMWVNLNLWQKLKLSRDDAKPLLRLKGFPSFPLVERQANEVDWWDMVCNVKKLINEKKEDGKVFWQNLAGYKRQEALRPYLSSEEDRKKGKKFARYQLGDLLLHLEKKHGEDWGKVYDEAWERIDKKVEGLSKHIKLEEERRSEDAQSKAALTDWLRAKASFVIEGLKEADKDEFCRCELKLQKWYGDLRGKPFAIEAENSILDISGFSKQYNCAFIWQKDGVKKLNLYLIINYFKGGKLRFKKIKPEAFEANRFYTVINKKSGEIVPMEVNFNFDDPNLIILPLAFGKRQGREFIWNDLLSLETGSLKLANGRVIEKTLYNRRTRQDEPALFVALTFERREVLDSSNIKPMNLIGVDRGENIPAVIALTDPEGCPLSRFKDSLGNPTHILRIGERYKEKQRTIQAKKEVEQRRAGGYSRKYASKAKNLADDMVRNTARDLLYYAVTQDAMLIFENLSRGFGRQGKRTFMAERQYTRMEDWLTAKLAYEGLPSKTYLSKTLAQYTSKTCSNCGFTITSADYDRVLEKLKKTATGWMTTINGKELKVEGQITYYNRYKRQNVVKDLSVELDRLSEESVNNDISSWTKGRSGEALSLLKKRFSHRPVQEKFVCLNCGFETHADEQAALNIARSWLFLRSQEYKKYQTNKTTGNTDKRAFVETWQSFYRKKLKEVWKPAV

SEQ ID NO: 33453 - protein, 978 aa, synthetic construct
  REGION 1..978: note = engineered CasX variant
QEIKRINGIRRRLVKDSNTKKAGKTGPMKTLLVRVMTPDLRERLENLRKKPENIPQPISNTSRANLNKLLTDYTEMKKAILHVYWEEFQKDPVGLMSRVAQPASKKIDQNKLKPEMDEKGNLTTAGFACSQCGQPLFVYKLEQVSEKGKAYTNYFGRCNVAEHEKLIKLAQLKPEKDSDEAVTYSLGKFGQRALDFYSIHVTKESTHPVKPLAQIAGNRYASGPVGKALSDACMGTIASFLSKYQDIIIEHQKVVKGNQKRLESLRELAGKENLEYPSVTLPPQPHTKEGVDAYNEVIARVRMWVNLNLWQKLKLSRDDAKPLLRLKGFPSFPLVERQANEVDWWDMVCNVKKLINEKKEDGKVFWQNLAGYKRQEALRPYLSSEEDRKKGKKFARYQLGDLLLHLEKKHGEDWGKVYDEAWERIDKKVEGLSKHIKLEEERRSEDAQSKAALTDWLRAKASFVIEGLKEADKDEFCRCELKLQKWYGDLRGKPFAIEAENSILDISGFSKQYNCAFIWQKDGVKKLNLYLIINYFKGGKLRFKKIKPEAFEANRFYTVINKKSGEIVPMEVNFNFDDPNLIILPLAFGKRQGREFIWNDLLSLETGSLKLANGRVIEKTLYNRRTRQDEPALFVALTFERREVLDSSNIKPMNLIGVDRGENIPAVIALTDPEGCPLSRFKDSLGNPTHILRIGERYKEKQRTIQAKKEVEQRRAGGYSRKYASKAKNLADDMVRNTARDLLYYAVTQDAMLIFENLSRGFGRQGKRTFMAERQYTRMEDWLTAKLAYEGLPSKTYLSKTLAQYTSKTCSNCGFTITSADYDRVLEKLKKTATGWMTTINGKELKVEGQITYYNRYKRQNVVKDLSVELDRLSEESVNNDISSWTKGRSGEALSLLKKRFSHRPVQEKFVCLNCGFETHADEQAALNIARSWLFLRSQEYKKYQTNKTTGNTDKRAFVETWQSFYRKKLKEVWKPAV

SEQ ID NO: 33454 - protein, 977 aa, synthetic construct
  REGION 1..977: note = engineered CasX variant
QEIKRINGIRRRLVKDSNTKKAGKTGPMKTLLVRVMTPDLRERLENLRKKPENIPQPISNTSRANLNKLLTDYTEMKKAILHVYWEEFQKDPVGLMSRVAQPASKKIDQNKLKPEMDEKGNLTTAGFACSQCGQPLFVYKLEQVSEKGKAYTNYFGRCNVAEHEKLILLAQLKPEKDSDEAVTYSLGKFGQRALDFYSIHVTKESTHPVKPLAQIAGNRYASPVGKALSDACMGTIASFLSKYQDIIIEHQKVVKGNQKRLESLRELAGKENLEYPSVTLPPQPHTKEGVDAYNEVIARVRMWVNLNLWQKLKLSRDDAKPLLRLKGFPSFPLVERQANEVDWWDMVCNVKKLINEKKEDGKVFWQNLAGYKRQEALRPYLSSEEDRKKGKKFARYQLGDLLLHLEKKHGEDWGKVYDEAWERIDKKVEGLSKHIKLEEERRSEDAQSKAALTDWLRAKASFVIEGLKEADKDEFCRCELKLQKWYGDLRGKPFAIEAENSILDISGFSKQYNCAFIWQKDGVKKLNLYLIINYFKGGKLRFKKIKPEAFEANRFYTVINKKSGEIVPMEVNFNFDDPNLIILPLAFGKRQGREFIWNDLLSLETGSLKLANGRVIEKTLYNRRTRQDEPALFVALTFERREVLDSSNIKPMNLIGVDRGENIPAVIALTDPEGCPLSRFKDSLGNPTHILRIGERYKEKQRTIQAKKEVEQRRAGGYSRKYASKAKNLADDMVRNTARDLLYYAVTQDAMLIFENLSRGFGRQGKRTFMAERQYTRMEDWLTAKLAYEGLPSKTYLSKTLAQYTSKTCSNCGFTITSADYDRVLEKLKKTATGWMTTINGKELKVEGQITYYNRYKRQNVVKDLSVELDRLSEESVNNDISSWTKGRSGEALSLLKKRFSHRPVQEKFVCLNCGFETHADEQAALNIARSWLFLRSQEYKKYQTNKTTGNTDKRAFVETWQSFYRKKLKEVWKPAV

SEQ ID NO: 33455 - protein, 978 aa, synthetic construct
  REGION 1..978: note = engineered CasX variant
QEIKRINGIRRRLVKDSNTKKAGKTGPMKTLLVRVMTPDLRERLENLRKKPENIPQPISNTSRANLNKLLTDYTEMKKAILHVYWEEFQKDPVGLMSRVAQPASKKIDQNKLKPEMDEKGNLTTAGFACSQCGQPLFVYKLEQVSEKGKAYTNYFGRCNVAEHEKLILLAQLKPEKDSDEAVTYSLGKFGQRALDFYSIHVTKESTHPVKPLAQIAGNRYASYPVGKALSDACMGTIASFLSKYQDIIIEHQKVVKGNQKRLESLRELAGKENLEYPSVTLPPQPHTKEGVDAYNEVIARVRMWVNLNLWQKLKLSRDDAKPLLRLKGFPSFPLVERQANEVDWWDMVCNVKKLINEKKEDGKVFWQNLAGYKRQEALRPYLSSEEDRKKGKKFARYQLGDLLLHLEKKHGEDWGKVYDEAWERIDKKVEGLSKHIKLEEERRSEDAQSKAALTDWLRAKASFVIEGLKEADKDEFCRCELKLQKWYGDLRGKPFAIEAENSILDISGFSKQYNCAFIWQKDGVKKLNLYLIINYFKGGKLRFKKIKPEAFEANRFYTVINKKSGEIVPMEVNFNFDDPNLIILPLAFGKRQGREFIWNDLLSLETGSLQLANGRVIEKTLYNRRTRQDEPALFVALTFERREVLDSSNIKPMNLIGVDRGENIPAVIALTDPEGCPLSRFKDSLGNPTHILRIGESYKEKQRTIQAKKEVEQRRAGGYSRKYASKAKNLADDMVRNTARDLLYYAVTQDAMLIFENLSRGFGRQGKRTFMAERQYTRMEDWLTAKLAYEGLPSKTYLSKTLAQYTSKTCSNCGFTITSADYDRVLEKLKKTATGWMTTINGKELKVEGQITYYNRYKRQNVVKDLSVELDRLSEESVNNDISSWTKGRSGEALSLLKKRFSHRPVQEKFVCLNCGFETHADEQAALNIARSWLFLRSQEYKKYQTNKTTGNTDKRAFVETWQSFYRKKLKEVWKPAV

SEQ ID NO: 33456 - protein, 978 aa, synthetic construct
  REGION 1..978: note = engineered CasX variant
QEIKRINGIRRRLVKDSNTKKAGKTGPMKTLLVRVMTPDLRERLENLRKKPENIPQPISNTSRANLNKLLTDYTEMKKAILHVYWEEFQKDPVGLMSRVAQPASKKIDQNKLKPEMDEKGNLTTAGFACSQCGQPLFVYKLEQVSEKGKAYTNYFGRCNVAEHEKLILLAQLKPEKDSDEAVTYSLGKFGQRALDFYSIHVTKESTHPVKPLAQIAGNRYASHPVGKALSDACMGTIASFLSKYQDIIIEHQKVVKGNQKRLESLRELAGKENLEYPSVTLPPQPHTKEGVDAYNEVIARVRMWVNLNLWQKLKLSRDDAKPLLRLKGFPSFPLVERQANEVDWWDMVCNVKKLINEKKEDGKVFWQNLAGYKRQEALRPYLSSEEDRKKGKKFARYQLGDLLLHLEKKHGEDWGKVYDEAWERIDKKVEGLSKHIKLEEERRSEDAQSKAALTDWLRAKASFVIEGLKEADKDEFCRCELKLQKWYGDLRGKPFAIEAENSILDISGFSKQYNCAFIWQKDGVKKLNLYLIINYFKGGKLRFKKIKPEAFEANRFYTVINKKSGEIVPMEVNFNFDDPNLIILPLAFGKRQGREFIWNDLLSLETGSLQLANGRVIEKTLYNRRTRQDEPALFVALTFERREVLDSSNIKPMNLIGVDRGENIPAVIALTDPEGCPLSRFKDSLGNPTHILRIGESYKEKQRTIQAKKEVEQRRAGGYSRKYASKAKNLADDMVRNTARDLLYYAVTQDAMLIFENLSRGFGRQGKRTFMAERQYTRMEDWLTAKLAYEGLPSKTYLSKTLAQYTSKTCSNCGFTITSADYDRVLEKLKKTATGWMTTINGKELKVEGQITYYNRYKRQNVVKDLSVELDRLSEESVNNDISSWTKGRSGEALSLLKKRFSHRPVQEKFVCLNCGFETHADEQAALNIARSWLFLRSQEYKKYQTNKTTGNTDKRAFVETWQSFYRKKLKEVWKPAV

SEQ ID NO: 33457 - protein, 978 aa, synthetic construct
  REGION 1..978: note = engineered CasX variant
QEIKRINGIRRRLVKDSNTKKAGKTGPMKTLLVRVMTPDLRERLENLRKKPENIPQPISNTSRANLNKLLTDYTEMKKAILHVYWEEFQKDPVGLMSRVAQPASKKIDQNKLKPEMDEKGNLTTAGFACSQCGQPLFVYKLEQVSEKGKAYTNYFGRCNVAEHEKLILLAQLKPEKDSDEAVTYSLGKFGQRALDFYSIHVTKESTHPVKPLAQIAGNRYASSPVGKALSDACMGTIASFLSKYQDIIIEHQKVVKGNQKRLESLRELAGKENLEYPSVTLPPQPHTKEGVDAYNEVIARVRMWVNLNLWQKLKLSRDDAKPLLRLKGFPSFPLVERQANEVDWWDMVCNVKKLINEKKEDGKVFWQNLAGYKRQEALRPYLSSEEDRKKGKKFARYQLGDLLLHLEKKHGEDWGKVYDEAWERIDKKVEGLSKHIKLEEERRSEDAQSKAALTDWLRAKASFVIEGLKEADKDEFCRCELKLQKWYGDLRGKPFAIEAENSILDISGFSKQYNCAFIWQKDGVKKLNLYLIINYFKGGKLRFKKIKPEAFEANRFYTVINKKSGEIVPMEVNFNFDDPNLIILPLAFGKRQGREFIWNDLLSLETGSLQLANGRVIEKTLYNRRTRQDEPALFVALTFERREVLDSSNIKPMNLIGVDRGENIPAVIALTDPEGCPLSRFKDSLGNPTHILRIGESYKEKQRTIQAKKEVEQRRAGGYSRKYASKAKNLADDMVRNTARDLLYYAVTQDAMLIFENLSRGFGRQGKRTFMAERQYTRMEDWLTAKLAYEGLPSKTYLSKTLAQYTSKTCSNCGFTITSADYDRVLEKLKKTATGWMTTINGKELKVEGQITYYNRYKRQNVVKDLSVELDRLSEESVNNDISSWTKGRSGEALSLLKKRFSHRPVQEKFVCLNCGFETHADEQAALNIARSWLFLRSQEYKKYQTNKTTGNTDKRAFVETWQSFYRKKLKEVWKPAV

SEQ ID NO: 33458 - protein, 978 aa, synthetic construct
  REGION 1..978: note = engineered CasX variant
QEIKRINGIRRRLVKDSNTKKAGKTGPMKTLLVRVMTPDLRERLENLRKKPENIPQPISNTSRANLNKLLTDYTEMKKAILHVYWEEFQKDPVGLMSRVAQPASKKIDQNKLKPEMDEKGNLTTAGFACSQCGQPLFVYKLEQVSEKGKAYTNYFGRCNVAEHEKLILLAQLKPEKDSDEAVTYSLGKFGQRALDFYSIHVTKESTHPVKPLAQIAGNRYASTPVGKALSDACMGTIASFLSKYQDIIIEHQKVVKGNQKRLESLRELAGKENLEYPSVTLPPQPHTKEGVDAYNEVIARVRMWVNLNLWQKLKLSRDDAKPLLRLKGFPSFPLVERQANEVDWWDMVCNVKKLINEKKEDGKVFWQNLAGYKRQEALRPYLSSEEDRKKGKKFARYQLGDLLLHLEKKHGEDWGKVYDEAWERIDKKVEGLSKHIKLEEERRSEDAQSKAALTDWLRAKASFVIEGLKEADKDEFCRCELKLQKWYGDLRGKPFAIEAENSILDISGFSKQYNCAFIWQKDGVKKLNLYLIINYFKGGKLRFKKIKPEAFEANRFYTVINKKSGEIVPMEVNFNFDDPNLIILPLAFGKRQGREFIWNDLLSLETGSLQLANGRVIEKTLYNRRTRQDEPALFVALTFERREVLDSSNIKPMNLIGVDRGENIPAVIALTDPEGCPLSRFKDSLGNPTHILRIGESYKEKQRTIQAKKEVEQRRAGGYSRKYASKAKNLADDMVRNTARDLLYYAVTQDAMLIFENLSRGFGRQGKRTFMAERQYTRMEDWLTAKLAYEGLPSKTYLSKTLAQYTSKTCSNCGFTITSADYDRVLEKLKKTATGWMTTINGKELKVEGQITYYNRYKRQNVVKDLSVELDRLSEESVNNDISSWTKGRSGEALSLLKKRFSHRPVQEKFVCLNCGFETHADEQAALNIARSWLFLRSQEYKKYQTNKTTGNTDKRAFVETWQSFYRKKLKEVWKPAV

SEQ ID NO: 33459 - protein, 978 aa, synthetic construct
  REGION 1..978: note = engineered CasX variant
QEIKRINGIRRRLVKDSNTKKAGKTGPMKTLLVRVMTPDLRERLENLRKKPENIPQPISNTSRANLNKLLTDYTEMKKAILHVYWEEFQKDPVGLMSRVAQPASKKIDQNKLKPEMDEKGNLTTAGFACSQCGQPLFVYKLEQVSEKGKAYTNYFGRCNVAEHEKLILLAQLKPEKDSDEAVTYSLGKFGQRALDFYSIHVTKESTHPVKPLAQIAGNRYASAPVGKALSDACMGTIASFLSKYQDIIIEHQKVVKGNQKRLESLRELAGKENLEYPSVTLPPQPHTKEGVDAYNEVIARVRMWVNLNLWQKLKLSRDDAKPLLRLKGFPSFPLVERQANEVDWWDMVCNVKKLINEKKEDGKVFWQNLAGYKRQEALRPYLSSEEDRKKGKKFARYQLGDLLLHLEKKHGEDWGKVYDEAWERIDKKVEGLSKHIKLEEERRSEDAQSKAALTDWLRAKASFVIEGLKEADKDEFCRCELKLQKWYGDLRGKPFAIEAENSILDISGFSKQYNCAFIWQKDGVKKLNLYLIINYFKGGKLRFKKIKPEAFEANRFYTVINKKSGEIVPMEVNFNFDDPNLIILPLAFGKRQGREFIWNDLLSLETGSLQLANGRVIEKTLYNRRTRQDEPALFVALTFERREVLDSSNIKPMNLIGVDRGENIPAVIALTDPEGCPLSRFKDSLGNPTHILRIGESYKEKQRTIQAKKEVEQRRAGGYSRKYASKAKNLADDMVRNTARDLLYYAVTQDAMLIFENLSRGFGRQGKRTFMAERQYTRMEDWLTAKLAYEGLPSKTYLSKTLAQYTSKTCSNCGFTITSADYDRVLEKLKKTATGWMTTINGKELKVEGQITYYNRYKRQNVVKDLSVELDRLSEESVNNDISSWTKGRSGEALSLLKKRFSHRPVQEKFVCLNCGFETHADEQAALNIARSWLFLRSQEYKKYQTNKTTGNTDKRAFVETWQSFYRKKLKEVWKPAV

SEQ ID NO: 33460 - protein, 978 aa, synthetic construct
  REGION 1..978: note = engineered CasX variant
QEIKRINGIRRRLVKDSNTKKAGKTGPMKTLLVRVMTPDLRERLENLRKKPENIPQPISNTSRANLNKLLTDYTEMKKAILHVYWEEFQKDPVGLMSRVAQPASKKIDQNKLKPEMDEKGNLTTAGFACSQCGQPLFVYKLEQVSEKGKAYTNYFGRCNVAEHEKLILLAQLKPEKDSDEAVTYSLGKFGQRALDFYSIHVTKESTHPVKPLAQIAGNRYASVPVGKALSDACMGTIASFLSKYQDIIIEHQKVVKGNQKRLESLRELAGKENLEYPSVTLPPQPHTKEGVDAYNEVIARVRMWVNLNLWQKLKLSRDDAKPLLRLKGFPSFPLVERQANEVDWWDMVCNVKKLINEKKEDGKVFWQNLAGYKRQEALRPYLSSEEDRKKGKKFARYQLGDLLLHLEKKHGEDWGKVYDEAWERIDKKVEGLSKHIKLEEERRSEDAQSKAALTDWLRAKASFVIEGLKEADKDEFCRCELKLQKWYGDLRGKPFAIEAENSILDISGFSKQYNCAFIWQKDGVKKLNLYLIINYFKGGKLRFKKIKPEAFEANRFYTVINKKSGEIVPMEVNFNFDDPNLIILPLAFGKRQGREFIWNDLLSLETGSLQLANGRVIEKTLYNRRTRQDEPALFVALTFERREVLDSSNIKPMNLIGVDRGENIPAVIALTDPEGCPLSRFKDSLGNPTHILRIGESYKEKQRTIQAKKEVEQRRAGGYSRKYASKAKNLADDMVRNTARDLLYYAVTQDAMLIFENLSRGFGRQGKRTFMAERQYTRMEDWLTAKLAYEGLPSKTYLSKTLAQYTSKTCSNCGFTITSADYDRVLEKLKKTATGWMTTINGKELKVEGQITYYNRYKRQNVVKDLSVELDRLSEESVNNDISSWTKGRSGEALSLLKKRFSHRPVQEKFVCLNCGFETHADEQAALNIARSWLFLRSQEYKKYQTNKTTGNTDKRAFVETWQSFYRKKLKEVWKPAV

SEQ ID NO: 33461 - protein, 978 aa, synthetic construct
  REGION 1..978: note = engineered CasX variant
QEIKRINGIRRRLVKDSNTKKAGKTGPMKTLLVRVMTPDLRERLENLRKKPENIPQPISNTSRANLNKLLTDYTEMKKAILHVYWEEFQKDPVGLMSRVAQPASKKIDQNKLKPEMDEKGNLTTAGFACSQCGQPLFVYKLEQVSEKGKAYTNYFGRCNVAEHEKLIKLAQLKPEKDSDEAVTYSLGKFGQRALDFYSIHVTKESTHPVKPLAQIAGNRYASGPVGKALSDACMGTIASFLSKYQDIIIEHQKVVKGNQKRLESLRELAGKENLEYPSVTLPPQPHTKEGVDAYNEVIARVRMWVNLNLWQKLKLSRDDAKPLLRLKGFPSFPLVERQANEVDWWDMVCNVKKLINEKKEDGKVFWQNLAGYKRQEALRPYLSSEEDRKKGKKFARYQLGDLLLHLEKKHGEDWGKVYDEAWERIDKKVEGLSKHIKLEEERRSEDAQSKAALTDWLRAKASFVIEGLKEADKDEFCRCELKLQKWYGDLRGKPFAIEAENSILDISGFSKQYNCAFIWQKDGVKKLNLYLIINYFKGGKLRFKKIKPEAFEANRFYTVINKKSGEIVPMEVNFNFDDPNLIILPLAFGKRQGREFIWNDLLSLETGSLQLANGRVIEKTLYNRRTRQDEPALFVALTFERREVLDSSNIKPMNLIGVDRGENIPAVIALTDPEGCPLSRFKDSLGNPTHILRIGESYKEKQRTIQAKKEVEQRRAGGYSRKYASKAKNLADDMVRNTARDLLYYAVTQDAMLIFENLSRGFGRQGKRTFMAERQYTRMEDWLTAKLAYEGLPSKTYLSKTLAQYTSKTCSNCGFTITSADYDRVLEKLKKTATGWMTTINGKELKVEGQITYYNRYKRQNVVKDLSVELDRLSEESVNNDISSWTKGRSGEALSLLKKRFSHRPVQEKFVCLNCGFETHADEQAALNIARSWLFLRSQEYKKYQTNKTTGNTDKRAFVETWQSFYRKKLKEVWKPAV

SEQ ID NO: 33462 - protein, 977 aa, synthetic construct
  REGION 1..977: note = engineered CasX variant
QEIKRINGIRRRLVKDSNTKKAGKTGPMKTLLVRVMTPDLRERLENLRKKPENIPQPISNTSRANLNKLLTDYTEMKKAILHVYWEEFQKDPVGLMSRVAQPASKKIDQNKLKPEMDEKGNLTTAGFACSQCGQPLFVYKLEQVSEKGKAYTNYFGRCNVAEHEKLILLAQLKPEKDSDEAVTYSLGKFGQRALDFYSIHVTKESTHPVKPLAQIAGNRYASPVGKALSDACMGTIASFLSKYQDIIIEHQKVVKGNQKRLESLRELAGKENLEYPSVTLPPQPHTKEGVDAYNEVIARVRMWVNLNLWQKLKLSRDDAKPLLRLKGFPSFPLVERQANEVDWWDMVCNVKKLINEKKEDGKVFWQNLAGYKRQEALRPYLSSEEDRKKGKKFARYQLGDLLLHLEKKHGEDWGKVYDEAWERIDKKVEGLSKHIKLEEERRSEDAQSKAALTDWLRAKASFVIEGLKEADKDEFCRCELKLQKWYGDLRGKPFAIEAENSILDISGFSKQYNCAFIWQKDGVKKLNLYLIINYFKGGKLRFKKIKPEAFEANRFYTVINKKSGEIVPMEVNFNFDDPNLIILPLAFGKRQGREFIWNDLLSLETGSLQLANGRVIEKTLYNRRTRQDEPALFVALTFERREVLDSSNIKPMNLIGVDRGENIPAVIALTDPEGCPLSRFKDSLGNPTHILRIGESYKEKQRTIQAKKEVEQRRAGGYSRKYASKAKNLADDMVRNTARDLLYYAVTQDAMLIFENLSRGFGRQGKRTFMAERQYTRMEDWLTAKLAYEGLPSKTYLSKTLAQYTSKTCSNCGFTITSADYDRVLEKLKKTATGWMTTINGKELKVEGQITYYNRYKRQNVVKDLSVELDRLSEESVNNDISSWTKGRSGEALSLLKKRFSHRPVQEKFVCLNCGFETHADEQAALNIARSWLFLRSQEYKKYQTNKTTGNTDKRAFVETWQSFYRKKLKEVWKPAV

SEQ ID NO: 33463 - protein, 978 aa, synthetic construct
  REGION 1..978: note = engineered CasX variant
QEIKRINKIRRRLVKDSNTKKAGKTGPMKTLLVPVMTPDLRERLENLRKKPPNIPQPISNTSRANLNKLLTDYTEMKKAILHVYWEEFQKDPVGLMSRVAQPASKKIDQNKLKPEMDEKGNLTTAGFACSQCGQPLFVYKLEQVSEKGKAYTNYFGRCNVAEHEKLILLAQLKPEKDSDEAVTYSLGKFGQRALDFYSIHVTKESTHPVKPLAQIAGNRYASYPVGKALSDACMGTIASFLSKYQDIIIEHQKVVKGNQKRLESLRELAGKENLEYPSVTLPPQPHTKEGVDAYNEVIARVRMWVNLNLWQKLKLSRDDAKPLLRLKGFPSFPLVERQANEVDWWDMVCNVKKLINEKKEDGKVFWQNLAGYKRQEALRPYLSSEEDRKKGKKFARYQLGDLLLHLEKKHGEDWGKVYDEAWERIDKKVEGLSKHIKLEEERRSEDAQSKAALTDWLRAKASFVIEGLKEADKDEFCRCELKLQKWYGDLRGKPFAIEAENSILDISGFSKQYNCAFIWQKDGVKKLNLYLIINYFKGGKLRFKKIKPEAFEANRFYTVINKKSGEIVPMEVNFNFDDPNLIILPLAFGKRQGREFIWNDLLSLETGSLKLANGRVIEKTLYNRRTRQDEPALFVALTFERREVLDSSNIKPMNLIGVDRGENIPAVIALTDPEGCPLSRFKDSLGNPTHILRIGESYKEKQRTIQAKKEVEQRRAGGYSRKYASKAKNLADDMVRNTARDLLYYAVTQDAMLIFENLSRGFGRQGKRTFMAERQYTRMEDWLTAKLAYEGLPSKTYLSKTLAQYTSKTCSNCGFTITSADYDRVLEKLKKTATGWMTTINGKELKVEGQITYYNRYKRQNVVKDLSVELDRLSEESVNNDISSWTKGRSGEALSLLKKRFSHRPVQEKFVCLNCGFETHADEQAALNIARSWLFLRSQEYKKYQTNKTTGNTDKRAFVETWQSFYRKKLKEVWKPAV

SEQ ID NO: 33464 - protein, 978 aa, synthetic construct
  REGION 1..978: note = engineered CasX variant
QEIKRINKIRRRLVKDSNTKKAGKTGPMKTLLVPVMTPDLRERLENLRKKPPNIPQPISNTSRANLNKLLTDYTEMKKAILHVYWEEFQKDPVGLMSRVAQPASKKIDQNKLKPEMDEKGNLTTAGFACSQCGQPLFVYKLEQVSEKGKAYTNYFGRCNVAEHEKLILLAQLKPEKDSDEAVTYSLGKFGQRALDFYSIHVTKESTHPVKPLAQIAGNRYASHPVGKALSDACMGTIASFLSKYQDIIIEHQKVVKGNQKRLESLRELAGKENLEYPSVTLPPQPHTKEGVDAYNEVIARVRMWVNLNLWQKLKLSRDDAKPLLRLKGFPSFPLVERQANEVDWWDMVCNVKKLINEKKEDGKVFWQNLAGYKRQEALRPYLSSEEDRKKGKKFARYQLGDLLLHLEKKHGEDWGKVYDEAWERIDKKVEGLSKHIKLEEERRSEDAQSKAALTDWLRAKASFVIEGLKEADKDEFCRCELKLQKWYGDLRGKPFAIEAENSILDISGFSKQYNCAFIWQKDGVKKLNLYLIINYFKGGKLRFKKIKPEAFEANRFYTVINKKSGEIVPMEVNFNFDDPNLIILPLAFGKRQGREFIWNDLLSLETGSLKLANGRVIEKTLYNRRTRQDEPALFVALTFERREVLDSSNIKPMNLIGVDRGENIPAVIALTDPEGCPLSRFKDSLGNPTHILRIGESYKEKQRTIQAKKEVEQRRAGGYSRKYASKAKNLADDMVRNTARDLLYYAVTQDAMLIFENLSRGFGRQGKRTFMAERQYTRMEDWLTAKLAYEGLPSKTYLSKTLAQYTSKTCSNCGFTITSADYDRVLEKLKKTATGWMTTINGKELKVEGQITYYNRYKRQNVVKDLSVELDRLSEESVNNDISSWTKGRSGEALSLLKKRFSHRPVQEKFVCLNCGFETHADEQAALNIARSWLFLRSQEYKKYQTNKTTGNTDKRAFVETWQSFYRKKLKEVWKPAV

SEQ ID NO: 33465 - protein, 978 aa, synthetic construct
  REGION 1..978: note = engineered CasX variant
QEIKRINKIRRRLVKDSNTKKAGKTGPMKTLLVPVMTPDLRERLENLRKKPPNIPQPISNTSRANLNKLLTDYTEMKKAILHVYWEEFQKDPVGLMSRVAQPASKKIDQNKLKPEMDEKGNLTTAGFACSQCGQPLFVYKLEQVSEKGKAYTNYFGRCNVAEHEKLILLAQLKPEKDSDEAVTYSLGKFGQRALDFYSIHVTKESTHPVKPLAQIAGNRYASSPVGKALSDACMGTIASFLSKYQDIIIEHQKVVKGNQKRLESLRELAGKENLEYPSVTLPPQPHTKEGVDAYNEVIARVRMWVNLNLWQKLKLSRDDAKPLLRLKGFPSFPLVERQANEVDWWDMVCNVKKLINEKKEDGKVFWQNLAGYKRQEALRPYLSSEEDRKKGKKFARYQLGDLLLHLEKKHGEDWGKVYDEAWERIDKKVEGLSKHIKLEEERRSEDAQSKAALTDWLRAKASFVIEGLKEADKDEFCRCELKLQKWYGDLRGKPFAIEAENSILDISGFSKQYNCAFIWQKDGVKKLNLYLIINYFKGGKLRFKKIKPEAFEANRFYTVINKKSGEIVPMEVNFNFDDPNLIILPLAFGKRQGREFIWNDLLSLETGSLKLANGRVIEKTLYNRRTRQDEPALFVALTFERREVLDSSNIKPMNLIGVDRGENIPAVIALTDPEGCPLSRFKDSLGNPTHILRIGESYKEKQRTIQAKKEVEQRRAGGYSRKYASKAKNLADDMVRNTARDLLYYAVTQDAMLIFENLSRGFGRQGKRTFMAERQYTRMEDWLTAKLAYEGLPSKTYLSKTLAQYTSKTCSNCGFTITSADYDRVLEKLKKTATGWMTTINGKELKVEGQITYYNRYKRQNVVKDLSVELDRLSEESVNNDISSWTKGRSGEALSLLKKRFSHRPVQEKFVCLNCGFETHADEQAALNIARSWLFLRSQEYKKYQTNKTTGNTDKRAFVETWQSFYRKKLKEVWKPAV

SEQ ID NO: 33466 - protein, 978 aa, synthetic construct
  REGION 1..978: note = engineered CasX variant
QEIKRINKIRRRLVKDSNTKKAGKTGPMKTLLVPVMTPDLRERLENLRKKPPNIPQPISNTSRANLNKLLTDYTEMKKAILHVYWEEFQKDPVGLMSRVAQPASKKIDQNKLKPEMDEKGNLTTAGFACSQCGQPLFVYKLEQVSEKGKAYTNYFGRCNVAEHEKLILLAQLKPEKDSDEAVTYSLGKFGQRALDFYSIHVTKESTHPVKPLAQIAGNRYASTPVGKALSDACMGTIASFLSKYQDIIIEHQKVVKGNQKRLESLRELAGKENLEYPSVTLPPQPHTKEGVDAYNEVIARVRMWVNLNLWQKLKLSRDDAKPLLRLKGFPSFPLVERQANEVDWWDMVCNVKKLINEKKEDGKVFWQNLAGYKRQEALRPYLSSEEDRKKGKKFARYQLGDLLLHLEKKHGEDWGKVYDEAWERIDKKVEGLSKHIKLEEERRSEDAQSKAALTDWLRAKASFVIEGLKEADKDEFCRCELKLQKWYGDLRGKPFAIEAENSILDISGFSKQYNCAFIWQKDGVKKLNLYLIINYFKGGKLRFKKIKPEAFEANRFYTVINKKSGEIVPMEVNFNFDDPNLIILPLAFGKRQGREFIWNDLLSLETGSLKLANGRVIEKTLYNRRTRQDEPALFVALTFERREVLDSSNIKPMNLIGVDRGENIPAVIALTDPEGCPLSRFKDSLGNPTHILRIGESYKEKQRTIQAKKEVEQRRAGGYSRKYASKAKNLADDMVRNTARDLLYYAVTQDAMLIFENLSRGFGRQGKRTFMAERQYTRMEDWLTAKLAYEGLPSKTYLSKTLAQYTSKTCSNCGFTITSADYDRVLEKLKKTATGWMTTINGKELKVEGQITYYNRYKRQNVVKDLSVELDRLSEESVNNDISSWTKGRSGEALSLLKKRFSHRPVQEKFVCLNCGFETHADEQAALNIARSWLFLRSQEYKKYQTNKTTGNTDKRAFVETWQSFYRKKLKEVWKPAV

SEQ ID NO: 33467 - protein, 978 aa, synthetic construct
  REGION 1..978: note = engineered CasX variant
QEIKRINKIRRRLVKDSNTKKAGKTGPMKTLLVPVMTPDLRERLENLRKKPPNIPQPISNTSRANLNKLLTDYTEMKKAILHVYWEEFQKDPVGLMSRVAQPASKKIDQNKLKPEMDEKGNLTTAGFACSQCGQPLFVYKLEQVSEKGKAYTNYFGRCNVAEHEKLILLAQLKPEKDSDEAVTYSLGKFGQRALDFYSIHVTKESTHPVKPLAQIAGNRYASAPVGKALSDACMGTIASFLSKYQDIIIEHQKVVKGNQKRLESLRELAGKENLEYPSVTLPPQPHTKEGVDAYNEVIARVRMWVNLNLWQKLKLSRDDAKPLLRLKGFPSFPLVERQANEVDWWDMVCNVKKLINEKKEDGKVFWQNLAGYKRQEALRPYLSSEEDRKKGKKFARYQLGDLLLHLEKKHGEDWGKVYDEAWERIDKKVEGLSKHIKLEEERRSEDAQSKAALTDWLRAKASFVIEGLKEADKDEFCRCELKLQKWYGDLRGKPFAIEAENSILDISGFSKQYNCAFIWQKDGVKKLNLYLIINYFKGGKLRFKKIKPEAFEANRFYTVINKKSGEIVPMEVNFNFDDPNLIILPLAFGKRQGREFIWNDLLSLETGSLKLANGRVIEKTLYNRRTRQDEPALFVALTFERREVLDSSNIKPMNLIGVDRGENIPAVIALTDPEGCPLSRFKDSLGNPTHILRIGESYKEKQRTIQAKKEVEQRRAGGYSRKYASKAKNLADDMVRNTARDLLYYAVTQDAMLIFENLSRGFGRQGKRTFMAERQYTRMEDWLTAKLAYEGLPSKTYLSKTLAQYTSKTCSNCGFTITSADYDRVLEKLKKTATGWMTTINGKELKVEGQITYYNRYKRQNVVKDLSVELDRLSEESVNNDISSWTKGRSGEALSLLKKRFSHRPVQEKFVCLNCGFETHADEQAALNIARSWLFLRSQEYKKYQTNKTTGNTDKRAFVETWQSFYRKKLKEVWKPAV

SEQ ID NO: 33468 - protein, 978 aa, synthetic construct
  REGION 1..978: note = engineered CasX variant
QEIKRINKIRRRLVKDSNTKKAGKTGPMKTLLVPVMTPDLRERLENLRKKPPNIPQPISNTSRANLNKLLTDYTEMKKAILHVYWEEFQKDPVGLMSRVAQPASKKIDQNKLKPEMDEKGNLTTAGFACSQCGQPLFVYKLEQVSEKGKAYTNYFGRCNVAEHEKLILLAQLKPEKDSDEAVTYSLGKFGQRALDFYSIHVTKESTHPVKPLAQIAGNRYASVPVGKALSDACMGTIASFLSKYQDIIIEHQKVVKGNQKRLESLRELAGKENLEYPSVTLPPQPHTKEGVDAYNEVIARVRMWVNLNLWQKLKLSRDDAKPLLRLKGFPSFPLVERQANEVDWWDMVCNVKKLINEKKEDGKVFWQNLAGYKRQEALRPYLSSEEDRKKGKKFARYQLGDLLLHLEKKHGEDWGKVYDEAWERIDKKVEGLSKHIKLEEERRSEDAQSKAALTDWLRAKASFVIEGLKEADKDEFCRCELKLQKWYGDLRGKPFAIEAENSILDISGFSKQYNCAFIWQKDGVKKLNLYLIINYFKGGKLRFKKIKPEAFEANRFYTVINKKSGEIVPMEVNFNFDDPNLIILPLAFGKRQGREFIWNDLLSLETGSLKLANGRVIEKTLYNRRTRQDEPALFVALTFERREVLDSSNIKPMNLIGVDRGENIPAVIALTDPEGCPLSRFKDSLGNPTHILRIGESYKEKQRTIQAKKEVEQRRAGGYSRKYASKAKNLADDMVRNTARDLLYYAVTQDAMLIFENLSRGFGRQGKRTFMAERQYTRMEDWLTAKLAYEGLPSKTYLSKTLAQYTSKTCSNCGFTITSADYDRVLEKLKKTATGWMTTINGKELKVEGQITYYNRYKRQNVVKDLSVELDRLSEESVNNDISSWTKGRSGEALSLLKKRFSHRPVQEKFVCLNCGFETHADEQAALNIARSWLFLRSQEYKKYQTNKTTGNTDKRAFVETWQSFYRKKLKEVWKPAV

SEQ ID NO: 33469 - protein, 978 aa, synthetic construct
  REGION 1..978: note = engineered CasX variant
QEIKRINKIRRRLVKDSNTKKAGKTGPMKTLLVPVMTPDLRERLENLRKKPPNIPQPISNTSRANLNKLLTDYTEMKKAILHVYWEEFQKDPVGLMSRVAQPASKKIDQNKLKPEMDEKGNLTTAGFACSQCGQPLFVYKLEQVSEKGKAYTNYFGRCNVAEHEKLIKLAQLKPEKDSDEAVTYSLGKFGQRALDFYSIHVTKESTHPVKPLAQIAGNRYASGPVGKALSDACMGTIASFLSKYQDIIIEHQKVVKGNQKRLESLRELAGKENLEYPSVTLPPQPHTKEGVDAYNEVIARVRMWVNLNLWQKLKLSRDDAKPLLRLKGFPSFPLVERQANEVDWWDMVCNVKKLINEKKEDGKVFWQNLAGYKRQEALRPYLSSEEDRKKGKKFARYQLGDLLLHLEKKHGEDWGKVYDEAWERIDKKVEGLSKHIKLEEERRSEDAQSKAALTDWLRAKASFVIEGLKEADKDEFCRCELKLQKWYGDLRGKPFAIEAENSILDISGFSKQYNCAFIWQKDGVKKLNLYLIINYFKGGKLRFKKIKPEAFEANRFYTVINKKSGEIVPMEVNFNFDDPNLIILPLAFGKRQGREFIWNDLLSLETGSLKLANGRVIEKTLYNRRTRQDEPALFVALTFERREVLDSSNIKPMNLIGVDRGENIPAVIALTDPEGCPLSRFKDSLGNPTHILRIGESYKEKQRTIQAKKEVEQRRAGGYSRKYASKAKNLADDMVRNTARDLLYYAVTQDAMLIFENLSRGFGRQGKRTFMAERQYTRMEDWLTAKLAYEGLPSKTYLSKTLAQYTSKTCSNCGFTITSADYDRVLEKLKKTATGWMTTINGKELKVEGQITYYNRYKRQNVVKDLSVELDRLSEESVNNDISSWTKGRSGEALSLLKKRFSHRPVQEKFVCLNCGFETHADEQAALNIARSWLFLRSQEYKKYQTNKTTGNTDKRAFVETWQSFYRKKLKEVWKPAV

SEQ ID NO: 33470 - protein, 977 aa, synthetic construct
  REGION 1..977: note = engineered CasX variant
QEIKRINKIRRRLVKDSNTKKAGKTGPMKTLLVPVMTPDLRERLENLRKKPPNIPQPISNTSRANLNKLLTDYTEMKKAILHVYWEEFQKDPVGLMSRVAQPASKKIDQNKLKPEMDEKGNLTTAGFACSQCGQPLFVYKLEQVSEKGKAYTNYFGRCNVAEHEKLILLAQLKPEKDSDEAVTYSLGKFGQRALDFYSIHVTKESTHPVKPLAQIAGNRYASPVGKALSDACMGTIASFLSKYQDIIIEHQKVVKGNQKRLESLRELAGKENLEYPSVTLPPQPHTKEGVDAYNEVIARVRMWVNLNLWQKLKLSRDDAKPLLRLKGFPSFPLVERQANEVDWWDMVCNVKKLINEKKEDGKVFWQNLAGYKRQEALRPYLSSEEDRKKGKKFARYQLGDLLLHLEKKHGEDWGKVYDEAWERIDKKVEGLSKHIKLEEERRSEDAQSKAALTDWLRAKASFVIEGLKEADKDEFCRCELKLQKWYGDLRGKPFAIEAENSILDISGFSKQYNCAFIWQKDGVKKLNLYLIINYFKGGKLRFKKIKPEAFEANRFYTVINKKSGEIVPMEVNFNFDDPNLIILPLAFGKRQGREFIWNDLLSLETGSLKLANGRVIEKTLYNRRTRQDEPALFVALTFERREVLDSSNIKPMNLIGVDRGENIPAVIALTDPEGCPLSRFKDSLGNPTHILRIGESYKEKQRTIQAKKEVEQRRAGGYSRKYASKAKNLADDMVRNTARDLLYYAVTQDAMLIFENLSRGFGRQGKRTFMAERQYTRMEDWLTAKLAYEGLPSKTYLSKTLAQYTSKTCSNCGFTITSADYDRVLEKLKKTATGWMTTINGKELKVEGQITYYNRYKRQNVVKDLSVELDRLSEESVNNDISSWTKGRSGEALSLLKKRFSHRPVQEKFVCLNCGFETHADEQAALNIARSWLFLRSQEYKKYQTNKTTGNTDKRAFVETWQSFYRKKLKEVWKPAV

SEQ ID NO: 33471 - protein, 978 aa, synthetic construct
  REGION 1..978: note = engineered CasX variant
QEIKRINKIRRRLVKDSNTKKAGKTGPMKTLLVPVMTPDLRERLENLRKKPENIPQPISNTSQANLNKLLTDYTEMKKAILHVYWEEFQKDPVGLMSRVAQPASKKIDQNKLKPEMDEKGNLTTAGFACSQCGQPLFVYKLEQVSEKGKAYTNYFGRCNVAEHEKLILLAQLKPEKDSDEAVTYSLGKFGQRALDFYSIHVTKESTHPVKPLAQIAGNRYASYPVGKALSDACMGTIASFLSKYQDIIIEHQKVVKGNQKRLESLRELAGKENLEYPSVTLPPQPHTKEGVDAYNEVIARVRMWVNLNLWQKLKLSRDDAKPLLRLKGFPSFPLVERQANEVDWWDMVCNVKKLINEKKEDGKVFWQNLAGYKRQEALRPYLSSEEDRKKGKKFARYQLGDLLLHLEKKHGEDWGKVYDEAWERIDKKVEGLSKHIKLEEERRSEDAQSKAALTDWLRAKASFVIEGLKEADKDEFCRCELKLQKWYGDLRGKPFAIEAENSILDISGFSKQYNCAFIWQKDGVKKLNLYLIINYFKGGKLRFKKIKPEAFEANRFYTVINKKSGEIVPMEVNFNFDDPNLIILPLAFGKRQGREFIWNDLLSLETGSLKLANGRVIEKTLYNRRTRQDEPALFVALTFERREVLDSSNIKPMNLIGVDRGENIPAVIALTDPEGCPLSRFKDSLGNPTHILRIGESYKEKQRTIQAKKEVEQRRAGGYSRKYASKAKNLADDMVRNTARDLLYYAVTQDAMLIFENLSRGFGRQGKRTFMAERQYTRMEDWLTAKLAYEGLPSKTYLSKTLAQYTSKTCSNCGFTITSADYDRVLEKLKKTATGWMTTINGKELKVEGQITYYNRYKRQNVVKDLSVELDRLSEESVNNDISSWTKGRSGEALSLLKKRFSHRPVQEKFVCLNCGFETHADEQAALNIARSWLFLRSQEYKKYQTNKTTGNTDKRAFVETWQSFYRKKLKEVWKPAV

SEQ ID NO: 33472 - protein, 978 aa, synthetic construct
  REGION 1..978: note = engineered CasX variant
QEIKRINKIRRRLVKDSNTKKAGKTGPMKTLLVPVMTPDLRERLENLRKKPENIPQPISNTSQANLNKLLTDYTEMKKAILHVYWEEFQKDPVGLMSRVAQPASKKIDQNKLKPEMDEKGNLTTAGFACSQCGQPLFVYKLEQVSEKGKAYTNYFGRCNVAEHEKLILLAQLKPEKDSDEAVTYSLGKFGQRALDFYSIHVTKESTHPVKPLAQIAGNRYASHPVGKALSDACMGTIASFLSKYQDIIIEHQKVVKGNQKRLESLRELAGKENLEYPSVTLPPQPHTKEGVDAYNEVIARVRMWVNLNLWQKLKLSRDDAKPLLRLKGFPSFPLVERQANEVDWWDMVCNVKKLINEKKEDGKVFWQNLAGYKRQEALRPYLSSEEDRKKGKKFARYQLGDLLLHLEKKHGEDWGKVYDEAWERIDKKVEGLSKHIKLEEERRSEDAQSKAALTDWLRAKASFVIEGLKEADKDEFCRCELKLQKWYGDLRGKPFAIEAENSILDISGFSKQYNCAFIWQKDGVKKLNLYLIINYFKGGKLRFKKIKPEAFEANRFYTVINKKSGEIVPMEVNFNFDDPNLIILPLAFGKRQGREFIWNDLLSLETGSLKLANGRVIEKTLYNRRTRQDEPALFVALTFERREVLDSSNIKPMNLIGVDRGENIPAVIALTDPEGCPLSRFKDSLGNPTHILRIGESYKEKQRTIQAKKEVEQRRAGGYSRKYASKAKNLADDMVRNTARDLLYYAVTQDAMLIFENLSRGFGRQGKRTFMAERQYTRMEDWLTAKLAYEGLPSKTYLSKTLAQYTSKTCSNCGFTITSADYDRVLEKLKKTATGWMTTINGKELKVEGQITYYNRYKRQNVVKDLSVELDRLSEESVNNDISSWTKGRSGEALSLLKKRFSHRPVQEKFVCLNCGFETHADEQAALNIARSWLFLRSQEYKKYQTNKTTGNTDKRAFVETWQSFYRKKLKEVWKPAV

SEQ ID NO: 33473 - protein, 978 aa, synthetic construct
  REGION 1..978: note = engineered CasX variant
QEIKRINKIRRRLVKDSNTKKAGKTGPMKTLLVPVMTPDLRERLENLRKKPENIPQPISNTSQANLNKLLTDYTEMKKAILHVYWEEFQKDPVGLMSRVAQPASKKIDQNKLKPEMDEKGNLTTAGFACSQCGQPLFVYKLEQVSEKGKAYTNYFGRCNVAEHEKLILLAQLKPEKDSDEAVTYSLGKFGQRALDFYSIHVTKESTHPVKPLAQIAGNRYASSPVGKALSDACMGTIASFLSKYQDIIIEHQKVVKGNQKRLESLRELAGKENLEYPSVTLPPQPHTKEGVDAYNEVIARVRMWVNLNLWQKLKLSRDDAKPLLRLKGFPSFPLVERQANEVDWWDMVCNVKKLINEKKEDGKVFWQNLAGYKRQEALRPYLSSEEDRKKGKKFARYQLGDLLLHLEKKHGEDWGKVYDEAWERIDKKVEGLSKHIKLEEERRSEDAQSKAALTDWLRAKASFVIEGLKEADKDEFCRCELKLQKWYGDLRGKPFAIEAENSILDISGFSKQYNCAFIWQKDGVKKLNLYLIINYFKGGKLRFKKIKPEAFEANRFYTVINKKSGEIVPMEVNFNFDDPNLIILPLAFGKRQGREFIWNDLLSLETGSLKLANGRVIEKTLYNRRTRQDEPALFVALTFERREVLDSSNIKPMNLIGVDRGENIPAVIALTDPEGCPLSRFKDSLGNPTHILRIGESYKEKQRTIQAKKEVEQRRAGGYSRKYASKAKNLADDMVRNTARDLLYYAVTQDAMLIFENLSRGFGRQGKRTFMAERQYTRMEDWLTAKLAYEGLPSKTYLSKTLAQYTSKTCSNCGFTITSADYDRVLEKLKKTATGWMTTINGKELKVEGQITYYNRYKRQNVVKDLSVELDRLSEESVNNDISSWTKGRSGEALSLLKKRFSHRPVQEKFVCLNCGFETHADEQAALNIARSWLFLRSQEYKKYQTNKTTGNTDKRAFVETWQSFYRKKLKEVWKPAV

SEQ ID NO: 33474 - protein, 978 aa, synthetic construct
  REGION 1..978: note = engineered CasX variant
QEIKRINKIRRRLVKDSNTKKAGKTGPMKTLLVPVMTPDLRERLENLRKKPENIPQPISNTSQANLNKLLTDYTEMKKAILHVYWEEFQKDPVGLMSRVAQPASKKIDQNKLKPEMDEKGNLTTAGFACSQCGQPLFVYKLEQVSEKGKAYTNYFGRCNVAEHEKLILLAQLKPEKDSDEAVTYSLGKFGQRALDFYSIHVTKESTHPVKPLAQIAGNRYASTPVGKALSDACMGTIASFLSKYQDIIIEHQKVVKGNQKRLESLRELAGKENLEYPSVTLPPQPHTKEGVDAYNEVIARVRMWVNLNLWQKLKLSRDDAKPLLRLKGFPSFPLVERQANEVDWWDMVCNVKKLINEKKEDGKVFWQNLAGYKRQEALRPYLSSEEDRKKGKKFARYQLGDLLLHLEKKHGEDWGKVYDEAWERIDKKVEGLSKHIKLEEERRSEDAQSKAALTDWLRAKASFVIEGLKEADKDEFCRCELKLQKWYGDLRGKPFAIEAENSILDISGFSKQYNCAFIWQKDGVKKLNLYLIINYFKGGKLRFKKIKPEAFEANRFYTVINKKSGEIVPMEVNFNFDDPNLIILPLAFGKRQGREFIWNDLLSLETGSLKLANGRVIEKTLYNRRTRQDEPALFVALTFERREVLDSSNIKPMNLIGVDRGENIPAVIALTDPEGCPLSRFKDSLGNPTHILRIGESYKEKQRTIQAKKEVEQRRAGGYSRKYASKAKNLADDMVRNTARDLLYYAVTQDAMLIFENLSRGFGRQGKRTFMAERQYTRMEDWLTAKLAYEGLPSKTYLSKTLAQYTSKTCSNCGFTITSADYDRVLEKLKKTATGWMTTINGKELKVEGQITYYNRYKRQNVVKDLSVELDRLSEESVNNDISSWTKGRSGEALSLLKKRFSHRPVQEKFVCLNCGFETHADEQAALNIARSWLFLRSQEYKKYQTNKTTGNTDKRAFVETWQSFYRKKLKEVWKPAV

SEQ ID NO: 33475 - protein, 978 aa, synthetic construct
  REGION 1..978: note = engineered CasX variant
QEIKRINKIRRRLVKDSNTKKAGKTGPMKTLLVPVMTPDLRERLENLRKKPENIPQPISNTSQANLNKLLTDYTEMKKAILHVYWEEFQKDPVGLMSRVAQPASKKIDQNKLKPEMDEKGNLTTAGFACSQCGQPLFVYKLEQVSEKGKAYTNYFGRCNVAEHEKLILLAQLKPEKDSDEAVTYSLGKFGQRALDFYSIHVTKESTHPVKPLAQIAGNRYASAPVGKALSDACMGTIASFLSKYQDIIIEHQKVVKGNQKRLESLRELAGKENLEYPSVTLPPQPHTKEGVDAYNEVIARVRMWVNLNLWQKLKLSRDDAKPLLRLKGFPSFPLVERQANEVDWWDMVCNVKKLINEKKEDGKVFWQNLAGYKRQEALRPYLSSEEDRKKGKKFARYQLGDLLLHLEKKHGEDWGKVYDEAWERIDKKVEGLSKHIKLEEERRSEDAQSKAALTDWLRAKASFVIEGLKEADKDEFCRCELKLQKWYGDLRGKPFAIEAENSILDISGFSKQYNCAFIWQKDGVKKLNLYLIINYFKGGKLRFKKIKPEAFEANRFYTVINKKSGEIVPMEVNFNFDDPNLIILPLAFGKRQGREFIWNDLLSLETGSLKLANGRVIEKTLYNRRTRQDEPALFVALTFERREVLDSSNIKPMNLIGVDRGENIPAVIALTDPEGCPLSRFKDSLGNPTHILRIGESYKEKQRTIQAKKEVEQRRAGGYSRKYASKAKNLADDMVRNTARDLLYYAVTQDAMLIFENLSRGFGRQGKRTFMAERQYTRMEDWLTAKLAYEGLPSKTYLSKTLAQYTSKTCSNCGFTITSADYDRVLEKLKKTATGWMTTINGKELKVEGQITYYNRYKRQNVVKDLSVELDRLSEESVNNDISSWTKGRSGEALSLLKKRFSHRPVQEKFVCLNCGFETHADEQAALNIARSWLFLRSQEYKKYQTNKTTGNTDKRAFVETWQSFYRKKLKEVWKPAV

SEQ ID NO: 33476 - protein, 978 aa, synthetic construct
  REGION 1..978: note = engineered CasX variant
QEIKRINKIRRRLVKDSNTKKAGKTGPMKTLLVPVMTPDLRERLENLRKKPENIPQPISNTSQANLNKLLTDYTEMKKAILHVYWEEFQKDPVGLMSRVAQPASKKIDQNKLKPEMDEKGNLTTAGFACSQCGQPLFVYKLEQVSEKGKAYTNYFGRCNVAEHEKLILLAQLKPEKDSDEAVTYSLGKFGQRALDFYSIHVTKESTHPVKPLAQIAGNRYASVPVGKALSDACMGTIASFLSKYQDIIIEHQKVVKGNQKRLESLRELAGKENLEYPSVTLPPQPHTKEGVDAYNEVIARVRMWVNLNLWQKLKLSRDDAKPLLRLKGFPSFPLVERQANEVDWWDMVCNVKKLINEKKEDGKVFWQNLAGYKRQEALRPYLSSEEDRKKGKKFARYQLGDLLLHLEKKHGEDWGKVYDEAWERIDKKVEGLSKHIKLEEERRSEDAQSKAALTDWLRAKASFVIEGLKEADKDEFCRCELKLQKWYGDLRGKPFAIEAENSILDISGFSKQYNCAFIWQKDGVKKLNLYLIINYFKGGKLRFKKIKPEAFEANRFYTVINKKSGEIVPMEVNFNFDDPNLIILPLAFGKRQGREFIWNDLLSLETGSLKLANGRVIEKTLYNRRTRQDEPALFVALTFERREVLDSSNIKPMNLIGVDRGENIPAVIALTDPEGCPLSRFKDSLGNPTHILRIGESYKEKQRTIQAKKEVEQRRAGGYSRKYASKAKNLADDMVRNTARDLLYYAVTQDAMLIFENLSRGFGRQGKRTFMAERQYTRMEDWLTAKLAYEGLPSKTYLSKTLAQYTSKTCSNCGFTITSADYDRVLEKLKKTATGWMTTINGKELKVEGQITYYNRYKRQNVVKDLSVELDRLSEESVNNDISSWTKGRSGEALSLLKKRFSHRPVQEKFVCLNCGFETHADEQAALNIARSWLFLRSQEYKKYQTNKTTGNTDKRAFVETWQSFYRKKLKEVWKPAV

SEQ ID NO: 33477 - protein, 978 aa, synthetic construct
  REGION 1..978: note = engineered CasX variant
QEIKRINKIRRRLVKDSNTKKAGKTGPMKTLLVPVMTPDLRERLENLRKKPENIPQPISNTSQANLNKLLTDYTEMKKAILHVYWEEFQKDPVGLMSRVAQPASKKIDQNKLKPEMDEKGNLTTAGFACSQCGQPLFVYKLEQVSEKGKAYTNYFGRCNVAEHEKLIKLAQLKPEKDSDEAVTYSLGKFGQRALDFYSIHVTKESTHPVKPLAQIAGNRYASGPVGKALSDACMGTIASFLSKYQDIIIEHQKVVKGNQKRLESLRELAGKENLEYPSVTLPPQPHTKEGVDAYNEVIARVRMWVNLNLWQKLKLSRDDAKPLLRLKGFPSFPLVERQANEVDWWDMVCNVKKLINEKKEDGKVFWQNLAGYKRQEALRPYLSSEEDRKKGKKFARYQLGDLLLHLEKKHGEDWGKVYDEAWERIDKKVEGLSKHIKLEEERRSEDAQSKAALTDWLRAKASFVIEGLKEADKDEFCRCELKLQKWYGDLRGKPFAIEAENSILDISGFSKQYNCAFIWQKDGVKKLNLYLIINYFKGGKLRFKKIKPEAFEANRFYTVINKKSGEIVPMEVNFNFDDPNLIILPLAFGKRQGREFIWNDLLSLETGSLKLANGRVIEKTLYNRRTRQDEPALFVALTFERREVLDSSNIKPMNLIGVDRGENIPAVIALTDPEGCPLSRFKDSLGNPTHILRIGESYKEKQRTIQAKKEVEQRRAGGYSRKYASKAKNLADDMVRNTARDLLYYAVTQDAMLIFENLSRGFGRQGKRTFMAERQYTRMEDWLTAKLAYEGLPSKTYLSKTLAQYTSKTCSNCGFTITSADYDRVLEKLKKTATGWMTTINGKELKVEGQITYYNRYKRQNVVKDLSVELDRLSEESVNNDISSWTKGRSGEALSLLKKRFSHRPVQEKFVCLNCGFETHADEQAALNIARSWLFLRSQEYKKYQTNKTTGNTDKRAFVETWQSFYRKKLKEVWKPAV

SEQ ID NO: 33478 - protein, 977 aa, synthetic construct
  REGION 1..977: note = engineered CasX variant
QEIKRINKIRRRLVKDSNTKKAGKTGPMKTLLVPVMTPDLRERLENLRKKPENIPQPISNTSQANLNKLLTDYTEMKKAILHVYWEEFQKDPVGLMSRVAQPASKKIDQNKLKPEMDEKGNLTTAGFACSQCGQPLFVYKLEQVSEKGKAYTNYFGRCNVAEHEKLILLAQLKPEKDSDEAVTYSLGKFGQRALDFYSIHVTKESTHPVKPLAQIAGNRYASPVGKALSDACMGTIASFLSKYQDIIIEHQKVVKGNQKRLESLRELAGKENLEYPSVTLPPQPHTKEGVDAYNEVIARVRMWVNLNLWQKLKLSRDDAKPLLRLKGFPSFPLVERQANEVDWWDMVCNVKKLINEKKEDGKVFWQNLAGYKRQEALRPYLSSEEDRKKGKKFARYQLGDLLLHLEKKHGEDWGKVYDEAWERIDKKVEGLSKHIKLEEERRSEDAQSKAALTDWLRAKASFVIEGLKEADKDEFCRCELKLQKWYGDLRGKPFAIEAENSILDISGFSKQYNCAFIWQKDGVKKLNLYLIINYFKGGKLRFKKIKPEAFEANRFYTVINKKSGEIVPMEVNFNFDDPNLIILPLAFGKRQGREFIWNDLLSLETGSLKLANGRVIEKTLYNRRTRQDEPALFVALTFERREVLDSSNIKPMNLIGVDRGENIPAVIALTDPEGCPLSRFKDSLGNPTHILRIGESYKEKQRTIQAKKEVEQRRAGGYSRKYASKAKNLADDMVRNTARDLLYYAVTQDAMLIFENLSRGFGRQGKRTFMAERQYTRMEDWLTAKLAYEGLPSKTYLSKTLAQYTSKTCSNCGFTITSADYDRVLEKLKKTATGWMTTINGKELKVEGQITYYNRYKRQNVVKDLSVELDRLSEESVNNDISSWTKGRSGEALSLLKKRFSHRPVQEKFVCLNCGFETHADEQAALNIARSWLFLRSQEYKKYQTNKTTGNTDKRAFVETWQSFYRKKLKEVWKPAV

SEQ ID NO: 33479 - protein, 978 aa, synthetic construct
  REGION 1..978: note = engineered CasX variant
QEIKRINKIRRRLVKDSNTKKAGKTGPMKTLLVPVMTPDLRERLENLRKKPENIPQPISNTSRANLNKLLTDYTEMKKAILHVYDEEFQKDPVGLMSRVAQPASKKIDQNKLKPEMDEKGNLTTAGFACSQCGQPLFVYKLEQVSEKGKAYTNYFGRCNVAEHEKLILLAQLKPEKDSDEAVTYSLGKFGQRALDFYSIHVTKESTHPVKPLAQIAGNRYASYPVGKALSDACMGTIASFLSKYQDIIIEHQKVVKGNQKRLESLRELAGKENLEYPSVTLPPQPHTKEGVDAYNEVIARVRMWVNLNLWQKLKLSRDDAKPLLRLKGFPSFPLVERQANEVDWWDMVCNVKKLINEKKEDGKVFWQNLAGYKRQEALRPYLSSEEDRKKGKKFARYQLGDLLLHLEKKHGEDWGKVYDEAWERIDKKVEGLSKHIKLEEERRSEDAQSKAALTDWLRAKASFVIEGLKEADKDEFCRCELKLQKWYGDLRGKPFAIEAENSILDISGFSKQYNCAFIWQKDGVKKLNLYLIINYFKGGKLRFKKIKPEAFEANRFYTVINKKSGEIVPMEVNFNFDDPNLIILPLAFGKRQGREFIWNDLLSLETGSLKLANGRVIEKTLYNRRTRQDEPALFVALTFERREVLDSSNIKPMNLIGVDRGENIPAVIALTDPEGCPLSRFKDSLGNPTHILRIGESYKEKQRTIQAKKEVEQRRAGGYSRKYASKAKNLADDMVRNTARDLLYYAVTQDAMLIFENLSRGFGRQGKRTFMAERQYTRMEDWLTAKLAYEGLPSKTYLSKTLAQYTSKTCSNCGFTITSADYDRVLEKLKKTATGWMTTINGKELKVEGQITYYNRYKRQNVVKDLSVELDRLSEESVNNDISSWTKGRSGEALSLLKKRFSHRPVQEKFVCLNCGFETHADEQAALNIARSWLFLRSQEYKKYQTNKTTGNTDKRAFVETWQSFYRKKLKEVWKPAV

SEQ ID NO: 33480 - protein, 978 aa, synthetic construct
  REGION 1..978: note = engineered CasX variant
QEIKRINKIRRRLVKDSNTKKAGKTGPMKTLLVPVMTPDLRERLENLRKKPENIPQPISNTSRANLNKLLTDYTEMKKAILHVYDEEFQKDPVGLMSRVAQPASKKIDQNKLKPEMDEKGNLTTAGFACSQCGQPLFVYKLEQVSEKGKAYTNYFGRCNVAEHEKLILLAQLKPEKDSDEAVTYSLGKFGQRALDFYSIHVTKESTHPVKPLAQIAGNRYASHPVGKALSDACMGTIASFLSKYQDIIIEHQKVVKGNQKRLESLRELAGKENLEYPSVTLPPQPHTKEGVDAYNEVIARVRMWVNLNLWQKLKLSRDDAKPLLRLKGFPSFPLVERQANEVDWWDMVCNVKKLINEKKEDGKVFWQNLAGYKRQEALRPYLSSEEDRKKGKKFARYQLGDLLLHLEKKHGEDWGKVYDEAWERIDKKVEGLSKHIKLEEERRSEDAQSKAALTDWLRAKASFVIEGLKEADKDEFCRCELKLQKWYGDLRGKPFAIEAENSILDISGFSKQYNCAFIWQKDGVKKLNLYLIINYFKGGKLRFKKIKPEAFEANRFYTVINKKSGEIVPMEVNFNFDDPNLIILPLAFGKRQGREFIWNDLLSLETGSLKLANGRVIEKTLYNRRTRQDEPALFVALTFERREVLDSSNIKPMNLIGVDRGENIPAVIALTDPEGCPLSRFKDSLGNPTHILRIGESYKEKQRTIQAKKEVEQRRAGGYSRKYASKAKNLADDMVRNTARDLLYYAVTQDAMLIFENLSRGFGRQGKRTFMAERQYTRMEDWLTAKLAYEGLPSKTYLSKTLAQYTSKTCSNCGFTITSADYDRVLEKLKKTATGWMTTINGKELKVEGQITYYNRYKRQNVVKDLSVELDRLSEESVNNDISSWTKGRSGEALSLLKKRFSHRPVQEKFVCLNCGFETHADEQAALNIARSWLFLRSQEYKKYQTNKTTGNTDKRAFVETWQSFYRKKLKEVWKPAV

SEQ ID NO: 33481 - protein, 978 aa, synthetic construct
  REGION 1..978: note = engineered CasX variant
QEIKRINKIRRRLVKDSNTKKAGKTGPMKTLLVPVMTPDLRERLENLRKKPENIPQPISNTSRANLNKLLTDYTEMKKAILHVYDEEFQKDPVGLMSRVAQPASKKIDQNKLKPEMDEKGNLTTAGFACSQCGQPLFVYKLEQVSEKGKAYTNYFGRCNVAEHEKLILLAQLKPEKDSDEAVTYSLGKFGQRALDFYSIHVTKESTHPVKPLAQIAGNRYASSPVGKALSDACMGTIASFLSKYQDIIIEHQKVVKGNQKRLESLRELAGKENLEYPSVTLPPQPHTKEGVDAYNEVIARVRMWVNLNLWQKLKLSRDDAKPLLRLKGFPSFPLVERQANEVDWWDMVCNVKKLINEKKEDGKVFWQNLAGYKRQEALRPYLSSEEDRKKGKKFARYQLGDLLLHLEKKHGEDWGKVYDEAWERIDKKVEGLSKHIKLEEERRSEDAQSKAALTDWLRAKASFVIEGLKEADKDEFCRCELKLQKWYGDLRGKPFAIEAENSILDISGFSKQYNCAFIWQKDGVKKLNLYLIINYFKGGKLRFKKIKPEAFEANRFYTVINKKSGEIVPMEVNFNFDDPNLIILPLAFGKRQGREFIWNDLLSLETGSLKLANGRVIEKTLYNRRTRQDEPALFVALTFERREVLDSSNIKPMNLIGVDRGENIPAVIALTDPEGCPLSRFKDSLGNPTHILRIGESYKEKQRTIQAKKEVEQRRAGGYSRKYASKAKNLADDMVRNTARDLLYYAVTQDAMLIFENLSRGFGRQGKRTFMAERQYTRMEDWLTAKLAYEGLPSKTYLSKTLAQYTSKTCSNCGFTITSADYDRVLEKLKKTATGWMTTINGKELKVEGQITYYNRYKRQNVVKDLSVELDRLSEESVNNDISSWTKGRSGEALSLLKKRFSHRPVQEKFVCLNCGFETHADEQAALNIARSWLFLRSQEYKKYQTNKTTGNTDKRAFVETWQSFYRKKLKEVWKPAV

SEQ ID NO: 33482 - protein, 978 aa, synthetic construct
  REGION 1..978: note = engineered CasX variant
QEIKRINKIRRRLVKDSNTKKAGKTGPMKTLLVPVMTPDLRERLENLRKKPENIPQPISNTSRANLNKLLTDYTEMKKAILHVYDEEFQKDPVGLMSRVAQPASKKIDQNKLKPEMDEKGNLTTAGFACSQCGQPLFVYKLEQVSEKGKAYTNYFGRCNVAEHEKLILLAQLKPEKDSDEAVTYSLGKFGQRALDFYSIHVTKESTHPVKPLAQIAGNRYASTPVGKALSDACMGTIASFLSKYQDIIIEHQKVVKGNQKRLESLRELAGKENLEYPSVTLPPQPHTKEGVDAYNEVIARVRMWVNLNLWQKLKLSRDDAKPLLRLKGFPSFPLVERQANEVDWWDMVCNVKKLINEKKEDGKVFWQNLAGYKRQEALRPYLSSEEDRKKGKKFARYQLGDLLLHLEKKHGEDWGKVYDEAWERIDKKVEGLSKHIKLEEERRSEDAQSKAALTDWLRAKASFVIEGLKEADKDEFCRCELKLQKWYGDLRGKPFAIEAENSILDISGFSKQYNCAFIWQKDGVKKLNLYLIINYFKGGKLRFKKIKPEAFEANRFYTVINKKSGEIVPMEVNFNFDDPNLIILPLAFGKRQGREFIWNDLLSLETGSLKLANGRVIEKTLYNRRTRQDEPALFVALTFERREVLDSSNIKPMNLIGVDRGENIPAVIALTDPEGCPLSRFKDSLGNPTHILRIGESYKEKQRTIQAKKEVEQRRAGGYSRKYASKAKNLADDMVRNTARDLLYYAVTQDAMLIFENLSRGFGRQGKRTFMAERQYTRMEDWLTAKLAYEGLPSKTYLSKTLAQYTSKTCSNCGFTITSADYDRVLEKLKKTATGWMTTINGKELKVEGQITYYNRYKRQNVVKDLSVELDRLSEESVNNDISSWTKGRSGEALSLLKKRFSHRPVQEKFVCLNCGFETHADEQAALNIARSWLFLRSQEYKKYQTNKTTGNTDKRAFVETWQSFYRKKLKEVWKPAV

SEQ ID NO: 33483 - protein, 978 aa, synthetic construct
  REGION 1..978: note = engineered CasX variant
QEIKRINKIRRRLVKDSNTKKAGKTGPMKTLLVPVMTPDLRERLENLRKKPENIPQPISNTSRANLNKLLTDYTEMKKAILHVYDEEFQKDPVGLMSRVAQPASKKIDQNKLKPEMDEKGNLTTAGFACSQCGQPLFVYKLEQVSEKGKAYTNYFGRCNVAEHEKLILLAQLKPEKDSDEAVTYSLGKFGQRALDFYSIHVTKESTHPVKPLAQIAGNRYASAPVGKALSDACMGTIASFLSKYQDIIIEHQKVVKGNQKRLESLRELAGKENLEYPSVTLPPQPHTKEGVDAYNEVIARVRMWVNLNLWQKLKLSRDDAKPLLRLKGFPSFPLVERQANEVDWWDMVCNVKKLINEKKEDGKVFWQNLAGYKRQEALRPYLSSEEDRKKGKKFARYQLGDLLLHLEKKHGEDWGKVYDEAWERIDKKVEGLSKHIKLEEERRSEDAQSKAALTDWLRAKASFVIEGLKEADKDEFCRCELKLQKWYGDLRGKPFAIEAENSILDISGFSKQYNCAFIWQKDGVKKLNLYLIINYFKGGKLRFKKIKPEAFEANRFYTVINKKSGEIVPMEVNFNFDDPNLIILPLAFGKRQGREFIWNDLLSLETGSLKLANGRVIEKTLYNRRTRQDEPALFVALTFERREVLDSSNIKPMNLIGVDRGENIPAVIALTDPEGCPLSRFKDSLGNPTHILRIGESYKEKQRTIQAKKEVEQRRAGGYSRKYASKAKNLADDMVRNTARDLLYYAVTQDAMLIFENLSRGFGRQGKRTFMAERQYTRMEDWLTAKLAYEGLPSKTYLSKTLAQYTSKTCSNCGFTITSADYDRVLEKLKKTATGWMTTINGKELKVEGQITYYNRYKRQNVVKDLSVELDRLSEESVNNDISSWTKGRSGEALSLLKKRFSHRPVQEKFVCLNCGFETHADEQAALNIARSWLFLRSQEYKKYQTNKTTGNTDKRAFVETWQSFYRKKLKEVWKPAV

SEQ ID NO: 33484 - protein, 978 aa, synthetic construct
  REGION 1..978: note = engineered CasX variant
QEIKRINKIRRRLVKDSNTKKAGKTGPMKTLLVPVMTPDLRERLENLRKKPENIPQPISNTSRANLNKLLTDYTEMKKAILHVYDEEFQKDPVGLMSRVAQPASKKIDQNKLKPEMDEKGNLTTAGFACSQCGQPLFVYKLEQVSEKGKAYTNYFGRCNVAEHEKLILLAQLKPEKDSDEAVTYSLGKFGQRALDFYSIHVTKESTHPVKPLAQIAGNRYASVPVGKALSDACMGTIASFLSKYQDIIIEHQKVVKGNQKRLESLRELAGKENLEYPSVTLPPQPHTKEGVDAYNEVIARVRMWVNLNLWQKLKLSRDDAKPLLRLKGFPSFPLVERQANEVDWWDMVCNVKKLINEKKEDGKVFWQNLAGYKRQEALRPYLSSEEDRKKGKKFARYQLGDLLLHLEKKHGEDWGKVYDEAWERIDKKVEGLSKHIKLEEERRSEDAQSKAALTDWLRAKASFVIEGLKEADKDEFCRCELKLQKWYGDLRGKPFAIEAENSILDISGFSKQYNCAFIWQKDGVKKLNLYLIINYFKGGKLRFKKIKPEAFEANRFYTVINKKSGEIVPMEVNFNFDDPNLIILPLAFGKRQGREFIWNDLLSLETGSLKLANGRVIEKTLYNRRTRQDEPALFVALTFERREVLDSSNIKPMNLIGVDRGENIPAVIALTDPEGCPLSRFKDSLGNPTHILRIGESYKEKQRTIQAKKEVEQRRAGGYSRKYASKAKNLADDMVRNTARDLLYYAVTQDAMLIFENLSRGFGRQGKRTFMAERQYTRMEDWLTAKLAYEGLPSKTYLSKTLAQYTSKTCSNCGFTITSADYDRVLEKLKKTATGWMTTINGKELKVEGQITYYNRYKRQNVVKDLSVELDRLSEESVNNDISSWTKGRSGEALSLLKKRFSHRPVQEKFVCLNCGFETHADEQAALNIARSWLFLRSQEYKKYQTNKTTGNTDKRAFVETWQSFYRKKLKEVWKPAV

SEQ ID NO: 33485 - protein, 978 aa, synthetic construct
  REGION 1..978: note = engineered CasX variant
QEIKRINKIRRRLVKDSNTKKAGKTGPMKTLLVPVMTPDLRERLENLRKKPENIPQPISNTSRANLNKLLTDYTEMKKAILHVYDEEFQKDPVGLMSRVAQPASKKIDQNKLKPEMDEKGNLTTAGFACSQCGQPLFVYKLEQVSEKGKAYTNYFGRCNVAEHEKLIKLAQLKPEKDSDEAVTYSLGKFGQRALDFYSIHVTKESTHPVKPLAQIAGNRYASGPVGKALSDACMGTIASFLSKYQDIIIEHQKVVKGNQKRLESLRELAGKENLEYPSVTLPPQPHTKEGVDAYNEVIARVRMWVNLNLWQKLKLSRDDAKPLLRLKGFPSFPLVERQANEVDWWDMVCNVKKLINEKKEDGKVFWQNLAGYKRQEALRPYLSSEEDRKKGKKFARYQLGDLLLHLEKKHGEDWGKVYDEAWERIDKKVEGLSKHIKLEEERRSEDAQSKAALTDWLRAKASFVIEGLKEADKDEFCRCELKLQKWYGDLRGKPFAIEAENSILDISGFSKQYNCAFIWQKDGVKKLNLYLIINYFKGGKLRFKKIKPEAFEANRFYTVINKKSGEIVPMEVNFNFDDPNLIILPLAFGKRQGREFIWNDLLSLETGSLKLANGRVIEKTLYNRRTRQDEPALFVALTFERREVLDSSNIKPMNLIGVDRGENIPAVIALTDPEGCPLSRFKDSLGNPTHILRIGESYKEKQRTIQAKKEVEQRRAGGYSRKYASKAKNLADDMVRNTARDLLYYAVTQDAMLIFENLSRGFGRQGKRTFMAERQYTRMEDWLTAKLAYEGLPSKTYLSKTLAQYTSKTCSNCGFTITSADYDRVLEKLKKTATGWMTTINGKELKVEGQITYYNRYKRQNVVKDLSVELDRLSEESVNNDISSWTKGRSGEALSLLKKRFSHRPVQEKFVCLNCGFETHADEQAALNIARSWLFLRSQEYKKYQTNKTTGNTDKRAFVETWQSFYRKKLKEVWKPAV

SEQ ID NO: 33486 - protein, 977 aa, synthetic construct
  REGION 1..977: note = engineered CasX variant
QEIKRINKIRRRLVKDSNTKKAGKTGPMKTLLVPVMTPDLRERLENLRKKPENIPQPISNTSRANLNKLLTDYTEMKKAILHVYDEEFQKDPVGLMSRVAQPASKKIDQNKLKPEMDEKGNLTTAGFACSQCGQPLFVYKLEQVSEKGKAYTNYFGRCNVAEHEKLILLAQLKPEKDSDEAVTYSLGKFGQRALDFYSIHVTKESTHPVKPLAQIAGNRYASPVGKALSDACMGTIASFLSKYQDIIIEHQKVVKGNQKRLESLRELAGKENLEYPSVTLPPQPHTKEGVDAYNEVIARVRMWVNLNLWQKLKLSRDDAKPLLRLKGFPSFPLVERQANEVDWWDMVCNVKKLINEKKEDGKVFWQNLAGYKRQEALRPYLSSEEDRKKGKKFARYQLGDLLLHLEKKHGEDWGKVYDEAWERIDKKVEGLSKHIKLEEERRSEDAQSKAALTDWLRAKASFVIEGLKEADKDEFCRCELKLQKWYGDLRGKPFAIEAENSILDISGFSKQYNCAFIWQKDGVKKLNLYLIINYFKGGKLRFKKIKPEAFEANRFYTVINKKSGEIVPMEVNFNFDDPNLIILPLAFGKRQGREFIWNDLLSLETGSLKLANGRVIEKTLYNRRTRQDEPALFVALTFERREVLDSSNIKPMNLIGVDRGENIPAVIALTDPEGCPLSRFKDSLGNPTHILRIGESYKEKQRTIQAKKEVEQRRAGGYSRKYASKAKNLADDMVRNTARDLLYYAVTQDAMLIFENLSRGFGRQGKRTFMAERQYTRMEDWLTAKLAYEGLPSKTYLSKTLAQYTSKTCSNCGFTITSADYDRVLEKLKKTATGWMTTINGKELKVEGQITYYNRYKRQNVVKDLSVELDRLSEESVNNDISSWTKGRSGEALSLLKKRFSHRPVQEKFVCLNCGFETHADEQAALNIARSWLFLRSQEYKKYQTNKTTGNTDKRAFVETWQSFYRKKLKEVWKPAV

SEQ ID NO: 33487 - protein, 978 aa, synthetic construct
  REGION 1..978: note = engineered CasX variant
QEIKRINKIRRRLVKDSNTKKAGKTGPMKTLLVPVMTPDLRERLENLRKKPENIPQPISNTSRANLNKLLTDYTEMKKAILHVYWEEFQKDPVGLMSRVAQPASKKIDQNKLKPEMDEKGNLTTAGFACSQCGQPLFVYKLEQVSEKGKAYTNYFGRCNVAEHEKLIKLAQLKPEKDSDEAVTYSLGKFGQRALDFYSIHVTKESTHPVKPLAQIAGNRYASYPVGKALSDACMGTIASFLSKYQDIIIEHQKVVKGNQKRLESLRELAGKENLEYPSVTLPPQPHTKEGVDAYNEVIARVRMWVNLNLWQKLKLSRDDAKPLLRLKGFPSFPLVERQANEVDWWDMVCNVKKLINEKKEDGKVFWQNLAGYKRQEALRPYLSSEEDRKKGKKFARYQLGDLLLHLEKKHGEDWGKVYDEAWERIDKKVEGLSKHIKLEEERRSEDAQSKAALTDWLRAKASFVIEGLKEADKDEFCRCELKLQKWYGDLRGKPFAIEAENSILDISGFSKQYNCAFIWQKDGVKKLNLYLIINYFKGGKLRFKKIKPEAFEANRFYTVINKKSGEIVPMEVNFNFDDPNLIILPLAFGKRQGREFIWNDLLSLETGSLKLANGRVIEKTLYNRRTRQDEPALFVALTFERREVLDSSNIKPMNLIGVDRGENIPAVIALTDPEGCPLSRFKDSLGNPTHILRIGESYKEKQRTIQAKKEVEQRRAGGYSRKYASKAKNLADDMVRNTARDLLYYAVTQDAMLIFENLSRGFGRQGKRTFMAERQYTRMEDWLTAKLAYEGLPSKTYLSKTLAQYTSKTCSNCGFTITSADYDRVLEKLKKTATGWMTTINGKELKVEGQITYYNRYKRQNVVKDLSVELDRLSEESVNNDISSWTKGRSGEALSLLKKRFSHRPVQEKFVCLNCGFETHADEQAALNIARSWLFLRSQEYKKYQTNKTTGNTDKRAFVETWQSFYRKKLKEVWKPAV

SEQ ID NO: 33488 - protein, 978 aa, synthetic construct
  REGION 1..978: note = engineered CasX variant
QEIKRINKIRRRLVKDSNTKKAGKTGPMKTLLVPVMTPDLRERLENLRKKPENIPQPISNTSRANLNKLLTDYTEMKKAILHVYWEEFQKDPVGLMSRVAQPASKKIDQNKLKPEMDEKGNLTTAGFACSQCGQPLFVYKLEQVSEKGKAYTNYFGRCNVAEHEKLIKLAQLKPEKDSDEAVTYSLGKFGQRALDFYSIHVTKESTHPVKPLAQIAGNRYASHPVGKALSDACMGTIASFLSKYQDIIIEHQKVVKGNQKRLESLRELAGKENLEYPSVTLPPQPHTKEGVDAYNEVIARVRMWVNLNLWQKLKLSRDDAKPLLRLKGFPSFPLVERQANEVDWWDMVCNVKKLINEKKEDGKVFWQNLAGYKRQEALRPYLSSEEDRKKGKKFARYQLGDLLLHLEKKHGEDWGKVYDEAWERIDKKVEGLSKHIKLEEERRSEDAQSKAALTDWLRAKASFVIEGLKEADKDEFCRCELKLQKWYGDLRGKPFAIEAENSILDISGFSKQYNCAFIWQKDGVKKLNLYLIINYFKGGKLRFKKIKPEAFEANRFYTVINKKSGEIVPMEVNFNFDDPNLIILPLAFGKRQGREFIWNDLLSLETGSLKLANGRVIEKTLYNRRTRQDEPALFVALTFERREVLDSSNIKPMNLIGVDRGENIPAVIALTDPEGCPLSRFKDSLGNPTHILRIGESYKEKQRTIQAKKEVEQRRAGGYSRKYASKAKNLADDMVRNTARDLLYYAVTQDAMLIFENLSRGFGRQGKRTFMAERQYTRMEDWLTAKLAYEGLPSKTYLSKTLAQYTSKTCSNCGFTITSADYDRVLEKLKKTATGWMTTINGKELKVEGQITYYNRYKRQNVVKDLSVELDRLSEESVNNDISSWTKGRSGEALSLLKKRFSHRPVQEKFVCLNCGFETHADEQAALNIARSWLFLRSQEYKKYQTNKTTGNTDKRAFVETWQSFYRKKLKEVWKPAV

SEQ ID NO: 33489 - protein, 978 aa, synthetic construct
  REGION 1..978: note = engineered CasX variant
QEIKRINKIRRRLVKDSNTKKAGKTGPMKTLLVPVMTPDLRERLENLRKKPENIPQPISNTSRANLNKLLTDYTEMKKAILHVYWEEFQKDPVGLMSRVAQPASKKIDQNKLKPEMDEKGNLTTAGFACSQCGQPLFVYKLEQVSEKGKAYTNYFGRCNVAEHEKLIKLAQLKPEKDSDEAVTYSLGKFGQRALDFYSIHVTKESTHPVKPLAQIAGNRYASTPVGKALSDACMGTIASFLSKYQDIIIEHQKVVKGNQKRLESLRELAGKENLEYPSVTLPPQPHTKEGVDAYNEVIARVRMWVNLNLWQKLKLSRDDAKPLLRLKGFPSFPLVERQANEVDWWDMVCNVKKLINEKKEDGKVFWQNLAGYKRQEALRPYLSSEEDRKKGKKFARYQLGDLLLHLEKKHGEDWGKVYDEAWERIDKKVEGLSKHIKLEEERRSEDAQSKAALTDWLRAKASFVIEGLKEADKDEFCRCELKLQKWYGDLRGKPFAIEAENSILDISGFSKQYNCAFIWQKDGVKKLNLYLIINYFKGGKLRFKKIKPEAFEANRFYTVINKKSGEIVPMEVNFNFDDPNLIILPLAFGKRQGREFIWNDLLSLETGSLKLANGRVIEKTLYNRRTRQDEPALFVALTFERREVLDSSNIKPMNLIGVDRGENIPAVIALTDPEGCPLSRFKDSLGNPTHILRIGESYKEKQRTIQAKKEVEQRRAGGYSRKYASKAKNLADDMVRNTARDLLYYAVTQDAMLIFENLSRGFGRQGKRTFMAERQYTRMEDWLTAKLAYEGLPSKTYLSKTLAQYTSKTCSNCGFTITSADYDRVLEKLKKTATGWMTTINGKELKVEGQITYYNRYKRQNVVKDLSVELDRLSEESVNNDISSWTKGRSGEALSLLKKRFSHRPVQEKFVCLNCGFETHADEQAALNIARSWLFLRSQEYKKYQTNKTTGNTDKRAFVETWQSFYRKKLKEVWKPAV

SEQ ID NO: 33490 - protein, 978 aa, synthetic construct
  REGION 1..978: note = engineered CasX variant
QEIKRINKIRRRLVKDSNTKKAGKTGPMKTLLVPVMTPDLRERLENLRKKPENIPQPISNTSRANLNKLLTDYTEMKKAILHVYWEEFQKDPVGLMSRVAQPASKKIDQNKLKPEMDEKGNLTTAGFACSQCGQPLFVYKLEQVSEKGKAYTNYFGRCNVAEHEKLIKLAQLKPEKDSDEAVTYSLGKFGQRALDFYSIHVTKESTHPVKPLAQIAGNRYASAPVGKALSDACMGTIASFLSKYQDIIIEHQKVVKGNQKRLESLRELAGKENLEYPSVTLPPQPHTKEGVDAYNEVIARVRMWVNLNLWQKLKLSRDDAKPLLRLKGFPSFPLVERQANEVDWWDMVCNVKKLINEKKEDGKVFWQNLAGYKRQEALRPYLSSEEDRKKGKKFARYQLGDLLLHLEKKHGEDWGKVYDEAWERIDKKVEGLSKHIKLEEERRSEDAQSKAALTDWLRAKASFVIEGLKEADKDEFCRCELKLQKWYGDLRGKPFAIEAENSILDISGFSKQYNCAFIWQKDGVKKLNLYLIINYFKGGKLRFKKIKPEAFEANRFYTVINKKSGEIVPMEVNFNFDDPNLIILPLAFGKRQGREFIWNDLLSLETGSLKLANGRVIEKTLYNRRTRQDEPALFVALTFERREVLDSSNIKPMNLIGVDRGENIPAVIALTDPEGCPLSRFKDSLGNPTHILRIGESYKEKQRTIQAKKEVEQRRAGGYSRKYASKAKNLADDMVRNTARDLLYYAVTQDAMLIFENLSRGFGRQGKRTFMAERQYTRMEDWLTAKLAYEGLPSKTYLSKTLAQYTSKTCSNCGFTITSADYDRVLEKLKKTATGWMTTINGKELKVEGQITYYNRYKRQNVVKDLSVELDRLSEESVNNDISSWTKGRSGEALSLLKKRFSHRPVQEKFVCLNCGFETHADEQAALNIARSWLFLRSQEYKKYQTNKTTGNTDKRAFVETWQSFYRKKLKEVWKPAV

SEQ ID NO: 33491 - protein, 978 aa, synthetic construct
  REGION 1..978: note = engineered CasX variant
QEIKRINKIRRRLVKDSNTKKAGKTGPMKTLLVPVMTPDLRERLENLRKKPENIPQPISNTSRANLNKLLTDYTEMKKAILHVYWEEFQKDPVGLMSRVAQPASKKIDQNKLKPEMDEKGNLTTAGFACSQCGQPLFVYKLEQVSEKGKAYTNYFGRCNVAEHEKLIKLAQLKPEKDSDEAVTYSLGKFGQRALDFYSIHVTKESTHPVKPLAQIAGNRYASVPVGKALSDACMGTIASFLSKYQDIIIEHQKVVKGNQKRLESLRELAGKENLEYPSVTLPPQPHTKEGVDAYNEVIARVRMWVNLNLWQKLKLSRDDAKPLLRLKGFPSFPLVERQANEVDWWDMVCNVKKLINEKKEDGKVFWQNLAGYKRQEALRPYLSSEEDRKKGKKFARYQLGDLLLHLEKKHGEDWGKVYDEAWERIDKKVEGLSKHIKLEEERRSEDAQSKAALTDWLRAKASFVIEGLKEADKDEFCRCELKLQKWYGDLRGKPFAIEAENSILDISGFSKQYNCAFIWQKDGVKKLNLYLIINYFKGGKLRFKKIKPEAFEANRFYTVINKKSGEIVPMEVNFNFDDPNLIILPLAFGKRQGREFIWNDLLSLETGSLKLANGRVIEKTLYNRRTRQDEPALFVALTFERREVLDSSNIKPMNLIGVDRGENIPAVIALTDPEGCPLSRFKDSLGNPTHILRIGESYKEKQRTIQAKKEVEQRRAGGYSRKYASKAKNLADDMVRNTARDLLYYAVTQDAMLIFENLSRGFGRQGKRTFMAERQYTRMEDWLTAKLAYEGLPSKTYLSKTLAQYTSKTCSNCGFTITSADYDRVLEKLKKTATGWMTTINGKELKVEGQITYYNRYKRQNVVKDLSVELDRLSEESVNNDISSWTKGRSGEALSLLKKRFSHRPVQEKFVCLNCGFETHADEQAALNIARSWLFLRSQEYKKYQTNKTTGNTDKRAFVETWQSFYRKKLKEVWKPAV

SEQ ID NO: 33492 - protein, 979 aa, synthetic construct
  REGION 1..979: note = engineered CasX variant
QEIKRINKIRRRLVKDSNTKKAGKTGPMKTLLVPVMTPDLRERLENLRKKPENIPQPISNTSRANLNKLLTDYTEMKKAILHVYWEEFQKDPVGLMSRVAQPASKKIDQNKLKPEMDEKGNLTTAGFACSQCGQPLFVYKLEQVSEKGKAYTNYFGRCNVAEHEKLIKKLAQLKPEKDSDEAVTYSLGKFGQRALDFYSIHVTKESTHPVKPLAQIAGNRYASGPVGKALSDACMGTIASFLSKYQDIIIEHQKVVKGNQKRLESLRELAGKENLEYPSVTLPPQPHTKEGVDAYNEVIARVRMWVNLNLWQKLKLSRDDAKPLLRLKGFPSFPLVERQANEVDWWDMVCNVKKLINEKKEDGKVFWQNLAGYKRQEALRPYLSSEEDRKKGKKFARYQLGDLLLHLEKKHGEDWGKVYDEAWERIDKKVEGLSKHIKLEEERRSEDAQSKAALTDWLRAKASFVIEGLKEADKDEFCRCELKLQKWYGDLRGKPFAIEAENSILDISGFSKQYNCAFIWQKDGVKKLNLYLIINYFKGGKLRFKKIKPEAFEANRFYTVINKKSGEIVPMEVNFNFDDPNLIILPLAFGKRQGREFIWNDLLSLETGSLKLANGRVIEKTLYNRRTRQDEPALFVALTFERREVLDSSNIKPMNLIGVDRGENIPAVIALTDPEGCPLSRFKDSLGNPTHILRIGESYKEKQRTIQAKKEVEQRRAGGYSRKYASKAKNLADDMVRNTARDLLYYAVTQDAMLIFENLSRGFGRQGKRTFMAERQYTRMEDWLTAKLAYEGLPSKTYLSKTLAQYTSKTCSNCGFTITSADYDRVLEKLKKTATGWMTTINGKELKVEGQITYYNRYKRQNVVKDLSVELDRLSEESVNNDISSWTKGRSGEALSLLKKRFSHRPVQEKFVCLNCGFETHADEQAALNIARSWLFLRSQEYKKYQTNKTTGNTDKRAFVETWQSFYRKKLKEVWKPAV

SEQ ID NO: 33493 - protein, 977 aa, synthetic construct
  REGION 1..977: note = engineered CasX variant
QEIKRINKIRRRLVKDSNTKKAGKTGPMKTLLVPVMTPDLRERLENLRKKPENIPQPISNTSRANLNKLLTDYTEMKKAILHVYWEEFQKDPVGLMSRVAQPASKKIDQNKLKPEMDEKGNLTTAGFACSQCGQPLFVYKLEQVSEKGKAYTNYFGRCNVAEHEKLIKLAQLKPEKDSDEAVTYSLGKFGQRALDFYSIHVTKESTHPVKPLAQIAGNRYASPVGKALSDACMGTIASFLSKYQDIIIEHQKVVKGNQKRLESLRELAGKENLEYPSVTLPPQPHTKEGVDAYNEVIARVRMWVNLNLWQKLKLSRDDAKPLLRLKGFPSFPLVERQANEVDWWDMVCNVKKLINEKKEDGKVFWQNLAGYKRQEALRPYLSSEEDRKKGKKFARYQLGDLLLHLEKKHGEDWGKVYDEAWERIDKKVEGLSKHIKLEEERRSEDAQSKAALTDWLRAKASFVIEGLKEADKDEFCRCELKLQKWYGDLRGKPFAIEAENSILDISGFSKQYNCAFIWQKDGVKKLNLYLIINYFKGGKLRFKKIKPEAFEANRFYTVINKKSGEIVPMEVNFNFDDPNLIILPLAFGKRQGREFIWNDLLSLETGSLKLANGRVIEKTLYNRRTRQDEPALFVALTFERREVLDSSNIKPMNLIGVDRGENIPAVIALTDPEGCPLSRFKDSLGNPTHILRIGESYKEKQRTIQAKKEVEQRRAGGYSRKYASKAKNLADDMVRNTARDLLYYAVTQDAMLIFENLSRGFGRQGKRTFMAERQYTRMEDWLTAKLAYEGLPSKTYLSKTLAQYTSKTCSNCGFTITSADYDRVLEKLKKTATGWMTTINGKELKVEGQITYYNRYKRQNVVKDLSVELDRLSEESVNNDISSWTKGRSGEALSLLKKRFSHRPVQEKFVCLNCGFETHADEQAALNIARSWLFLRSQEYKKYQTNKTTGNTDKRAFVETWQSFYRKKLKEVWKPAV

SEQ ID NO: 33494 - protein, 978 aa, synthetic construct
  REGION 1..978: note = engineered CasX variant
QEIKRINKIRRRLVKDSNTKKAGKTGPMKTLLVPVMTPDLRERLENLRKKPENIPQPISNTSRANLNKLLTDYTEMKKAILHVYWEEFQKDPVGLMSRVAQPASKKIDQNKLKPEMDEKGNLTTAGFACSQCGQPLFVYKLEQVSEKGKAYTNYFGRCNVAEHEKLILLYQLKPEKDSDEAVTYSLGKFGQRALDFYSIHVTKESTHPVKPLAQIAGNRYASYPVGKALSDACMGTIASFLSKYQDIIIEHQKVVKGNQKRLESLRELAGKENLEYPSVTLPPQPHTKEGVDAYNEVIARVRMWVNLNLWQKLKLSRDDAKPLLRLKGFPSFPLVERQANEVDWWDMVCNVKKLINEKKEDGKVFWQNLAGYKRQEALRPYLSSEEDRKKGKKFARYQLGDLLLHLEKKHGEDWGKVYDEAWERIDKKVEGLSKHIKLEEERRSEDAQSKAALTDWLRAKASFVIEGLKEADKDEFCRCELKLQKWYGDLRGKPFAIEAENSILDISGFSKQYNCAFIWQKDGVKKLNLYLIINYFKGGKLRFKKIKPEAFEANRFYTVINKKSGEIVPMEVNFNFDDPNLIILPLAFGKRQGREFIWNDLLSLETGSLKLANGRVIEKTLYNRRTRQDEPALFVALTFERREVLDSSNIKPMNLIGVDRGENIPAVIALTDPEGCPLSRFKDSLGNPTHILRIGESYKEKQRTIQAKKEVEQRRAGGYSRKYASKAKNLADDMVRNTARDLLYYAVTQDAMLIFENLSRGFGRQGKRTFMAERQYTRMEDWLTAKLAYEGLPSKTYLSKTLAQYTSKTCSNCGFTITSADYDRVLEKLKKTATGWMTTINGKELKVEGQITYYNRYKRQNVVKDLSVELDRLSEESVNNDISSWTKGRSGEALSLLKKRFSHRPVQEKFVCLNCGFETHADEQAALNIARSWLFLRSQEYKKYQTNKTTGNTDKRAFVETWQSFYRKKLKEVWKPAV

SEQ ID NO: 33495 - protein, 978 aa, synthetic construct
  REGION 1..978: note = engineered CasX variant
QEIKRINKIRRRLVKDSNTKKAGKTGPMKTLLVPVMTPDLRERLENLRKKPENIPQPISNTSRANLNKLLTDYTEMKKAILHVYWEEFQKDPVGLMSRVAQPASKKIDQNKLKPEMDEKGNLTTAGFACSQCGQPLFVYKLEQVSEKGKAYTNYFGRCNVAEHEKLILLYQLKPEKDSDEAVTYSLGKFGQRALDFYSIHVTKESTHPVKPLAQIAGNRYASHPVGKALSDACMGTIASFLSKYQDIIIEHQKVVKGNQKRLESLRELAGKENLEYPSVTLPPQPHTKEGVDAYNEVIARVRMWVNLNLWQKLKLSRDDAKPLLRLKGFPSFPLVERQANEVDWWDMVCNVKKLINEKKEDGKVFWQNLAGYKRQEALRPYLSSEEDRKKGKKFARYQLGDLLLHLEKKHGEDWGKVYDEAWERIDKKVEGLSKHIKLEEERRSEDAQSKAALTDWLRAKASFVIEGLKEADKDEFCRCELKLQKWYGDLRGKPFAIEAENSILDISGFSKQYNCAFIWQKDGVKKLNLYLIINYFKGGKLRFKKIKPEAFEANRFYTVINKKSGEIVPMEVNFNFDDPNLIILPLAFGKRQGREFIWNDLLSLETGSLKLANGRVIEKTLYNRRTRQDEPALFVALTFERREVLDSSNIKPMNLIGVDRGENIPAVIALTDPEGCPLSRFKDSLGNPTHILRIGESYKEKQRTIQAKKEVEQRRAGGYSRKYASKAKNLADDMVRNTARDLLYYAVTQDAMLIFENLSRGFGRQGKRTFMAERQYTRMEDWLTAKLAYEGLPSKTYLSKTLAQYTSKTCSNCGFTITSADYDRVLEKLKKTATGWMTTINGKELKVEGQITYYNRYKRQNVVKDLSVELDRLSEESVNNDISSWTKGRSGEALSLLKKRFSHRPVQEKFVCLNCGFETHADEQAALNIARSWLFLRSQEYKKYQTNKTTGNTDKRAFVETWQSFYRKKLKEVWKPAV

SEQ ID NO: 33496 - protein, 978 aa, synthetic construct
  REGION 1..978: note = engineered CasX variant
QEIKRINKIRRRLVKDSNTKKAGKTGPMKTLLVPVMTPDLRERLENLRKKPENIPQPISNTSRANLNKLLTDYTEMKKAILHVYWEEFQKDPVGLMSRVAQPASKKIDQNKLKPEMDEKGNLTTAGFACSQCGQPLFVYKLEQVSEKGKAYTNYFGRCNVAEHEKLILLYQLKPEKDSDEAVTYSLGKFGQRALDFYSIHVTKESTHPVKPLAQIAGNRYASSPVGKALSDACMGTIASFLSKYQDIIIEHQKVVKGNQKRLESLRELAGKENLEYPSVTLPPQPHTKEGVDAYNEVIARVRMWVNLNLWQKLKLSRDDAKPLLRLKGFPSFPLVERQANEVDWWDMVCNVKKLINEKKEDGKVFWQNLAGYKRQEALRPYLSSEEDRKKGKKFARYQLGDLLLHLEKKHGEDWGKVYDEAWERIDKKVEGLSKHIKLEEERRSEDAQSKAALTDWLRAKASFVIEGLKEADKDEFCRCELKLQKWYGDLRGKPFAIEAENSILDISGFSKQYNCAFIWQKDGVKKLNLYLIINYFKGGKLRFKKIKPEAFEANRFYTVINKKSGEIVPMEVNFNFDDPNLIILPLAFGKRQGREFIWNDLLSLETGSLKLANGRVIEKTLYNRRTRQDEPALFVALTFERREVLDSSNIKPMNLIGVDRGENIPAVIALTDPEGCPLSRFKDSLGNPTHILRIGESYKEKQRTIQAKKEVEQRRAGGYSRKYASKAKNLADDMVRNTARDLLYYAVTQDAMLIFENLSRGFGRQGKRTFMAERQYTRMEDWLTAKLAYEGLPSKTYLSKTLAQYTSKTCSNCGFTITSADYDRVLEKLKKTATGWMTTINGKELKVEGQITYYNRYKRQNVVKDLSVELDRLSEESVNNDISSWTKGRSGEALSLLKKRFSHRPVQEKFVCLNCGFETHADEQAALNIARSWLFLRSQEYKKYQTNKTTGNTDKRAFVETWQSFYRKKLKEVWKPAV

SEQ ID NO: 33497 - protein, 978 aa, synthetic construct
  REGION 1..978: note = engineered CasX variant
QEIKRINKIRRRLVKDSNTKKAGKTGPMKTLLVPVMTPDLRERLENLRKKPENIPQPISNTSRANLNKLLTDYTEMKKAILHVYWEEFQKDPVGLMSRVAQPASKKIDQNKLKPEMDEKGNLTTAGFACSQCGQPLFVYKLEQVSEKGKAYTNYFGRCNVAEHEKLILLYQLKPEKDSDEAVTYSLGKFGQRALDFYSIHVTKESTHPVKPLAQIAGNRYASTPVGKALSDACMGTIASFLSKYQDIIIEHQKVVKGNQKRLESLRELAGKENLEYPSVTLPPQPHTKEGVDAYNEVIARVRMWVNLNLWQKLKLSRDDAKPLLRLKGFPSFPLVERQANEVDWWDMVCNVKKLINEKKEDGKVFWQNLAGYKRQEALRPYLSSEEDRKKGKKFARYQLGDLLLHLEKKHGEDWGKVYDEAWERIDKKVEGLSKHIKLEEERRSEDAQSKAALTDWLRAKASFVIEGLKEADKDEFCRCELKLQKWYGDLRGKPFAIEAENSILDISGFSKQYNCAFIWQKDGVKKLNLYLIINYFKGGKLRFKKIKPEAFEANRFYTVINKKSGEIVPMEVNFNFDDPNLIILPLAFGKRQGREFIWNDLLSLETGSLKLANGRVIEKTLYNRRTRQDEPALFVALTFERREVLDSSNIKPMNLIGVDRGENIPAVIALTDPEGCPLSRFKDSLGNPTHILRIGESYKEKQRTIQAKKEVEQRRAGGYSRKYASKAKNLADDMVRNTARDLLYYAVTQDAMLIFENLSRGFGRQGKRTFMAERQYTRMEDWLTAKLAYEGLPSKTYLSKTLAQYTSKTCSNCGFTITSADYDRVLEKLKKTATGWMTTINGKELKVEGQITYYNRYKRQNVVKDLSVELDRLSEESVNNDISSWTKGRSGEALSLLKKRFSHRPVQEKFVCLNCGFETHADEQAALNIARSWLFLRSQEYKKYQTNKTTGNTDKRAFVETWQSFYRKKLKEVWKPAV

SEQ ID NO: 33498 - protein, 978 aa, synthetic construct
  REGION 1..978: note = engineered CasX variant
QEIKRINKIRRRLVKDSNTKKAGKTGPMKTLLVPVMTPDLRERLENLRKKPENIPQPISNTSRANLNKLLTDYTEMKKAILHVYWEEFQKDPVGLMSRVAQPASKKIDQNKLKPEMDEKGNLTTAGFACSQCGQPLFVYKLEQVSEKGKAYTNYFGRCNVAEHEKLILLYQLKPEKDSDEAVTYSLGKFGQRALDFYSIHVTKESTHPVKPLAQIAGNRYASAPVGKALSDACMGTIASFLSKYQDIIIEHQKVVKGNQKRLESLRELAGKENLEYPSVTLPPQPHTKEGVDAYNEVIARVRMWVNLNLWQKLKLSRDDAKPLLRLKGFPSFPLVERQANEVDWWDMVCNVKKLINEKKEDGKVFWQNLAGYKRQEALRPYLSSEEDRKKGKKFARYQLGDLLLHLEKKHGEDWGKVYDEAWERIDKKVEGLSKHIKLEEERRSEDAQSKAALTDWLRAKASFVIEGLKEADKDEFCRCELKLQKWYGDLRGKPFAIEAENSILDISGFSKQYNCAFIWQKDGVKKLNLYLIINYFKGGKLRFKKIKPEAFEANRFYTVINKKSGEIVPMEVNFNFDDPNLIILPLAFGKRQGREFIWNDLLSLETGSLKLANGRVIEKTLYNRRTRQDEPALFVALTFERREVLDSSNIKPMNLIGVDRGENIPAVIALTDPEGCPLSRFKDSLGNPTHILRIGESYKEKQRTIQAKKEVEQRRAGGYSRKYASKAKNLADDMVRNTARDLLYYAVTQDAMLIFENLSRGFGRQGKRTFMAERQYTRMEDWLTAKLAYEGLPSKTYLSKTLAQYTSKTCSNCGFTITSADYDRVLEKLKKTATGWMTTINGKELKVEGQITYYNRYKRQNVVKDLSVELDRLSEESVNNDISSWTKGRSGEALSLLKKRFSHRPVQEKFVCLNCGFETHADEQAALNIARSWLFLRSQEYKKYQTNKTTGNTDKRAFVETWQSFYRKKLKEVWKPAV

SEQ ID NO: 33499 - protein, 978 aa, synthetic construct
  REGION 1..978: note = engineered CasX variant
QEIKRINKIRRRLVKDSNTKKAGKTGPMKTLLVPVMTPDLRERLENLRKKPENIPQPISNTSRANLNKLLTDYTEMKKAILHVYWEEFQKDPVGLMSRVAQPASKKIDQNKLKPEMDEKGNLTTAGFACSQCGQPLFVYKLEQVSEKGKAYTNYFGRCNVAEHEKLILLYQLKPEKDSDEAVTYSLGKFGQRALDFYSIHVTKESTHPVKPLAQIAGNRYASVPVGKALSDACMGTIASFLSKYQDIIIEHQKVVKGNQKRLESLRELAGKENLEYPSVTLPPQPHTKEGVDAYNEVIARVRMWVNLNLWQKLKLSRDDAKPLLRLKGFPSFPLVERQANEVDWWDMVCNVKKLINEKKEDGKVFWQNLAGYKRQEALRPYLSSEEDRKKGKKFARYQLGDLLLHLEKKHGEDWGKVYDEAWERIDKKVEGLSKHIKLEEERRSEDAQSKAALTDWLRAKASFVIEGLKEADKDEFCRCELKLQKWYGDLRGKPFAIEAENSILDISGFSKQYNCAFIWQKDGVKKLNLYLIINYFKGGKLRFKKIKPEAFEANRFYTVINKKSGEIVPMEVNFNFDDPNLIILPLAFGKRQGREFIWNDLLSLETGSLKLANGRVIEKTLYNRRTRQDEPALFVALTFERREVLDSSNIKPMNLIGVDRGENIPAVIALTDPEGCPLSRFKDSLGNPTHILRIGESYKEKQRTIQAKKEVEQRRAGGYSRKYASKAKNLADDMVRNTARDLLYYAVTQDAMLIFENLSRGFGRQGKRTFMAERQYTRMEDWLTAKLAYEGLPSKTYLSKTLAQYTSKTCSNCGFTITSADYDRVLEKLKKTATGWMTTINGKELKVEGQITYYNRYKRQNVVKDLSVELDRLSEESVNNDISSWTKGRSGEALSLLKKRFSHRPVQEKFVCLNCGFETHADEQAALNIARSWLFLRSQEYKKYQTNKTTGNTDKRAFVETWQSFYRKKLKEVWKPAV

SEQ ID NO: 33500 - protein, 978 aa, synthetic construct
  REGION 1..978: note = engineered CasX variant
QEIKRINKIRRRLVKDSNTKKAGKTGPMKTLLVPVMTPDLRERLENLRKKPENIPQPISNTSRANLNKLLTDYTEMKKAILHVYWEEFQKDPVGLMSRVAQPASKKIDQNKLKPEMDEKGNLTTAGFACSQCGQPLFVYKLEQVSEKGKAYTNYFGRCNVAEHEKLIKLYQLKPEKDSDEAVTYSLGKFGQRALDFYSIHVTKESTHPVKPLAQIAGNRYASGPVGKALSDACMGTIASFLSKYQDIIIEHQKVVKGNQKRLESLRELAGKENLEYPSVTLPPQPHTKEGVDAYNEVIARVRMWVNLNLWQKLKLSRDDAKPLLRLKGFPSFPLVERQANEVDWWDMVCNVKKLINEKKEDGKVFWQNLAGYKRQEALRPYLSSEEDRKKGKKFARYQLGDLLLHLEKKHGEDWGKVYDEAWERIDKKVEGLSKHIKLEEERRSEDAQSKAALTDWLRAKASFVIEGLKEADKDEFCRCELKLQKWYGDLRGKPFAIEAENSILDISGFSKQYNCAFIWQKDGVKKLNLYLIINYFKGGKLRFKKIKPEAFEANRFYTVINKKSGEIVPMEVNFNFDDPNLIILPLAFGKRQGREFIWNDLLSLETGSLKLANGRVIEKTLYNRRTRQDEPALFVALTFERREVLDSSNIKPMNLIGVDRGENIPAVIALTDPEGCPLSRFKDSLGNPTHILRIGESYKEKQRTIQAKKEVEQRRAGGYSRKYASKAKNLADDMVRNTARDLLYYAVTQDAMLIFENLSRGFGRQGKRTFMAERQYTRMEDWLTAKLAYEGLPSKTYLSKTLAQYTSKTCSNCGFTITSADYDRVLEKLKKTATGWMTTINGKELKVEGQITYYNRYKRQNVVKDLSVELDRLSEESVNNDISSWTKGRSGEALSLLKKRFSHRPVQEKFVCLNCGFETHADEQAALNIARSWLFLRSQEYKKYQTNKTTGNTDKRAFVETWQSFYRKKLKEVWKPAV

SEQ ID NO: 33501 - protein, 977 aa, synthetic construct
  REGION 1..977: note = engineered CasX variant
QEIKRINKIRRRLVKDSNTKKAGKTGPMKTLLVPVMTPDLRERLENLRKKPENIPQPISNTSRANLNKLLTDYTEMKKAILHVYWEEFQKDPVGLMSRVAQPASKKIDQNKLKPEMDEKGNLTTAGFACSQCGQPLFVYKLEQVSEKGKAYTNYFGRCNVAEHEKLILLYQLKPEKDSDEAVTYSLGKFGQRALDFYSIHVTKESTHPVKPLAQIAGNRYASPVGKALSDACMGTIASFLSKYQDIIIEHQKVVKGNQKRLESLRELAGKENLEYPSVTLPPQPHTKEGVDAYNEVIARVRMWVNLNLWQKLKLSRDDAKPLLRLKGFPSFPLVERQANEVDWWDMVCNVKKLINEKKEDGKVFWQNLAGYKRQEALRPYLSSEEDRKKGKKFARYQLGDLLLHLEKKHGEDWGKVYDEAWERIDKKVEGLSKHIKLEEERRSEDAQSKAALTDWLRAKASFVIEGLKEADKDEFCRCELKLQKWYGDLRGKPFAIEAENSILDISGFSKQYNCAFIWQKDGVKKLNLYLIINYFKGGKLRFKKIKPEAFEANRFYTVINKKSGEIVPMEVNFNFDDPNLIILPLAFGKRQGREFIWNDLLSLETGSLKLANGRVIEKTLYNRRTRQDEPALFVALTFERREVLDSSNIKPMNLIGVDRGENIPAVIALTDPEGCPLSRFKDSLGNPTHILRIGESYKEKQRTIQAKKEVEQRRAGGYSRKYASKAKNLADDMVRNTARDLLYYAVTQDAMLIFENLSRGFGRQGKRTFMAERQYTRMEDWLTAKLAYEGLPSKTYLSKTLAQYTSKTCSNCGFTITSADYDRVLEKLKKTATGWMTTINGKELKVEGQITYYNRYKRQNVVKDLSVELDRLSEESVNNDISSWTKGRSGEALSLLKKRFSHRPVQEKFVCLNCGFETHADEQAALNIARSWLFLRSQEYKKYQTNKTTGNTDKRAFVETWQSFYRKKLKEVWKPAV

SEQ ID NO: 33502 - protein, 978 aa, synthetic construct
  REGION 1..978: note = engineered CasX variant
QEIKRINKIRRRLVKDSNTKKAGKTGPMKTLLVPVMTPDLRERLENLRKKPENIPQPISNTSRANLNKLLTDYTEMKKAILHVYWEEFQKDPVGLMSRVAQPASKKIDQNKLKPEMDEKGNLTTAGFACSQCGQPLFVYKLEQVSEKGKAYTNYFGRCNVAEHEKLILLSQLKPEKDSDEAVTYSLGKFGQRALDFYSIHVTKESTHPVKPLAQIAGNRYASYPVGKALSDACMGTIASFLSKYQDIIIEHQKVVKGNQKRLESLRELAGKENLEYPSVTLPPQPHTKEGVDAYNEVIARVRMWVNLNLWQKLKLSRDDAKPLLRLKGFPSFPLVERQANEVDWWDMVCNVKKLINEKKEDGKVFWQNLAGYKRQEALRPYLSSEEDRKKGKKFARYQLGDLLLHLEKKHGEDWGKVYDEAWERIDKKVEGLSKHIKLEEERRSEDAQSKAALTDWLRAKASFVIEGLKEADKDEFCRCELKLQKWYGDLRGKPFAIEAENSILDISGFSKQYNCAFIWQKDGVKKLNLYLIINYFKGGKLRFKKIKPEAFEANRFYTVINKKSGEIVPMEVNFNFDDPNLIILPLAFGKRQGREFIWNDLLSLETGSLKLANGRVIEKTLYNRRTRQDEPALFVALTFERREVLDSSNIKPMNLIGVDRGENIPAVIALTDPEGCPLSRFKDSLGNPTHILRIGESYKEKQRTIQAKKEVEQRRAGGYSRKYASKAKNLADDMVRNTARDLLYYAVTQDAMLIFENLSRGFGRQGKRTFMAERQYTRMEDWLTAKLAYEGLPSKTYLSKTLAQYTSKTCSNCGFTITSADYDRVLEKLKKTATGWMTTINGKELKVEGQITYYNRYKRQNVVKDLSVELDRLSEESVNNDISSWTKGRSGEALSLLKKRFSHRPVQEKFVCLNCGFETHADEQAALNIARSWLFLRSQEYKKYQTNKTTGNTDKRAFVETWQSFYRKKLKEVWKPAV

SEQ ID NO: 33503 - protein, 978 aa, synthetic construct
  REGION 1..978: note = engineered CasX variant
QEIKRINKIRRRLVKDSNTKKAGKTGPMKTLLVPVMTPDLRERLENLRKKPENIPQPISNTSRANLNKLLTDYTEMKKAILHVYWEEFQKDPVGLMSRVAQPASKKIDQNKLKPEMDEKGNLTTAGFACSQCGQPLFVYKLEQVSEKGKAYTNYFGRCNVAEHEKLILLSQLKPEKDSDEAVTYSLGKFGQRALDFYSIHVTKESTHPVKPLAQIAGNRYASHPVGKALSDACMGTIASFLSKYQDIIIEHQKVVKGNQKRLESLRELAGKENLEYPSVTLPPQPHTKEGVDAYNEVIARVRMWVNLNLWQKLKLSRDDAKPLLRLKGFPSFPLVERQANEVDWWDMVCNVKKLINEKKEDGKVFWQNLAGYKRQEALRPYLSSEEDRKKGKKFARYQLGDLLLHLEKKHGEDWGKVYDEAWERIDKKVEGLSKHIKLEEERRSEDAQSKAALTDWLRAKASFVIEGLKEADKDEFCRCELKLQKWYGDLRGKPFAIEAENSILDISGFSKQYNCAFIWQKDGVKKLNLYLIINYFKGGKLRFKKIKPEAFEANRFYTVINKKSGEIVPMEVNFNFDDPNLIILPLAFGKRQGREFIWNDLLSLETGSLKLANGRVIEKTLYNRRTRQDEPALFVALTFERREVLDSSNIKPMNLIGVDRGENIPAVIALTDPEGCPLSRFKDSLGNPTHILRIGESYKEKQRTIQAKKEVEQRRAGGYSRKYASKAKNLADDMVRNTARDLLYYAVTQDAMLIFENLSRGFGRQGKRTFMAERQYTRMEDWLTAKLAYEGLPSKTYLSKTLAQYTSKTCSNCGFTITSADYDRVLEKLKKTATGWMTTINGKELKVEGQITYYNRYKRQNVVKDLSVELDRLSEESVNNDISSWTKGRSGEALSLLKKRFSHRPVQEKFVCLNCGFETHADEQAALNIARSWLFLRSQEYKKYQTNKTTGNTDKRAFVETWQSFYRKKLKEVWKPAV

SEQ ID NO: 33504 - protein, 978 aa, synthetic construct
  REGION 1..978: note = engineered CasX variant
QEIKRINKIRRRLVKDSNTKKAGKTGPMKTLLVPVMTPDLRERLENLRKKPENIPQPISNTSRANLNKLLTDYTEMKKAILHVYWEEFQKDPVGLMSRVAQPASKKIDQNKLKPEMDEKGNLTTAGFACSQCGQPLFVYKLEQVSEKGKAYTNYFGRCNVAEHEKLILLSQLKPEKDSDEAVTYSLGKFGQRALDFYSIHVTKESTHPVKPLAQIAGNRYASSPVGKALSDACMGTIASFLSKYQDIIIEHQKVVKGNQKRLESLRELAGKENLEYPSVTLPPQPHTKEGVDAYNEVIARVRMWVNLNLWQKLKLSRDDAKPLLRLKGFPSFPLVERQANEVDWWDMVCNVKKLINEKKEDGKVFWQNLAGYKRQEALRPYLSSEEDRKKGKKFARYQLGDLLLHLEKKHGEDWGKVYDEAWERIDKKVEGLSKHIKLEEERRSEDAQSKAALTDWLRAKASFVIEGLKEADKDEFCRCELKLQKWYGDLRGKPFAIEAENSILDISGFSKQYNCAFIWQKDGVKKLNLYLIINYFKGGKLRFKKIKPEAFEANRFYTVINKKSGEIVPMEVNFNFDDPNLIILPLAFGKRQGREFIWNDLLSLETGSLKLANGRVIEKTLYNRRTRQDEPALFVALTFERREVLDSSNIKPMNLIGVDRGENIPAVIALTDPEGCPLSRFKDSLGNPTHILRIGESYKEKQRTIQAKKEVEQRRAGGYSRKYASKAKNLADDMVRNTARDLLYYAVTQDAMLIFENLSRGFGRQGKRTFMAERQYTRMEDWLTAKLAYEGLPSKTYLSKTLAQYTSKTCSNCGFTITSADYDRVLEKLKKTATGWMTTINGKELKVEGQITYYNRYKRQNVVKDLSVELDRLSEESVNNDISSWTKGRSGEALSLLKKRFSHRPVQEKFVCLNCGFETHADEQAALNIARSWLFLRSQEYKKYQTNKTTGNTDKRAFVETWQSFYRKKLKEVWKPAV

SEQ ID NO: 33505 - protein, 978 aa, synthetic construct
  REGION 1..978: note = engineered CasX variant
QEIKRINKIRRRLVKDSNTKKAGKTGPMKTLLVPVMTPDLRERLENLRKKPENIPQPISNTSRANLNKLLTDYTEMKKAILHVYWEEFQKDPVGLMSRVAQPASKKIDQNKLKPEMDEKGNLTTAGFACSQCGQPLFVYKLEQVSEKGKAYTNYFGRCNVAEHEKLILLSQLKPEKDSDEAVTYSLGKFGQRALDFYSIHVTKESTHPVKPLAQIAGNRYASTPVGKALSDACMGTIASFLSKYQDIIIEHQKVVKGNQKRLESLRELAGKENLEYPSVTLPPQPHTKEGVDAYNEVIARVRMWVNLNLWQKLKLSRDDAKPLLRLKGFPSFPLVERQANEVDWWDMVCNVKKLINEKKEDGKVFWQNLAGYKRQEALRPYLSSEEDRKKGKKFARYQLGDLLLHLEKKHGEDWGKVYDEAWERIDKKVEGLSKHIKLEEERRSEDAQSKAALTDWLRAKASFVIEGLKEADKDEFCRCELKLQKWYGDLRGKPFAIEAENSILDISGFSKQYNCAFIWQKDGVKKLNLYLIINYFKGGKLRFKKIKPEAFEANRFYTVINKKSGEIVPMEVNFNFDDPNLIILPLAFGKRQGREFIWNDLLSLETGSLKLANGRVIEKTLYNRRTRQDEPALFVALTFERREVLDSSNIKPMNLIGVDRGENIPAVIALTDPEGCPLSRFKDSLGNPTHILRIGESYKEKQRTIQAKKEVEQRRAGGYSRKYASKAKNLADDMVRNTARDLLYYAVTQDAMLIFENLSRGFGRQGKRTFMAERQYTRMEDWLTAKLAYEGLPSKTYLSKTLAQYTSKTCSNCGFTITSADYDRVLEKLKKTATGWMTTINGKELKVEGQITYYNRYKRQNVVKDLSVELDRLSEESVNNDISSWTKGRSGEALSLLKKRFSHRPVQEKFVCLNCGFETHADEQAALNIARSWLFLRSQEYKKYQTNKTTGNTDKRAFVETWQSFYRKKLKEVWKPAV

SEQ ID NO: 33506 - protein, 978 aa, synthetic construct
  REGION 1..978: note = engineered CasX variant
QEIKRINKIRRRLVKDSNTKKAGKTGPMKTLLVPVMTPDLRERLENLRKKPENIPQPISNTSRANLNKLLTDYTEMKKAILHVYWEEFQKDPVGLMSRVAQPASKKIDQNKLKPEMDEKGNLTTAGFACSQCGQPLFVYKLEQVSEKGKAYTNYFGRCNVAEHEKLILLSQLKPEKDSDEAVTYSLGKFGQRALDFYSIHVTKESTHPVKPLAQIAGNRYASAPVGKALSDACMGTIASFLSKYQDIIIEHQKVVKGNQKRLESLRELAGKENLEYPSVTLPPQPHTKEGVDAYNEVIARVRMWVNLNLWQKLKLSRDDAKPLLRLKGFPSFPLVERQANEVDWWDMVCNVKKLINEKKEDGKVFWQNLAGYKRQEALRPYLSSEEDRKKGKKFARYQLGDLLLHLEKKHGEDWGKVYDEAWERIDKKVEGLSKHIKLEEERRSEDAQSKAALTDWLRAKASFVIEGLKEADKDEFCRCELKLQKWYGDLRGKPFAIEAENSILDISGFSKQYNCAFIWQKDGVKKLNLYLIINYFKGGKLRFKKIKPEAFEANRFYTVINKKSGEIVPMEVNFNFDDPNLIILPLAFGKRQGREFIWNDLLSLETGSLKLANGRVIEKTLYNRRTRQDEPALFVALTFERREVLDSSNIKPMNLIGVDRGENIPAVIALTDPEGCPLSRFKDSLGNPTHILRIGESYKEKQRTIQAKKEVEQRRAGGYSRKYASKAKNLADDMVRNTARDLLYYAVTQDAMLIFENLSRGFGRQGKRTFMAERQYTRMEDWLTAKLAYEGLPSKTYLSKTLAQYTSKTCSNCGFTITSADYDRVLEKLKKTATGWMTTINGKELKVEGQITYYNRYKRQNVVKDLSVELDRLSEESVNNDISSWTKGRSGEALSLLKKRFSHRPVQEKFVCLNCGFETHADEQAALNIARSWLFLRSQEYKKYQTNKTTGNTDKRAFVETWQSFYRKKLKEVWKPAV

SEQ ID NO: 33507 - protein, 978 aa, synthetic construct
  REGION 1..978: note = engineered CasX variant
QEIKRINKIRRRLVKDSNTKKAGKTGPMKTLLVPVMTPDLRERLENLRKKPENIPQPISNTSRANLNKLLTDYTEMKKAILHVYWEEFQKDPVGLMSRVAQPASKKIDQNKLKPEMDEKGNLTTAGFACSQCGQPLFVYKLEQVSEKGKAYTNYFGRCNVAEHEKLILLSQLKPEKDSDEAVTYSLGKFGQRALDFYSIHVTKESTHPVKPLAQIAGNRYASVPVGKALSDACMGTIASFLSKYQDIIIEHQKVVKGNQKRLESLRELAGKENLEYPSVTLPPQPHTKEGVDAYNEVIARVRMWVNLNLWQKLKLSRDDAKPLLRLKGFPSFPLVERQANEVDWWDMVCNVKKLINEKKEDGKVFWQNLAGYKRQEALRPYLSSEEDRKKGKKFARYQLGDLLLHLEKKHGEDWGKVYDEAWERIDKKVEGLSKHIKLEEERRSEDAQSKAALTDWLRAKASFVIEGLKEADKDEFCRCELKLQKWYGDLRGKPFAIEAENSILDISGFSKQYNCAFIWQKDGVKKLNLYLIINYFKGGKLRFKKIKPEAFEANRFYTVINKKSGEIVPMEVNFNFDDPNLIILPLAFGKRQGREFIWNDLLSLETGSLKLANGRVIEKTLYNRRTRQDEPALFVALTFERREVLDSSNIKPMNLIGVDRGENIPAVIALTDPEGCPLSRFKDSLGNPTHILRIGESYKEKQRTIQAKKEVEQRRAGGYSRKYASKAKNLADDMVRNTARDLLYYAVTQDAMLIFENLSRGFGRQGKRTFMAERQYTRMEDWLTAKLAYEGLPSKTYLSKTLAQYTSKTCSNCGFTITSADYDRVLEKLKKTATGWMTTINGKELKVEGQITYYNRYKRQNVVKDLSVELDRLSEESVNNDISSWTKGRSGEALSLLKKRFSHRPVQEKFVCLNCGFETHADEQAALNIARSWLFLRSQEYKKYQTNKTTGNTDKRAFVETWQSFYRKKLKEVWKPAV

SEQ ID NO: 33508 - protein, 978 aa, synthetic construct
  REGION 1..978: note = engineered CasX variant
QEIKRINKIRRRLVKDSNTKKAGKTGPMKTLLVPVMTPDLRERLENLRKKPENIPQPISNTSRANLNKLLTDYTEMKKAILHVYWEEFQKDPVGLMSRVAQPASKKIDQNKLKPEMDEKGNLTTAGFACSQCGQPLFVYKLEQVSEKGKAYTNYFGRCNVAEHEKLIKLSQLKPEKDSDEAVTYSLGKFGQRALDFYSIHVTKESTHPVKPLAQIAGNRYASGPVGKALSDACMGTIASFLSKYQDIIIEHQKVVKGNQKRLESLRELAGKENLEYPSVTLPPQPHTKEGVDAYNEVIARVRMWVNLNLWQKLKLSRDDAKPLLRLKGFPSFPLVERQANEVDWWDMVCNVKKLINEKKEDGKVFWQNLAGYKRQEALRPYLSSEEDRKKGKKFARYQLGDLLLHLEKKHGEDWGKVYDEAWERIDKKVEGLSKHIKLEEERRSEDAQSKAALTDWLRAKASFVIEGLKEADKDEFCRCELKLQKWYGDLRGKPFAIEAENSILDISGFSKQYNCAFIWQKDGVKKLNLYLIINYFKGGKLRFKKIKPEAFEANRFYTVINKKSGEIVPMEVNFNFDDPNLIILPLAFGKRQGREFIWNDLLSLETGSLKLANGRVIEKTLYNRRTRQDEPALFVALTFERREVLDSSNIKPMNLIGVDRGENIPAVIALTDPEGCPLSRFKDSLGNPTHILRIGESYKEKQRTIQAKKEVEQRRAGGYSRKYASKAKNLADDMVRNTARDLLYYAVTQDAMLIFENLSRGFGRQGKRTFMAERQYTRMEDWLTAKLAYEGLPSKTYLSKTLAQYTSKTCSNCGFTITSADYDRVLEKLKKTATGWMTTINGKELKVEGQITYYNRYKRQNVVKDLSVELDRLSEESVNNDISSWTKGRSGEALSLLKKRFSHRPVQEKFVCLNCGFETHADEQAALNIARSWLFLRSQEYKKYQTNKTTGNTDKRAFVETWQSFYRKKLKEVWKPAV

SEQ ID NO: 33509 - protein, 977 aa, synthetic construct
  REGION 1..977: note = engineered CasX variant
QEIKRINKIRRRLVKDSNTKKAGKTGPMKTLLVPVMTPDLRERLENLRKKPENIPQPISNTSRANLNKLLTDYTEMKKAILHVYWEEFQKDPVGLMSRVAQPASKKIDQNKLKPEMDEKGNLTTAGFACSQCGQPLFVYKLEQVSEKGKAYTNYFGRCNVAEHEKLILLSQLKPEKDSDEAVTYSLGKFGQRALDFYSIHVTKESTHPVKPLAQIAGNRYASPVGKALSDACMGTIASFLSKYQDIIIEHQKVVKGNQKRLESLRELAGKENLEYPSVTLPPQPHTKEGVDAYNEVIARVRMWVNLNLWQKLKLSRDDAKPLLRLKGFPSFPLVERQANEVDWWDMVCNVKKLINEKKEDGKVFWQNLAGYKRQEALRPYLSSEEDRKKGKKFARYQLGDLLLHLEKKHGEDWGKVYDEAWERIDKKVEGLSKHIKLEEERRSEDAQSKAALTDWLRAKASFVIEGLKEADKDEFCRCELKLQKWYGDLRGKPFAIEAENSILDISGFSKQYNCAFIWQKDGVKKLNLYLIINYFKGGKLRFKKIKPEAFEANRFYTVINKKSGEIVPMEVNFNFDDPNLIILPLAFGKRQGREFIWNDLLSLETGSLKLANGRVIEKTLYNRRTRQDEPALFVALTFERREVLDSSNIKPMNLIGVDRGENIPAVIALTDPEGCPLSRFKDSLGNPTHILRIGESYKEKQRTIQAKKEVEQRRAGGYSRKYASKAKNLADDMVRNTARDLLYYAVTQDAMLIFENLSRGFGRQGKRTFMAERQYTRMEDWLTAKLAYEGLPSKTYLSKTLAQYTSKTCSNCGFTITSADYDRVLEKLKKTATGWMTTINGKELKVEGQITYYNRYKRQNVVKDLSVELDRLSEESVNNDISSWTKGRSGEALSLLKKRFSHRPVQEKFVCLNCGFETHADEQAALNIARSWLFLRSQEYKKYQTNKTTGNTDKRAFVETWQSFYRKKLKEVWKPAV

SEQ ID NO: 33510 - protein, 978 aa, synthetic construct
  REGION 1..978: note = engineered CasX variant
QEIKRINKIRRRLVKDSNTKKAGKTGPMKTLLVPVMTPDLRERLENLRKKPENIPQPISNTSRANLNKLLTDYTEMKKAILHVYWEEFQKDPVGLMSRVAQPASKKIDQNKLKPEMDEKGNLTTAGFACSQCGQPLFVYKLEQVSEKGKAYTNYFGRCNVAEHEKLILLAQLKPEKDSDEAVTYSLGKFGQRALDFYSIHVTKESTHPVKPLAQIAGNRYASYPVGKALSDACMGTIASFLSKYQDIIIEHQKVVKGNQKRLESLRELAGKENLEYPSVTLPPQPHTKEGVDAYNEVIARVRMWVNLNLWQKLKLSRDDAKPLLRLKGFPSFPLVERQANEVDWWDMVCNVKKLINEKKEDGKVFWQNLAGYKRQEALRPYLSSEEDRKKGKKFARYQLGDLLLHLEKKHGEDWGKVYDEAWERIDKKVEGLSKHIKLEEERRSEDAQSKAALTDWLRAKASFVIEGLKEADKDEFCRCELKLQKWYGDLRGKPFAIEAENSILDISGFSKQYNCAFIWQKDGVKKLNLYLIINYFKGGKLRFKKIKPEAFEANRFYTVINKKSGEIVPMEVNFNFDDPNLIILPLAFGKRQGREFIWNDLLSLETGSLKLANGRVIEKTLYNRRTRQDEPALFVALTFERREVLDSSNIKPMNLIGVDRGENIPAVIALTDPEGCPLSRFKDSLGNPTHILRIGESYKEKQRTIQAKKEVEQRRAGGYSRKYASKAKNLADDMVRNTARDLLYYAVTQDAMLIFENLSRGFGRQGKRTFMAERQYTRMEDWLTAKLAYEGLPSKTYLSKTLAQYTSKTCSNCGFTITSADYDRVLEKLKKTATGWMTTINGKELKVEGQITYYNRYKRQNVVKDLSVELDRLSEESVNNDISSWTKGRSGEALSLLKKRFSHRPVQEKFVCLNCGFETHADEQAALNIARSWLFLRSQEYKKYQTNKTTGNTDKRAFVETWQSFYRKKLKEVWKPAV

SEQ ID NO: 33511 - protein, 978 aa, synthetic construct
  REGION 1..978: note = engineered CasX variant
QEIKRINKIRRRLVKDSNTKKAGKTGPMKTLLVPVMTPDLRERLENLRKKPENIPQPISNTSRANLNKLLTDYTEMKKAILHVYWEEFQKDPVGLMSRVAQPASKKIDQNKLKPEMDEKGNLTTAGFACSQCGQPLFVYKLEQVSEKGKAYTNYFGRCNVAEHEKLILLAQLKPEKDSDEAVTYSLGKFGQRALDFYSIHVTKESTHPVKPLAQIAGNRYASHPVGKALSDACMGTIASFLSKYQDIIIEHQKVVKGNQKRLESLRELAGKENLEYPSVTLPPQPHTKEGVDAYNEVIARVRMWVNLNLWQKLKLSRDDAKPLLRLKGFPSFPLVERQANEVDWWDMVCNVKKLINEKKEDGKVFWQNLAGYKRQEALRPYLSSEEDRKKGKKFARYQLGDLLLHLEKKHGEDWGKVYDEAWERIDKKVEGLSKHIKLEEERRSEDAQSKAALTDWLRAKASFVIEGLKEADKDEFCRCELKLQKWYGDLRGKPFAIEAENSILDISGFSKQYNCAFIWQKDGVKKLNLYLIINYFKGGKLRFKKIKPEAFEANRFYTVINKKSGEIVPMEVNFNFDDPNLIILPLAFGKRQGREFIWNDLLSLETGSLKLANGRVIEKTLYNRRTRQDEPALFVALTFERREVLDSSNIKPMNLIGVDRGENIPAVIALTDPEGCPLSRFKDSLGNPTHILRIGESYKEKQRTIQAKKEVEQRRAGGYSRKYASKAKNLADDMVRNTARDLLYYAVTQDAMLIFENLSRGFGRQGKRTFMAERQYTRMEDWLTAKLAYEGLPSKTYLSKTLAQYTSKTCSNCGFTITSADYDRVLEKLKKTATGWMTTINGKELKVEGQITYYNRYKRQNVVKDLSVELDRLSEESVNNDISSWTKGRSGEALSLLKKRFSHRPVQEKFVCLNCGFETHADEQAALNIARSWLFLRSQEYKKYQTNKTTGNTDKRAFVETWQSFYRKKLKEVWKPAV

SEQ ID NO: 33512 - protein, 978 aa, synthetic construct
  REGION 1..978: note = engineered CasX variant
QEIKRINKIRRRLVKDSNTKKAGKTGPMKTLLVPVMTPDLRERLENLRKKPENIPQPISNTSRANLNKLLTDYTEMKKAILHVYWEEFQKDPVGLMSRVAQPASKKIDQNKLKPEMDEKGNLTTAGFACSQCGQPLFVYKLEQVSEKGKAYTNYFGRCNVAEHEKLILLAQLKPEKDSDEAVTYSLGKFGQRALDFYSIHVTKESTHPVKPLAQIAGNRYASTPVGKALSDACMGTIASFLSKYQDIIIEHQKVVKGNQKRLESLRELAGKENLEYPSVTLPPQPHTKEGVDAYNEVIARVRMWVNLNLWQKLKLSRDDAKPLLRLKGFPSFPLVERQANEVDWWDMVCNVKKLINEKKEDGKVFWQNLAGYKRQEALRPYLSSEEDRKKGKKFARYQLGDLLLHLEKKHGEDWGKVYDEAWERIDKKVEGLSKHIKLEEERRSEDAQSKAALTDWLRAKASFVIEGLKEADKDEFCRCELKLQKWYGDLRGKPFAIEAENSILDISGFSKQYNCAFIWQKDGVKKLNLYLIINYFKGGKLRFKKIKPEAFEANRFYTVINKKSGEIVPMEVNFNFDDPNLIILPLAFGKRQGREFIWNDLLSLETGSLKLANGRVIEKTLYNRRTRQDEPALFVALTFERREVLDSSNIKPMNLIGVDRGENIPAVIALTDPEGCPLSRFKDSLGNPTHILRIGESYKEKQRTIQAKKEVEQRRAGGYSRKYASKAKNLADDMVRNTARDLLYYAVTQDAMLIFENLSRGFGRQGKRTFMAERQYTRMEDWLTAKLAYEGLPSKTYLSKTLAQYTSKTCSNCGFTITSADYDRVLEKLKKTATGWMTTINGKELKVEGQITYYNRYKRQNVVKDLSVELDRLSEESVNNDISSWTKGRSGEALSLLKKRFSHRPVQEKFVCLNCGFETHADEQAALNIARSWLFLRSQEYKKYQTNKTTGNTDKRAFVETWQSFYRKKLKEVWKPAV

SEQ ID NO: 33513 - protein, 978 aa, synthetic construct
  REGION 1..978: note = engineered CasX variant
QEIKRINKIRRRLVKDSNTKKAGKTGPMKTLLVPVMTPDLRERLENLRKKPENIPQPISNTSRANLNKLLTDYTEMKKAILHVYWEEFQKDPVGLMSRVAQPASKKIDQNKLKPEMDEKGNLTTAGFACSQCGQPLFVYKLEQVSEKGKAYTNYFGRCNVAEHEKLILLAQLKPEKDSDEAVTYSLGKFGQRALDFYSIHVTKESTHPVKPLAQIAGNRYASAPVGKALSDACMGTIASFLSKYQDIIIEHQKVVKGNQKRLESLRELAGKENLEYPSVTLPPQPHTKEGVDAYNEVIARVRMWVNLNLWQKLKLSRDDAKPLLRLKGFPSFPLVERQANEVDWWDMVCNVKKLINEKKEDGKVFWQNLAGYKRQEALRPYLSSEEDRKKGKKFARYQLGDLLLHLEKKHGEDWGKVYDEAWERIDKKVEGLSKHIKLEEERRSEDAQSKAALTDWLRAKASFVIEGLKEADKDEFCRCELKLQKWYGDLRGKPFAIEAENSILDISGFSKQYNCAFIWQKDGVKKLNLYLIINYFKGGKLRFKKIKPEAFEANRFYTVINKKSGEIVPMEVNFNFDDPNLIILPLAFGKRQGREFIWNDLLSLETGSLKLANGRVIEKTLYNRRTRQDEPALFVALTFERREVLDSSNIKPMNLIGVDRGENIPAVIALTDPEGCPLSRFKDSLGNPTHILRIGESYKEKQRTIQAKKEVEQRRAGGYSRKYASKAKNLADDMVRNTARDLLYYAVTQDAMLIFENLSRGFGRQGKRTFMAERQYTRMEDWLTAKLAYEGLPSKTYLSKTLAQYTSKTCSNCGFTITSADYDRVLEKLKKTATGWMTTINGKELKVEGQITYYNRYKRQNVVKDLSVELDRLSEESVNNDISSWTKGRSGEALSLLKKRFSHRPVQEKFVCLNCGFETHADEQAALNIARSWLFLRSQEYKKYQTNKTTGNTDKRAFVETWQSFYRKKLKEVWKPAV

SEQ ID NO: 33514 - protein, 978 aa, synthetic construct
  REGION 1..978: note = engineered CasX variant
QEIKRINKIRRRLVKDSNTKKAGKTGPMKTLLVPVMTPDLRERLENLRKKPENIPQPISNTSRANLNKLLTDYTEMKKAILHVYWEEFQKDPVGLMSRVAQPASKKIDQNKLKPEMDEKGNLTTAGFACSQCGQPLFVYKLEQVSEKGKAYTNYFGRCNVAEHEKLILLAQLKPEKDSDEAVTYSLGKFGQRALDFYSIHVTKESTHPVKPLAQIAGNRYASVPVGKALSDACMGTIASFLSKYQDIIIEHQKVVKGNQKRLESLRELAGKENLEYPSVTLPPQPHTKEGVDAYNEVIARVRMWVNLNLWQKLKLSRDDAKPLLRLKGFPSFPLVERQANEVDWWDMVCNVKKLINEKKEDGKVFWQNLAGYKRQEALRPYLSSEEDRKKGKKFARYQLGDLLLHLEKKHGEDWGKVYDEAWERIDKKVEGLSKHIKLEEERRSEDAQSKAALTDWLRAKASFVIEGLKEADKDEFCRCELKLQKWYGDLRGKPFAIEAENSILDISGFSKQYNCAFIWQKDGVKKLNLYLIINYFKGGKLRFKKIKPEAFEANRFYTVINKKSGEIVPMEVNFNFDDPNLIILPLAFGKRQGREFIWNDLLSLETGSLKLANGRVIEKTLYNRRTRQDEPALFVALTFERREVLDSSNIKPMNLIGVDRGENIPAVIALTDPEGCPLSRFKDSLGNPTHILRIGESYKEKQRTIQAKKEVEQRRAGGYSRKYASKAKNLADDMVRNTARDLLYYAVTQDAMLIFENLSRGFGRQGKRTFMAERQYTRMEDWLTAKLAYEGLPSKTYLSKTLAQYTSKTCSNCGFTITSADYDRVLEKLKKTATGWMTTINGKELKVEGQITYYNRYKRQNVVKDLSVELDRLSEESVNNDISSWTKGRSGEALSLLKKRFSHRPVQEKFVCLNCGFETHADEQAALNIARSWLFLRSQEYKKYQTNKTTGNTDKRAFVETWQSFYRKKLKEVWKPAV

SEQ ID NO: 33515 - protein, 978 aa, synthetic construct
  REGION 1..978: note = engineered CasX variant
QEIKRINKIRRRLVKDSNTKKAGKTGPMKTLLVPVMTPDLRERLENLRKKPENIPQPISNTSRANLNKLLTDYTEMKKAILHVYWEEFQKDPVGLMSRVAQPASKKIDQNKLKPEMDEKGNLTTAGFACSQCGQPLFVYKLEQVSEKGKAYTNYFGRCNVAEHEKLILLAQLKPEKDSDEAVTYSLGKFGQRALDFYSIHVTKESTHPVKPLAQIAGNRYASYPVGKALSDACMGTIASFLSKYQDIIIEHQKVVKGNQKRLESLRELAGKENLEYPSVTLPPQPHTSEGVDAYNEVIARVRMWVNLNLWQKLKLSRDDAKPLLRLKGFPSFPLVERQANEVDWWDMVCNVKKLINEKKEDGKVFWQNLAGYKRQEALRPYLSSEEDRKKGKKFARYQLGDLLLHLEKKHGEDWGKVYDEAWERIDKKVEGLSKHIKLEEERRSEDAQSKAALTDWLRAKASFVIEGLKEADKDEFCRCELKLQKWYGDLRGKPFAIEAENSILDISGFSKQYNCAFIWQKDGVKKLNLYLIINYFKGGKLRFKKIKPEAFEANRFYTVINKKSGEIVPMEVNFNFDDPNLIILPLAFGKRQGREFIWNDLLSLETGSLKLANGRVIEKTLYNRRTRQDEPALFVALTFERREVLDSSNIKPMNLIGVDRGENIPAVIALTDPEGCPLSRFKDSLGNPTHILRIGESYKEKQRTIQAKKEVEQRRAGGYSRKYASKAKNLADDMVRNTARDLLYYAVTQDAMLIFENLSRGFGRQGKRTFMAERQYTRMEDWLTAKLAYEGLPSKTYLSKTLAQYTSKTCSNCGFTITSADYDRVLEKLKKTATGWMTTINGKELKVEGQITYYNRYKRQNVVKDLSVELDRLSEESVNNDISSWTKGRSGEALSLLKKRFSHRPVQEKFVCLNCGFETHADEQAALNIARSWLFLRSQEYKKYQTNKTTGNTDKRAFVETWQSFYRKKLKEVWKPAV

SEQ ID NO: 33516 - protein, 978 aa, synthetic construct
  REGION 1..978: note = engineered CasX variant
QEIKRINKIRRRLVKDSNTKKAGKTGPMKTLLVPVMTPDLRERLENLRKKPENIPQPISNTSRANLNKLLTDYTEMKKAILHVYWEEFQKDPVGLMSRVAQPASKKIDQNKLKPEMDEKGNLTTAGFACSQCGQPLFVYKLEQVSEKGKAYTNYFGRCNVAEHEKLILLAQLKPEKDSDEAVTYSLGKFGQRALDFYSIHVTKESTHPVKPLAQIAGNRYASHPVGKALSDACMGTIASFLSKYQDIIIEHQKVVKGNQKRLESLRELAGKENLEYPSVTLPPQPHTSEGVDAYNEVIARVRMWVNLNLWQKLKLSRDDAKPLLRLKGFPSFPLVERQANEVDWWDMVCNVKKLINEKKEDGKVFWQNLAGYKRQEALRPYLSSEEDRKKGKKFARYQLGDLLLHLEKKHGEDWGKVYDEAWERIDKKVEGLSKHIKLEEERRSEDAQSKAALTDWLRAKASFVIEGLKEADKDEFCRCELKLQKWYGDLRGKPFAIEAENSILDISGFSKQYNCAFIWQKDGVKKLNLYLIINYFKGGKLRFKKIKPEAFEANRFYTVINKKSGEIVPMEVNFNFDDPNLIILPLAFGKRQGREFIWNDLLSLETGSLKLANGRVIEKTLYNRRTRQDEPALFVALTFERREVLDSSNIKPMNLIGVDRGENIPAVIALTDPEGCPLSRFKDSLGNPTHILRIGESYKEKQRTIQAKKEVEQRRAGGYSRKYASKAKNLADDMVRNTARDLLYYAVTQDAMLIFENLSRGFGRQGKRTFMAERQYTRMEDWLTAKLAYEGLPSKTYLSKTLAQYTSKTCSNCGFTITSADYDRVLEKLKKTATGWMTTINGKELKVEGQITYYNRYKRQNVVKDLSVELDRLSEESVNNDISSWTKGRSGEALSLLKKRFSHRPVQEKFVCLNCGFETHADEQAALNIARSWLFLRSQEYKKYQTNKTTGNTDKRAFVETWQSFYRKKLKEVWKPAV

SEQ ID NO: 33517 - protein, 978 aa, synthetic construct
  REGION 1..978: note = engineered CasX variant
QEIKRINKIRRRLVKDSNTKKAGKTGPMKTLLVPVMTPDLRERLENLRKKPENIPQPISNTSRANLNKLLTDYTEMKKAILHVYWEEFQKDPVGLMSRVAQPASKKIDQNKLKPEMDEKGNLTTAGFACSQCGQPLFVYKLEQVSEKGKAYTNYFGRCNVAEHEKLILLAQLKPEKDSDEAVTYSLGKFGQRALDFYSIHVTKESTHPVKPLAQIAGNRYASSPVGKALSDACMGTIASFLSKYQDIIIEHQKVVKGNQKRLESLRELAGKENLEYPSVTLPPQPHTSEGVDAYNEVIARVRMWVNLNLWQKLKLSRDDAKPLLRLKGFPSFPLVERQANEVDWWDMVCNVKKLINEKKEDGKVFWQNLAGYKRQEALRPYLSSEEDRKKGKKFARYQLGDLLLHLEKKHGEDWGKVYDEAWERIDKKVEGLSKHIKLEEERRSEDAQSKAALTDWLRAKASFVIEGLKEADKDEFCRCELKLQKWYGDLRGKPFAIEAENSILDISGFSKQYNCAFIWQKDGVKKLNLYLIINYFKGGKLRFKKIKPEAFEANRFYTVINKKSGEIVPMEVNFNFDDPNLIILPLAFGKRQGREFIWNDLLSLETGSLKLANGRVIEKTLYNRRTRQDEPALFVALTFERREVLDSSNIKPMNLIGVDRGENIPAVIALTDPEGCPLSRFKDSLGNPTHILRIGESYKEKQRTIQAKKEVEQRRAGGYSRKYASKAKNLADDMVRNTARDLLYYAVTQDAMLIFENLSRGFGRQGKRTFMAERQYTRMEDWLTAKLAYEGLPSKTYLSKTLAQYTSKTCSNCGFTITSADYDRVLEKLKKTATGWMTTINGKELKVEGQITYYNRYKRQNVVKDLSVELDRLSEESVNNDISSWTKGRSGEALSLLKKRFSHRPVQEKFVCLNCGFETHADEQAALNIARSWLFLRSQEYKKYQTNKTTGNTDKRAFVETWQSFYRKKLKEVWKPAV

SEQ ID NO: 33518 - protein, 978 aa, synthetic construct
  REGION 1..978: note = engineered CasX variant
QEIKRINKIRRRLVKDSNTKKAGKTGPMKTLLVPVMTPDLRERLENLRKKPENIPQPISNTSRANLNKLLTDYTEMKKAILHVYWEEFQKDPVGLMSRVAQPASKKIDQNKLKPEMDEKGNLTTAGFACSQCGQPLFVYKLEQVSEKGKAYTNYFGRCNVAEHEKLILLAQLKPEKDSDEAVTYSLGKFGQRALDFYSIHVTKESTHPVKPLAQIAGNRYASTPVGKALSDACMGTIASFLSKYQDIIIEHQKVVKGNQKRLESLRELAGKENLEYPSVTLPPQPHTSEGVDAYNEVIARVRMWVNLNLWQKLKLSRDDAKPLLRLKGFPSFPLVERQANEVDWWDMVCNVKKLINEKKEDGKVFWQNLAGYKRQEALRPYLSSEEDRKKGKKFARYQLGDLLLHLEKKHGEDWGKVYDEAWERIDKKVEGLSKHIKLEEERRSEDAQSKAALTDWLRAKASFVIEGLKEADKDEFCRCELKLQKWYGDLRGKPFAIEAENSILDISGFSKQYNCAFIWQKDGVKKLNLYLIINYFKGGKLRFKKIKPEAFEANRFYTVINKKSGEIVPMEVNFNFDDPNLIILPLAFGKRQGREFIWNDLLSLETGSLKLANGRVIEKTLYNRRTRQDEPALFVALTFERREVLDSSNIKPMNLIGVDRGENIPAVIALTDPEGCPLSRFKDSLGNPTHILRIGESYKEKQRTIQAKKEVEQRRAGGYSRKYASKAKNLADDMVRNTARDLLYYAVTQDAMLIFENLSRGFGRQGKRTFMAERQYTRMEDWLTAKLAYEGLPSKTYLSKTLAQYTSKTCSNCGFTITSADYDRVLEKLKKTATGWMTTINGKELKVEGQITYYNRYKRQNVVKDLSVELDRLSEESVNNDISSWTKGRSGEALSLLKKRFSHRPVQEKFVCLNCGFETHADEQAALNIARSWLFLRSQEYKKYQTNKTTGNTDKRAFVETWQSFYRKKLKEVWKPAV

SEQ ID NO: 33519 - protein, 978 aa, synthetic construct
  REGION 1..978: note = engineered CasX variant
QEIKRINKIRRRLVKDSNTKKAGKTGPMKTLLVPVMTPDLRERLENLRKKPENIPQPISNTSRANLNKLLTDYTEMKKAILHVYWEEFQKDPVGLMSRVAQPASKKIDQNKLKPEMDEKGNLTTAGFACSQCGQPLFVYKLEQVSEKGKAYTNYFGRCNVAEHEKLILLAQLKPEKDSDEAVTYSLGKFGQRALDFYSIHVTKESTHPVKPLAQIAGNRYASAPVGKALSDACMGTIASFLSKYQDIIIEHQKVVKGNQKRLESLRELAGKENLEYPSVTLPPQPHTSEGVDAYNEVIARVRMWVNLNLWQKLKLSRDDAKPLLRLKGFPSFPLVERQANEVDWWDMVCNVKKLINEKKEDGKVFWQNLAGYKRQEALRPYLSSEEDRKKGKKFARYQLGDLLLHLEKKHGEDWGKVYDEAWERIDKKVEGLSKHIKLEEERRSEDAQSKAALTDWLRAKASFVIEGLKEADKDEFCRCELKLQKWYGDLRGKPFAIEAENSILDISGFSKQYNCAFIWQKDGVKKLNLYLIINYFKGGKLRFKKIKPEAFEANRFYTVINKKSGEIVPMEVNFNFDDPNLIILPLAFGKRQGREFIWNDLLSLETGSLKLANGRVIEKTLYNRRTRQDEPALFVALTFERREVLDSSNIKPMNLIGVDRGENIPAVIALTDPEGCPLSRFKDSLGNPTHILRIGESYKEKQRTIQAKKEVEQRRAGGYSRKYASKAKNLADDMVRNTARDLLYYAVTQDAMLIFENLSRGFGRQGKRTFMAERQYTRMEDWLTAKLAYEGLPSKTYLSKTLAQYTSKTCSNCGFTITSADYDRVLEKLKKTATGWMTTINGKELKVEGQITYYNRYKRQNVVKDLSVELDRLSEESVNNDISSWTKGRSGEALSLLKKRFSHRPVQEKFVCLNCGFETHADEQAALNIARSWLFLRSQEYKKYQTNKTTGNTDKRAFVETWQSFYRKKLKEVWKPAV

SEQ ID NO: 33520 - protein, 978 aa, synthetic construct
  REGION 1..978: note = engineered CasX variant
QEIKRINKIRRRLVKDSNTKKAGKTGPMKTLLVPVMTPDLRERLENLRKKPENIPQPISNTSRANLNKLLTDYTEMKKAILHVYWEEFQKDPVGLMSRVAQPASKKIDQNKLKPEMDEKGNLTTAGFACSQCGQPLFVYKLEQVSEKGKAYTNYFGRCNVAEHEKLILLAQLKPEKDSDEAVTYSLGKFGQRALDFYSIHVTKESTHPVKPLAQIAGNRYASVPVGKALSDACMGTIASFLSKYQDIIIEHQKVVKGNQKRLESLRELAGKENLEYPSVTLPPQPHTSEGVDAYNEVIARVRMWVNLNLWQKLKLSRDDAKPLLRLKGFPSFPLVERQANEVDWWDMVCNVKKLINEKKEDGKVFWQNLAGYKRQEALRPYLSSEEDRKKGKKFARYQLGDLLLHLEKKHGEDWGKVYDEAWERIDKKVEGLSKHIKLEEERRSEDAQSKAALTDWLRAKASFVIEGLKEADKDEFCRCELKLQKWYGDLRGKPFAIEAENSILDISGFSKQYNCAFIWQKDGVKKLNLYLIINYFKGGKLRFKKIKPEAFEANRFYTVINKKSGEIVPMEVNFNFDDPNLIILPLAFGKRQGREFIWNDLLSLETGSLKLANGRVIEKTLYNRRTRQDEPALFVALTFERREVLDSSNIKPMNLIGVDRGENIPAVIALTDPEGCPLSRFKDSLGNPTHILRIGESYKEKQRTIQAKKEVEQRRAGGYSRKYASKAKNLADDMVRNTARDLLYYAVTQDAMLIFENLSRGFGRQGKRTFMAERQYTRMEDWLTAKLAYEGLPSKTYLSKTLAQYTSKTCSNCGFTITSADYDRVLEKLKKTATGWMTTINGKELKVEGQITYYNRYKRQNVVKDLSVELDRLSEESVNNDISSWTKGRSGEALSLLKKRFSHRPVQEKFVCLNCGFETHADEQAALNIARSWLFLRSQEYKKYQTNKTTGNTDKRAFVETWQSFYRKKLKEVWKPAV

SEQ ID NO: 33521 - protein, 978 aa, synthetic construct
  REGION 1..978: note = engineered CasX variant
QEIKRINKIRRRLVKDSNTKKAGKTGPMKTLLVPVMTPDLRERLENLRKKPENIPQPISNTSRANLNKLLTDYTEMKKAILHVYWEEFQKDPVGLMSRVAQPASKKIDQNKLKPEMDEKGNLTTAGFACSQCGQPLFVYKLEQVSEKGKAYTNYFGRCNVAEHEKLIKLAQLKPEKDSDEAVTYSLGKFGQRALDFYSIHVTKESTHPVKPLAQIAGNRYASGPVGKALSDACMGTIASFLSKYQDIIIEHQKVVKGNQKRLESLRELAGKENLEYPSVTLPPQPHTSEGVDAYNEVIARVRMWVNLNLWQKLKLSRDDAKPLLRLKGFPSFPLVERQANEVDWWDMVCNVKKLINEKKEDGKVFWQNLAGYKRQEALRPYLSSEEDRKKGKKFARYQLGDLLLHLEKKHGEDWGKVYDEAWERIDKKVEGLSKHIKLEEERRSEDAQSKAALTDWLRAKASFVIEGLKEADKDEFCRCELKLQKWYGDLRGKPFAIEAENSILDISGFSKQYNCAFIWQKDGVKKLNLYLIINYFKGGKLRFKKIKPEAFEANRFYTVINKKSGEIVPMEVNFNFDDPNLIILPLAFGKRQGREFIWNDLLSLETGSLKLANGRVIEKTLYNRRTRQDEPALFVALTFERREVLDSSNIKPMNLIGVDRGENIPAVIALTDPEGCPLSRFKDSLGNPTHILRIGESYKEKQRTIQAKKEVEQRRAGGYSRKYASKAKNLADDMVRNTARDLLYYAVTQDAMLIFENLSRGFGRQGKRTFMAERQYTRMEDWLTAKLAYEGLPSKTYLSKTLAQYTSKTCSNCGFTITSADYDRVLEKLKKTATGWMTTINGKELKVEGQITYYNRYKRQNVVKDLSVELDRLSEESVNNDISSWTKGRSGEALSLLKKRFSHRPVQEKFVCLNCGFETHADEQAALNIARSWLFLRSQEYKKYQTNKTTGNTDKRAFVETWQSFYRKKLKEVWKPAV

SEQ ID NO: 33522 - protein, 977 aa, synthetic construct
  REGION 1..977: note = engineered CasX variant
QEIKRINKIRRRLVKDSNTKKAGKTGPMKTLLVPVMTPDLRERLENLRKKPENIPQPISNTSRANLNKLLTDYTEMKKAILHVYWEEFQKDPVGLMSRVAQPASKKIDQNKLKPEMDEKGNLTTAGFACSQCGQPLFVYKLEQVSEKGKAYTNYFGRCNVAEHEKLILLAQLKPEKDSDEAVTYSLGKFGQRALDFYSIHVTKESTHPVKPLAQIAGNRYASPVGKALSDACMGTIASFLSKYQDIIIEHQKVVKGNQKRLESLRELAGKENLEYPSVTLPPQPHTSEGVDAYNEVIARVRMWVNLNLWQKLKLSRDDAKPLLRLKGFPSFPLVERQANEVDWWDMVCNVKKLINEKKEDGKVFWQNLAGYKRQEALRPYLSSEEDRKKGKKFARYQLGDLLLHLEKKHGEDWGKVYDEAWERIDKKVEGLSKHIKLEEERRSEDAQSKAALTDWLRAKASFVIEGLKEADKDEFCRCELKLQKWYGDLRGKPFAIEAENSILDISGFSKQYNCAFIWQKDGVKKLNLYLIINYFKGGKLRFKKIKPEAFEANRFYTVINKKSGEIVPMEVNFNFDDPNLIILPLAFGKRQGREFIWNDLLSLETGSLKLANGRVIEKTLYNRRTRQDEPALFVALTFERREVLDSSNIKPMNLIGVDRGENIPAVIALTDPEGCPLSRFKDSLGNPTHILRIGESYKEKQRTIQAKKEVEQRRAGGYSRKYASKAKNLADDMVRNTARDLLYYAVTQDAMLIFENLSRGFGRQGKRTFMAERQYTRMEDWLTAKLAYEGLPSKTYLSKTLAQYTSKTCSNCGFTITSADYDRVLEKLKKTATGWMTTINGKELKVEGQITYYNRYKRQNVVKDLSVELDRLSEESVNNDISSWTKGRSGEALSLLKKRFSHRPVQEKFVCLNCGFETHADEQAALNIARSWLFLRSQEYKKYQTNKTTGNTDKRAFVETWQSFYRKKLKEVWKPAV

SEQ ID NO: 33523 - protein, 978 aa, synthetic construct
  REGION 1..978: note = engineered CasX variant
QEIKRINKIRRRLVKDSNTKKAGKTGPMKTLLVPVMTPDLRERLENLRKKPENIPQPISNTSRANLNKLLTDYTEMKKAILHVYWEEFQKDPVGLMSRVAQPASKKIDQNKLKPEMDEKGNLTTAGFACSQCGQPLFVYKLEQVSEKGKAYTNYFGRCNVAEHEKLILLAQLKPEKDSDEAVTYSLGKFGQRALDFYSIHVTKESTHPVKPLAQIAGNRYASYPVGKALSDACMGTIASFLSKYQDIIIEHQKVVKGNQKRLESLRELAGKENLEYPSVTLPPQPHTKEGLDAYNEVIARVRMWVNLNLWQKLKLSRDDAKPLLRLKGFPSFPLVERQANEVDWWDMVCNVKKLINEKKEDGKVFWQNLAGYKRQEALRPYLSSEEDRKKGKKFARYQLGDLLLHLEKKHGEDWGKVYDEAWERIDKKVEGLSKHIKLEEERRSEDAQSKAALTDWLRAKASFVIEGLKEADKDEFCRCELKLQKWYGDLRGKPFAIEAENSILDISGFSKQYNCAFIWQKDGVKKLNLYLIINYFKGGKLRFKKIKPEAFEANRFYTVINKKSGEIVPMEVNFNFDDPNLIILPLAFGKRQGREFIWNDLLSLETGSLKLANGRVIEKTLYNRRTRQDEPALFVALTFERREVLDSSNIKPMNLIGVDRGENIPAVIALTDPEGCPLSRFKDSLGNPTHILRIGESYKEKQRTIQAKKEVEQRRAGGYSRKYASKAKNLADDMVRNTARDLLYYAVTQDAMLIFENLSRGFGRQGKRTFMAERQYTRMEDWLTAKLAYEGLPSKTYLSKTLAQYTSKTCSNCGFTITSADYDRVLEKLKKTATGWMTTINGKELKVEGQITYYNRYKRQNVVKDLSVELDRLSEESVNNDISSWTKGRSGEALSLLKKRFSHRPVQEKFVCLNCGFETHADEQAALNIARSWLFLRSQEYKKYQTNKTTGNTDKRAFVETWQSFYRKKLKEVWKPAV

SEQ ID NO: 33524 - protein, 978 aa, synthetic construct
  REGION 1..978: note = engineered CasX variant
QEIKRINKIRRRLVKDSNTKKAGKTGPMKTLLVPVMTPDLRERLENLRKKPENIPQPISNTSRANLNKLLTDYTEMKKAILHVYWEEFQKDPVGLMSRVAQPASKKIDQNKLKPEMDEKGNLTTAGFACSQCGQPLFVYKLEQVSEKGKAYTNYFGRCNVAEHEKLILLAQLKPEKDSDEAVTYSLGKFGQRALDFYSIHVTKESTHPVKPLAQIAGNRYASHPVGKALSDACMGTIASFLSKYQDIIIEHQKVVKGNQKRLESLRELAGKENLEYPSVTLPPQPHTKEGLDAYNEVIARVRMWVNLNLWQKLKLSRDDAKPLLRLKGFPSFPLVERQANEVDWWDMVCNVKKLINEKKEDGKVFWQNLAGYKRQEALRPYLSSEEDRKKGKKFARYQLGDLLLHLEKKHGEDWGKVYDEAWERIDKKVEGLSKHIKLEEERRSEDAQSKAALTDWLRAKASFVIEGLKEADKDEFCRCELKLQKWYGDLRGKPFAIEAENSILDISGFSKQYNCAFIWQKDGVKKLNLYLIINYFKGGKLRFKKIKPEAFEANRFYTVINKKSGEIVPMEVNFNFDDPNLIILPLAFGKRQGREFIWNDLLSLETGSLKLANGRVIEKTLYNRRTRQDEPALFVALTFERREVLDSSNIKPMNLIGVDRGENIPAVIALTDPEGCPLSRFKDSLGNPTHILRIGESYKEKQRTIQAKKEVEQRRAGGYSRKYASKAKNLADDMVRNTARDLLYYAVTQDAMLIFENLSRGFGRQGKRTFMAERQYTRMEDWLTAKLAYEGLPSKTYLSKTLAQYTSKTCSNCGFTITSADYDRVLEKLKKTATGWMTTINGKELKVEGQITYYNRYKRQNVVKDLSVELDRLSEESVNNDISSWTKGRSGEALSLLKKRFSHRPVQEKFVCLNCGFETHADEQAALNIARSWLFLRSQEYKKYQTNKTTGNTDKRAFVETWQSFYRKKLKEVWKPAV

SEQ ID NO: 33525 - protein, 978 aa, synthetic construct
  REGION 1..978: note = engineered CasX variant
QEIKRINKIRRRLVKDSNTKKAGKTGPMKTLLVPVMTPDLRERLENLRKKPENIPQPISNTSRANLNKLLTDYTEMKKAILHVYWEEFQKDPVGLMSRVAQPASKKIDQNKLKPEMDEKGNLTTAGFACSQCGQPLFVYKLEQVSEKGKAYTNYFGRCNVAEHEKLILLAQLKPEKDSDEAVTYSLGKFGQRALDFYSIHVTKESTHPVKPLAQIAGNRYASSPVGKALSDACMGTIASFLSKYQDIIIEHQKVVKGNQKRLESLRELAGKENLEYPSVTLPPQPHTKEGLDAYNEVIARVRMWVNLNLWQKLKLSRDDAKPLLRLKGFPSFPLVERQANEVDWWDMVCNVKKLINEKKEDGKVFWQNLAGYKRQEALRPYLSSEEDRKKGKKFARYQLGDLLLHLEKKHGEDWGKVYDEAWERIDKKVEGLSKHIKLEEERRSEDAQSKAALTDWLRAKASFVIEGLKEADKDEFCRCELKLQKWYGDLRGKPFAIEAENSILDISGFSKQYNCAFIWQKDGVKKLNLYLIINYFKGGKLRFKKIKPEAFEANRFYTVINKKSGEIVPMEVNFNFDDPNLIILPLAFGKRQGREFIWNDLLSLETGSLKLANGRVIEKTLYNRRTRQDEPALFVALTFERREVLDSSNIKPMNLIGVDRGENIPAVIALTDPEGCPLSRFKDSLGNPTHILRIGESYKEKQRTIQAKKEVEQRRAGGYSRKYASKAKNLADDMVRNTARDLLYYAVTQDAMLIFENLSRGFGRQGKRTFMAERQYTRMEDWLTAKLAYEGLPSKTYLSKTLAQYTSKTCSNCGFTITSADYDRVLEKLKKTATGWMTTINGKELKVEGQITYYNRYKRQNVVKDLSVELDRLSEESVNNDISSWTKGRSGEALSLLKKRFSHRPVQEKFVCLNCGFETHADEQAALNIARSWLFLRSQEYKKYQTNKTTGNTDKRAFVETWQSFYRKKLKEVWKPAV

SEQ ID NO: 33526 - protein, 978 aa, synthetic construct
  REGION 1..978: note = engineered CasX variant
QEIKRINKIRRRLVKDSNTKKAGKTGPMKTLLVPVMTPDLRERLENLRKKPENIPQPISNTSRANLNKLLTDYTEMKKAILHVYWEEFQKDPVGLMSRVAQPASKKIDQNKLKPEMDEKGNLTTAGFACSQCGQPLFVYKLEQVSEKGKAYTNYFGRCNVAEHEKLILLAQLKPEKDSDEAVTYSLGKFGQRALDFYSIHVTKESTHPVKPLAQIAGNRYASTPVGKALSDACMGTIASFLSKYQDIIIEHQKVVKGNQKRLESLRELAGKENLEYPSVTLPPQPHTKEGLDAYNEVIARVRMWVNLNLWQKLKLSRDDAKPLLRLKGFPSFPLVERQANEVDWWDMVCNVKKLINEKKEDGKVFWQNLAGYKRQEALRPYLSSEEDRKKGKKFARYQLGDLLLHLEKKHGEDWGKVYDEAWERIDKKVEGLSKHIKLEEERRSEDAQSKAALTDWLRAKASFVIEGLKEADKDEFCRCELKLQKWYGDLRGKPFAIEAENSILDISGFSKQYNCAFIWQKDGVKKLNLYLIINYFKGGKLRFKKIKPEAFEANRFYTVINKKSGEIVPMEVNFNFDDPNLIILPLAFGKRQGREFIWNDLLSLETGSLKLANGRVIEKTLYNRRTRQDEPALFVALTFERREVLDSSNIKPMNLIGVDRGENIPAVIALTDPEGCPLSRFKDSLGNPTHILRIGESYKEKQRTIQAKKEVEQRRAGGYSRKYASKAKNLADDMVRNTARDLLYYAVTQDAMLIFENLSRGFGRQGKRTFMAERQYTRMEDWLTAKLAYEGLPSKTYLSKTLAQYTSKTCSNCGFTITSADYDRVLEKLKKTATGWMTTINGKELKVEGQITYYNRYKRQNVVKDLSVELDRLSEESVNNDISSWTKGRSGEALSLLKKRFSHRPVQEKFVCLNCGFETHADEQAALNIARSWLFLRSQEYKKYQTNKTTGNTDKRAFVETWQSFYRKKLKEVWKPAV

SEQ ID NO: 33527 - protein, 978 aa, synthetic construct
  REGION 1..978: note = engineered CasX variant
QEIKRINKIRRRLVKDSNTKKAGKTGPMKTLLVPVMTPDLRERLENLRKKPENIPQPISNTSRANLNKLLTDYTEMKKAILHVYWEEFQKDPVGLMSRVAQPASKKIDQNKLKPEMDEKGNLTTAGFACSQCGQPLFVYKLEQVSEKGKAYTNYFGRCNVAEHEKLILLAQLKPEKDSDEAVTYSLGKFGQRALDFYSIHVTKESTHPVKPLAQIAGNRYASAPVGKALSDACMGTIASFLSKYQDIIIEHQKVVKGNQKRLESLRELAGKENLEYPSVTLPPQPHTKEGLDAYNEVIARVRMWVNLNLWQKLKLSRDDAKPLLRLKGFPSFPLVERQANEVDWWDMVCNVKKLINEKKEDGKVFWQNLAGYKRQEALRPYLSSEEDRKKGKKFARYQLGDLLLHLEKKHGEDWGKVYDEAWERIDKKVEGLSKHIKLEEERRSEDAQSKAALTDWLRAKASFVIEGLKEADKDEFCRCELKLQKWYGDLRGKPFAIEAENSILDISGFSKQYNCAFIWQKDGVKKLNLYLIINYFKGGKLRFKKIKPEAFEANRFYTVINKKSGEIVPMEVNFNFDDPNLIILPLAFGKRQGREFIWNDLLSLETGSLKLANGRVIEKTLYNRRTRQDEPALFVALTFERREVLDSSNIKPMNLIGVDRGENIPAVIALTDPEGCPLSRFKDSLGNPTHILRIGESYKEKQRTIQAKKEVEQRRAGGYSRKYASKAKNLADDMVRNTARDLLYYAVTQDAMLIFENLSRGFGRQGKRTFMAERQYTRMEDWLTAKLAYEGLPSKTYLSKTLAQYTSKTCSNCGFTITSADYDRVLEKLKKTATGWMTTINGKELKVEGQITYYNRYKRQNVVKDLSVELDRLSEESVNNDISSWTKGRSGEALSLLKKRFSHRPVQEKFVCLNCGFETHADEQAALNIARSWLFLRSQEYKKYQTNKTTGNTDKRAFVETWQSFYRKKLKEVWKPAV

SEQ ID NO: 33528 - protein, 978 aa, synthetic construct
  REGION 1..978: note = engineered CasX variant
QEIKRINKIRRRLVKDSNTKKAGKTGPMKTLLVPVMTPDLRERLENLRKKPENIPQPISNTSRANLNKLLTDYTEMKKAILHVYWEEFQKDPVGLMSRVAQPASKKIDQNKLKPEMDEKGNLTTAGFACSQCGQPLFVYKLEQVSEKGKAYTNYFGRCNVAEHEKLILLAQLKPEKDSDEAVTYSLGKFGQRALDFYSIHVTKESTHPVKPLAQIAGNRYASVPVGKALSDACMGTIASFLSKYQDIIIEHQKVVKGNQKRLESLRELAGKENLEYPSVTLPPQPHTKEGLDAYNEVIARVRMWVNLNLWQKLKLSRDDAKPLLRLKGFPSFPLVERQANEVDWWDMVCNVKKLINEKKEDGKVFWQNLAGYKRQEALRPYLSSEEDRKKGKKFARYQLGDLLLHLEKKHGEDWGKVYDEAWERIDKKVEGLSKHIKLEEERRSEDAQSKAALTDWLRAKASFVIEGLKEADKDEFCRCELKLQKWYGDLRGKPFAIEAENSILDISGFSKQYNCAFIWQKDGVKKLNLYLIINYFKGGKLRFKKIKPEAFEANRFYTVINKKSGEIVPMEVNFNFDDPNLIILPLAFGKRQGREFIWNDLLSLETGSLKLANGRVIEKTLYNRRTRQDEPALFVALTFERREVLDSSNIKPMNLIGVDRGENIPAVIALTDPEGCPLSRFKDSLGNPTHILRIGESYKEKQRTIQAKKEVEQRRAGGYSRKYASKAKNLADDMVRNTARDLLYYAVTQDAMLIFENLSRGFGRQGKRTFMAERQYTRMEDWLTAKLAYEGLPSKTYLSKTLAQYTSKTCSNCGFTITSADYDRVLEKLKKTATGWMTTINGKELKVEGQITYYNRYKRQNVVKDLSVELDRLSEESVNNDISSWTKGRSGEALSLLKKRFSHRPVQEKFVCLNCGFETHADEQAALNIARSWLFLRSQEYKKYQTNKTTGNTDKRAFVETWQSFYRKKLKEVWKPAV

SEQ ID NO: 33529 - protein, 978 aa, synthetic construct
  REGION 1..978: note = engineered CasX variant
QEIKRINKIRRRLVKDSNTKKAGKTGPMKTLLVPVMTPDLRERLENLRKKPENIPQPISNTSRANLNKLLTDYTEMKKAILHVYWEEFQKDPVGLMSRVAQPASKKIDQNKLKPEMDEKGNLTTAGFACSQCGQPLFVYKLEQVSEKGKAYTNYFGRCNVAEHEKLIKLAQLKPEKDSDEAVTYSLGKFGQRALDFYSIHVTKESTHPVKPLAQIAGNRYASGPVGKALSDACMGTIASFLSKYQDIIIEHQKVVKGNQKRLESLRELAGKENLEYPSVTLPPQPHTKEGLDAYNEVIARVRMWVNLNLWQKLKLSRDDAKPLLRLKGFPSFPLVERQANEVDWWDMVCNVKKLINEKKEDGKVFWQNLAGYKRQEALRPYLSSEEDRKKGKKFARYQLGDLLLHLEKKHGEDWGKVYDEAWERIDKKVEGLSKHIKLEEERRSEDAQSKAALTDWLRAKASFVIEGLKEADKDEFCRCELKLQKWYGDLRGKPFAIEAENSILDISGFSKQYNCAFIWQKDGVKKLNLYLIINYFKGGKLRFKKIKPEAFEANRFYTVINKKSGEIVPMEVNFNFDDPNLIILPLAFGKRQGREFIWNDLLSLETGSLKLANGRVIEKTLYNRRTRQDEPALFVALTFERREVLDSSNIKPMNLIGVDRGENIPAVIALTDPEGCPLSRFKDSLGNPTHILRIGESYKEKQRTIQAKKEVEQRRAGGYSRKYASKAKNLADDMVRNTARDLLYYAVTQDAMLIFENLSRGFGRQGKRTFMAERQYTRMEDWLTAKLAYEGLPSKTYLSKTLAQYTSKTCSNCGFTITSADYDRVLEKLKKTATGWMTTINGKELKVEGQITYYNRYKRQNVVKDLSVELDRLSEESVNNDISSWTKGRSGEALSLLKKRFSHRPVQEKFVCLNCGFETHADEQAALNIARSWLFLRSQEYKKYQTNKTTGNTDKRAFVETWQSFYRKKLKEVWKPAV

SEQ ID NO: 33530 - protein, 977 aa, synthetic construct
  REGION 1..977: note = engineered CasX variant
QEIKRINKIRRRLVKDSNTKKAGKTGPMKTLLVPVMTPDLRERLENLRKKPENIPQPISNTSRANLNKLLTDYTEMKKAILHVYWEEFQKDPVGLMSRVAQPASKKIDQNKLKPEMDEKGNLTTAGFACSQCGQPLFVYKLEQVSEKGKAYTNYFGRCNVAEHEKLILLAQLKPEKDSDEAVTYSLGKFGQRALDFYSIHVTKESTHPVKPLAQIAGNRYASPVGKALSDACMGTIASFLSKYQDIIIEHQKVVKGNQKRLESLRELAGKENLEYPSVTLPPQPHTKEGLDAYNEVIARVRMWVNLNLWQKLKLSRDDAKPLLRLKGFPSFPLVERQANEVDWWDMVCNVKKLINEKKEDGKVFWQNLAGYKRQEALRPYLSSEEDRKKGKKFARYQLGDLLLHLEKKHGEDWGKVYDEAWERIDKKVEGLSKHIKLEEERRSEDAQSKAALTDWLRAKASFVIEGLKEADKDEFCRCELKLQKWYGDLRGKPFAIEAENSILDISGFSKQYNCAFIWQKDGVKKLNLYLIINYFKGGKLRFKKIKPEAFEANRFYTVINKKSGEIVPMEVNFNFDDPNLIILPLAFGKRQGREFIWNDLLSLETGSLKLANGRVIEKTLYNRRTRQDEPALFVALTFERREVLDSSNIKPMNLIGVDRGENIPAVIALTDPEGCPLSRFKDSLGNPTHILRIGESYKEKQRTIQAKKEVEQRRAGGYSRKYASKAKNLADDMVRNTARDLLYYAVTQDAMLIFENLSRGFGRQGKRTFMAERQYTRMEDWLTAKLAYEGLPSKTYLSKTLAQYTSKTCSNCGFTITSADYDRVLEKLKKTATGWMTTINGKELKVEGQITYYNRYKRQNVVKDLSVELDRLSEESVNNDISSWTKGRSGEALSLLKKRFSHRPVQEKFVCLNCGFETHADEQAALNIARSWLFLRSQEYKKYQTNKTTGNTDKRAFVETWQSFYRKKLKEVWKPAV

SEQ ID NO: 33531 - protein, 978 aa, synthetic construct
  REGION 1..978: note = engineered CasX variant
QEIKRINKIRRRLVKDSNTKKAGKTGPMKTLLVPVMTPDLRERLENLRKKPENIPQPISNTSRANLNKLLTDYTEMKKAILHVYWEEFQKDPVGLMSRVAQPASKKIDQNKLKPEMDEKGNLTTAGFACSQCGQPLFVYKLEQVSEKGKAYTNYFGRCNVAEHEKLILLAQLKPEKDSDEAVTYSLGKFGQRALDFYSIHVTKESTHPVKPLAQIAGNRYASYPVGKALSDACMGTIASFLSKYQDIIIEHQKVVKGNQKRLESLRELAGKENLEYPSVTLPPQPHTKEGVDAYNEVIARVRTWVNLNLWQKLKLSRDDAKPLLRLKGFPSFPLVERQANEVDWWDMVCNVKKLINEKKEDGKVFWQNLAGYKRQEALRPYLSSEEDRKKGKKFARYQLGDLLLHLEKKHGEDWGKVYDEAWERIDKKVEGLSKHIKLEEERRSEDAQSKAALTDWLRAKASFVIEGLKEADKDEFCRCELKLQKWYGDLRGKPFAIEAENSILDISGFSKQYNCAFIWQKDGVKKLNLYLIINYFKGGKLRFKKIKPEAFEANRFYTVINKKSGEIVPMEVNFNFDDPNLIILPLAFGKRQGREFIWNDLLSLETGSLKLANGRVIEKTLYNRRTRQDEPALFVALTFERREVLDSSNIKPMNLIGVDRGENIPAVIALTDPEGCPLSRFKDSLGNPTHILRIGESYKEKQRTIQAKKEVEQRRAGGYSRKYASKAKNLADDMVRNTARDLLYYAVTQDAMLIFENLSRGFGRQGKRTFMAERQYTRMEDWLTAKLAYEGLPSKTYLSKTLAQYTSKTCSNCGFTITSADYDRVLEKLKKTATGWMTTINGKELKVEGQITYYNRYKRQNVVKDLSVELDRLSEESVNNDISSWTKGRSGEALSLLKKRFSHRPVQEKFVCLNCGFETHADEQAALNIARSWLFLRSQEYKKYQTNKTTGNTDKRAFVETWQSFYRKKLKEVWKPAV

SEQ ID NO: 33532 - protein, 978 aa, synthetic construct
  REGION 1..978: note = engineered CasX variant
QEIKRINKIRRRLVKDSNTKKAGKTGPMKTLLVPVMTPDLRERLENLRKKPENIPQPISNTSRANLNKLLTDYTEMKKAILHVYWEEFQKDPVGLMSRVAQPASKKIDQNKLKPEMDEKGNLTTAGFACSQCGQPLFVYKLEQVSEKGKAYTNYFGRCNVAEHEKLILLAQLKPEKDSDEAVTYSLGKFGQRALDFYSIHVTKESTHPVKPLAQIAGNRYASHPVGKALSDACMGTIASFLSKYQDIIIEHQKVVKGNQKRLESLRELAGKENLEYPSVTLPPQPHTKEGVDAYNEVIARVRTWVNLNLWQKLKLSRDDAKPLLRLKGFPSFPLVERQANEVDWWDMVCNVKKLINEKKEDGKVFWQNLAGYKRQEALRPYLSSEEDRKKGKKFARYQLGDLLLHLEKKHGEDWGKVYDEAWERIDKKVEGLSKHIKLEEERRSEDAQSKAALTDWLRAKASFVIEGLKEADKDEFCRCELKLQKWYGDLRGKPFAIEAENSILDISGFSKQYNCAFIWQKDGVKKLNLYLIINYFKGGKLRFKKIKPEAFEANRFYTVINKKSGEIVPMEVNFNFDDPNLIILPLAFGKRQGREFIWNDLLSLETGSLKLANGRVIEKTLYNRRTRQDEPALFVALTFERREVLDSSNIKPMNLIGVDRGENIPAVIALTDPEGCPLSRFKDSLGNPTHILRIGESYKEKQRTIQAKKEVEQRRAGGYSRKYASKAKNLADDMVRNTARDLLYYAVTQDAMLIFENLSRGFGRQGKRTFMAERQYTRMEDWLTAKLAYEGLPSKTYLSKTLAQYTSKTCSNCGFTITSADYDRVLEKLKKTATGWMTTINGKELKVEGQITYYNRYKRQNVVKDLSVELDRLSEESVNNDISSWTKGRSGEALSLLKKRFSHRPVQEKFVCLNCGFETHADEQAALNIARSWLFLRSQEYKKYQTNKTTGNTDKRAFVETWQSFYRKKLKEVWKPAV

SEQ ID NO: 33533 - protein, 978 aa, synthetic construct
  REGION 1..978: note = engineered CasX variant
QEIKRINKIRRRLVKDSNTKKAGKTGPMKTLLVPVMTPDLRERLENLRKKPENIPQPISNTSRANLNKLLTDYTEMKKAILHVYWEEFQKDPVGLMSRVAQPASKKIDQNKLKPEMDEKGNLTTAGFACSQCGQPLFVYKLEQVSEKGKAYTNYFGRCNVAEHEKLILLAQLKPEKDSDEAVTYSLGKFGQRALDFYSIHVTKESTHPVKPLAQIAGNRYASSPVGKALSDACMGTIASFLSKYQDIIIEHQKVVKGNQKRLESLRELAGKENLEYPSVTLPPQPHTKEGVDAYNEVIARVRTWVNLNLWQKLKLSRDDAKPLLRLKGFPSFPLVERQANEVDWWDMVCNVKKLINEKKEDGKVFWQNLAGYKRQEALRPYLSSEEDRKKGKKFARYQLGDLLLHLEKKHGEDWGKVYDEAWERIDKKVEGLSKHIKLEEERRSEDAQSKAALTDWLRAKASFVIEGLKEADKDEFCRCELKLQKWYGDLRGKPFAIEAENSILDISGFSKQYNCAFIWQKDGVKKLNLYLIINYFKGGKLRFKKIKPEAFEANRFYTVINKKSGEIVPMEVNFNFDDPNLIILPLAFGKRQGREFIWNDLLSLETGSLKLANGRVIEKTLYNRRTRQDEPALFVALTFERREVLDSSNIKPMNLIGVDRGENIPAVIALTDPEGCPLSRFKDSLGNPTHILRIGESYKEKQRTIQAKKEVEQRRAGGYSRKYASKAKNLADDMVRNTARDLLYYAVTQDAMLIFENLSRGFGRQGKRTFMAERQYTRMEDWLTAKLAYEGLPSKTYLSKTLAQYTSKTCSNCGFTITSADYDRVLEKLKKTATGWMTTINGKELKVEGQITYYNRYKRQNVVKDLSVELDRLSEESVNNDISSWTKGRSGEALSLLKKRFSHRPVQEKFVCLNCGFETHADEQAALNIARSWLFLRSQEYKKYQTNKTTGNTDKRAFVETWQSFYRKKLKEVWKPAV

SEQ ID NO: 33534 - protein, 978 aa, synthetic construct
  REGION 1..978: note = engineered CasX variant
QEIKRINKIRRRLVKDSNTKKAGKTGPMKTLLVPVMTPDLRERLENLRKKPENIPQPISNTSRANLNKLLTDYTEMKKAILHVYWEEFQKDPVGLMSRVAQPASKKIDQNKLKPEMDEKGNLTTAGFACSQCGQPLFVYKLEQVSEKGKAYTNYFGRCNVAEHEKLILLAQLKPEKDSDEAVTYSLGKFGQRALDFYSIHVTKESTHPVKPLAQIAGNRYASTPVGKALSDACMGTIASFLSKYQDIIIEHQKVVKGNQKRLESLRELAGKENLEYPSVTLPPQPHTKEGVDAYNEVIARVRTWVNLNLWQKLKLSRDDAKPLLRLKGFPSFPLVERQANEVDWWDMVCNVKKLINEKKEDGKVFWQNLAGYKRQEALRPYLSSEEDRKKGKKFARYQLGDLLLHLEKKHGEDWGKVYDEAWERIDKKVEGLSKHIKLEEERRSEDAQSKAALTDWLRAKASFVIEGLKEADKDEFCRCELKLQKWYGDLRGKPFAIEAENSILDISGFSKQYNCAFIWQKDGVKKLNLYLIINYFKGGKLRFKKIKPEAFEANRFYTVINKKSGEIVPMEVNFNFDDPNLIILPLAFGKRQGREFIWNDLLSLETGSLKLANGRVIEKTLYNRRTRQDEPALFVALTFERREVLDSSNIKPMNLIGVDRGENIPAVIALTDPEGCPLSRFKDSLGNPTHILRIGESYKEKQRTIQAKKEVEQRRAGGYSRKYASKAKNLADDMVRNTARDLLYYAVTQDAMLIFENLSRGFGRQGKRTFMAERQYTRMEDWLTAKLAYEGLPSKTYLSKTLAQYTSKTCSNCGFTITSADYDRVLEKLKKTATGWMTTINGKELKVEGQITYYNRYKRQNVVKDLSVELDRLSEESVNNDISSWTKGRSGEALSLLKKRFSHRPVQEKFVCLNCGFETHADEQAALNIARSWLFLRSQEYKKYQTNKTTGNTDKRAFVETWQSFYRKKLKEVWKPAV

SEQ ID NO: 33535 - protein, 978 aa, synthetic construct
  REGION 1..978: note = engineered CasX variant
QEIKRINKIRRRLVKDSNTKKAGKTGPMKTLLVPVMTPDLRERLENLRKKPENIPQPISNTSRANLNKLLTDYTEMKKAILHVYWEEFQKDPVGLMSRVAQPASKKIDQNKLKPEMDEKGNLTTAGFACSQCGQPLFVYKLEQVSEKGKAYTNYFGRCNVAEHEKLILLAQLKPEKDSDEAVTYSLGKFGQRALDFYSIHVTKESTHPVKPLAQIAGNRYASAPVGKALSDACMGTIASFLSKYQDIIIEHQKVVKGNQKRLESLRELAGKENLEYPSVTLPPQPHTKEGVDAYNEVIARVRTWVNLNLWQKLKLSRDDAKPLLRLKGFPSFPLVERQANEVDWWDMVCNVKKLINEKKEDGKVFWQNLAGYKRQEALRPYLSSEEDRKKGKKFARYQLGDLLLHLEKKHGEDWGKVYDEAWERIDKKVEGLSKHIKLEEERRSEDAQSKAALTDWLRAKASFVIEGLKEADKDEFCRCELKLQKWYGDLRGKPFAIEAENSILDISGFSKQYNCAFIWQKDGVKKLNLYLIINYFKGGKLRFKKIKPEAFEANRFYTVINKKSGEIVPMEVNFNFDDPNLIILPLAFGKRQGREFIWNDLLSLETGSLKLANGRVIEKTLYNRRTRQDEPALFVALTFERREVLDSSNIKPMNLIGVDRGENIPAVIALTDPEGCPLSRFKDSLGNPTHILRIGESYKEKQRTIQAKKEVEQRRAGGYSRKYASKAKNLADDMVRNTARDLLYYAVTQDAMLIFENLSRGFGRQGKRTFMAERQYTRMEDWLTAKLAYEGLPSKTYLSKTLAQYTSKTCSNCGFTITSADYDRVLEKLKKTATGWMTTINGKELKVEGQITYYNRYKRQNVVKDLSVELDRLSEESVNNDISSWTKGRSGEALSLLKKRFSHRPVQEKFVCLNCGFETHADEQAALNIARSWLFLRSQEYKKYQTNKTTGNTDKRAFVETWQSFYRKKLKEVWKPAV

SEQ ID NO: 33536 - protein, 978 aa, synthetic construct
  REGION 1..978: note = engineered CasX variant
QEIKRINKIRRRLVKDSNTKKAGKTGPMKTLLVPVMTPDLRERLENLRKKPENIPQPISNTSRANLNKLLTDYTEMKKAILHVYWEEFQKDPVGLMSRVAQPASKKIDQNKLKPEMDEKGNLTTAGFACSQCGQPLFVYKLEQVSEKGKAYTNYFGRCNVAEHEKLILLAQLKPEKDSDEAVTYSLGKFGQRALDFYSIHVTKESTHPVKPLAQIAGNRYASVPVGKALSDACMGTIASFLSKYQDIIIEHQKVVKGNQKRLESLRELAGKENLEYPSVTLPPQPHTKEGVDAYNEVIARVRTWVNLNLWQKLKLSRDDAKPLLRLKGFPSFPLVERQANEVDWWDMVCNVKKLINEKKEDGKVFWQNLAGYKRQEALRPYLSSEEDRKKGKKFARYQLGDLLLHLEKKHGEDWGKVYDEAWERIDKKVEGLSKHIKLEEERRSEDAQSKAALTDWLRAKASFVIEGLKEADKDEFCRCELKLQKWYGDLRGKPFAIEAENSILDISGFSKQYNCAFIWQKDGVKKLNLYLIINYFKGGKLRFKKIKPEAFEANRFYTVINKKSGEIVPMEVNFNFDDPNLIILPLAFGKRQGREFIWNDLLSLETGSLKLANGRVIEKTLYNRRTRQDEPALFVALTFERREVLDSSNIKPMNLIGVDRGENIPAVIALTDPEGCPLSRFKDSLGNPTHILRIGESYKEKQRTIQAKKEVEQRRAGGYSRKYASKAKNLADDMVRNTARDLLYYAVTQDAMLIFENLSRGFGRQGKRTFMAERQYTRMEDWLTAKLAYEGLPSKTYLSKTLAQYTSKTCSNCGFTITSADYDRVLEKLKKTATGWMTTINGKELKVEGQITYYNRYKRQNVVKDLSVELDRLSEESVNNDISSWTKGRSGEALSLLKKRFSHRPVQEKFVCLNCGFETHADEQAALNIARSWLFLRSQEYKKYQTNKTTGNTDKRAFVETWQSFYRKKLKEVWKPAV

SEQ ID NO: 33537 - protein, 978 aa, synthetic construct
  REGION 1..978: note = engineered CasX variant
QEIKRINKIRRRLVKDSNTKKAGKTGPMKTLLVPVMTPDLRERLENLRKKPENIPQPISNTSRANLNKLLTDYTEMKKAILHVYWEEFQKDPVGLMSRVAQPASKKIDQNKLKPEMDEKGNLTTAGFACSQCGQPLFVYKLEQVSEKGKAYTNYFGRCNVAEHEKLIKLAQLKPEKDSDEAVTYSLGKFGQRALDFYSIHVTKESTHPVKPLAQIAGNRYASGPVGKALSDACMGTIASFLSKYQDIIIEHQKVVKGNQKRLESLRELAGKENLEYPSVTLPPQPHTKEGVDAYNEVIARVRTWVNLNLWQKLKLSRDDAKPLLRLKGFPSFPLVERQANEVDWWDMVCNVKKLINEKKEDGKVFWQNLAGYKRQEALRPYLSSEEDRKKGKKFARYQLGDLLLHLEKKHGEDWGKVYDEAWERIDKKVEGLSKHIKLEEERRSEDAQSKAALTDWLRAKASFVIEGLKEADKDEFCRCELKLQKWYGDLRGKPFAIEAENSILDISGFSKQYNCAFIWQKDGVKKLNLYLIINYFKGGKLRFKKIKPEAFEANRFYTVINKKSGEIVPMEVNFNFDDPNLIILPLAFGKRQGREFIWNDLLSLETGSLKLANGRVIEKTLYNRRTRQDEPALFVALTFERREVLDSSNIKPMNLIGVDRGENIPAVIALTDPEGCPLSRFKDSLGNPTHILRIGESYKEKQRTIQAKKEVEQRRAGGYSRKYASKAKNLADDMVRNTARDLLYYAVTQDAMLIFENLSRGFGRQGKRTFMAERQYTRMEDWLTAKLAYEGLPSKTYLSKTLAQYTSKTCSNCGFTITSADYDRVLEKLKKTATGWMTTINGKELKVEGQITYYNRYKRQNVVKDLSVELDRLSEESVNNDISSWTKGRSGEALSLLKKRFSHRPVQEKFVCLNCGFETHADEQAALNIARSWLFLRSQEYKKYQTNKTTGNTDKRAFVETWQSFYRKKLKEVWKPAV

SEQ ID NO: 33538 - protein, 977 aa, synthetic construct
  REGION 1..977: note = engineered CasX variant
QEIKRINKIRRRLVKDSNTKKAGKTGPMKTLLVPVMTPDLRERLENLRKKPENIPQPISNTSRANLNKLLTDYTEMKKAILHVYWEEFQKDPVGLMSRVAQPASKKIDQNKLKPEMDEKGNLTTAGFACSQCGQPLFVYKLEQVSEKGKAYTNYFGRCNVAEHEKLILLAQLKPEKDSDEAVTYSLGKFGQRALDFYSIHVTKESTHPVKPLAQIAGNRYASPVGKALSDACMGTIASFLSKYQDIIIEHQKVVKGNQKRLESLRELAGKENLEYPSVTLPPQPHTKEGVDAYNEVIARVRTWVNLNLWQKLKLSRDDAKPLLRLKGFPSFPLVERQANEVDWWDMVCNVKKLINEKKEDGKVFWQNLAGYKRQEALRPYLSSEEDRKKGKKFARYQLGDLLLHLEKKHGEDWGKVYDEAWERIDKKVEGLSKHIKLEEERRSEDAQSKAALTDWLRAKASFVIEGLKEADKDEFCRCELKLQKWYGDLRGKPFAIEAENSILDISGFSKQYNCAFIWQKDGVKKLNLYLIINYFKGGKLRFKKIKPEAFEANRFYTVINKKSGEIVPMEVNFNFDDPNLIILPLAFGKRQGREFIWNDLLSLETGSLKLANGRVIEKTLYNRRTRQDEPALFVALTFERREVLDSSNIKPMNLIGVDRGENIPAVIALTDPEGCPLSRFKDSLGNPTHILRIGESYKEKQRTIQAKKEVEQRRAGGYSRKYASKAKNLADDMVRNTARDLLYYAVTQDAMLIFENLSRGFGRQGKRTFMAERQYTRMEDWLTAKLAYEGLPSKTYLSKTLAQYTSKTCSNCGFTITSADYDRVLEKLKKTATGWMTTINGKELKVEGQITYYNRYKRQNVVKDLSVELDRLSEESVNNDISSWTKGRSGEALSLLKKRFSHRPVQEKFVCLNCGFETHADEQAALNIARSWLFLRSQEYKKYQTNKTTGNTDKRAFVETWQSFYRKKLKEVWKPAV

SEQ ID NO: 33539 - protein, 978 aa, synthetic construct
  REGION 1..978: note = engineered CasX variant
QEIKRINKIRRRLVKDSNTKKAGKTGPMKTLLVPVMTPDLRERLENLRKKPENIPQPISNTSRANLNKLLTDYTEMKKAILHVYWEEFQKDPVGLMSRVAQPASKKIDQNKLKPEMDEKGNLTTAGFACSQCGQPLFVYKLEQVSEKGKAYTNYFGRCNVAEHEKLILLAQLKPEKDSDEAVTYSLGKFGQRALDFYSIHVTKESTHPVKPLAQIAGNRYASYPVGKALSDACMGTIASFLSKYQDIIIEHQKVVKGNQKRLESLRELAGKENLEYPSVTLPPQPHTKEGVDAYNEVIARVRWWVNLNLWQKLKLSRDDAKPLLRLKGFPSFPLVERQANEVDWWDMVCNVKKLINEKKEDGKVFWQNLAGYKRQEALRPYLSSEEDRKKGKKFARYQLGDLLLHLEKKHGEDWGKVYDEAWERIDKKVEGLSKHIKLEEERRSEDAQSKAALTDWLRAKASFVIEGLKEADKDEFCRCELKLQKWYGDLRGKPFAIEAENSILDISGFSKQYNCAFIWQKDGVKKLNLYLIINYFKGGKLRFKKIKPEAFEANRFYTVINKKSGEIVPMEVNFNFDDPNLIILPLAFGKRQGREFIWNDLLSLETGSLKLANGRVIEKTLYNRRTRQDEPALFVALTFERREVLDSSNIKPMNLIGVDRGENIPAVIALTDPEGCPLSRFKDSLGNPTHILRIGESYKEKQRTIQAKKEVEQRRAGGYSRKYASKAKNLADDMVRNTARDLLYYAVTQDAMLIFENLSRGFGRQGKRTFMAERQYTRMEDWLTAKLAYEGLPSKTYLSKTLAQYTSKTCSNCGFTITSADYDRVLEKLKKTATGWMTTINGKELKVEGQITYYNRYKRQNVVKDLSVELDRLSEESVNNDISSWTKGRSGEALSLLKKRFSHRPVQEKFVCLNCGFETHADEQAALNIARSWLFLRSQEYKKYQTNKTTGNTDKRAFVETWQSFYRKKLKEVWKPAV

SEQ ID NO: 33540 - protein, 978 aa, synthetic construct
  REGION 1..978: note = engineered CasX variant
QEIKRINKIRRRLVKDSNTKKAGKTGPMKTLLVPVMTPDLRERLENLRKKPENIPQPISNTSRANLNKLLTDYTEMKKAILHVYWEEFQKDPVGLMSRVAQPASKKIDQNKLKPEMDEKGNLTTAGFACSQCGQPLFVYKLEQVSEKGKAYTNYFGRCNVAEHEKLILLAQLKPEKDSDEAVTYSLGKFGQRALDFYSIHVTKESTHPVKPLAQIAGNRYASHPVGKALSDACMGTIASFLSKYQDIIIEHQKVVKGNQKRLESLRELAGKENLEYPSVTLPPQPHTKEGVDAYNEVIARVRWWVNLNLWQKLKLSRDDAKPLLRLKGFPSFPLVERQANEVDWWDMVCNVKKLINEKKEDGKVFWQNLAGYKRQEALRPYLSSEEDRKKGKKFARYQLGDLLLHLEKKHGEDWGKVYDEAWERIDKKVEGLSKHIKLEEERRSEDAQSKAALTDWLRAKASFVIEGLKEADKDEFCRCELKLQKWYGDLRGKPFAIEAENSILDISGFSKQYNCAFIWQKDGVKKLNLYLIINYFKGGKLRFKKIKPEAFEANRFYTVINKKSGEIVPMEVNFNFDDPNLIILPLAFGKRQGREFIWNDLLSLETGSLKLANGRVIEKTLYNRRTRQDEPALFVALTFERREVLDSSNIKPMNLIGVDRGENIPAVIALTDPEGCPLSRFKDSLGNPTHILRIGESYKEKQRTIQAKKEVEQRRAGGYSRKYASKAKNLADDMVRNTARDLLYYAVTQDAMLIFENLSRGFGRQGKRTFMAERQYTRMEDWLTAKLAYEGLPSKTYLSKTLAQYTSKTCSNCGFTITSADYDRVLEKLKKTATGWMTTINGKELKVEGQITYYNRYKRQNVVKDLSVELDRLSEESVNNDISSWTKGRSGEALSLLKKRFSHRPVQEKFVCLNCGFETHADEQAALNIARSWLFLRSQEYKKYQTNKTTGNTDKRAFVETWQSFYRKKLKEVWKPAV

SEQ ID NO: 33541 - protein, 978 aa, synthetic construct
  REGION 1..978: note = engineered CasX variant
QEIKRINKIRRRLVKDSNTKKAGKTGPMKTLLVPVMTPDLRERLENLRKKPENIPQPISNTSRANLNKLLTDYTEMKKAILHVYWEEFQKDPVGLMSRVAQPASKKIDQNKLKPEMDEKGNLTTAGFACSQCGQPLFVYKLEQVSEKGKAYTNYFGRCNVAEHEKLILLAQLKPEKDSDEAVTYSLGKFGQRALDFYSIHVTKESTHPVKPLAQIAGNRYASSPVGKALSDACMGTIASFLSKYQDIIIEHQKVVKGNQKRLESLRELAGKENLEYPSVTLPPQPHTKEGVDAYNEVIARVRWWVNLNLWQKLKLSRDDAKPLLRLKGFPSFPLVERQANEVDWWDMVCNVKKLINEKKEDGKVFWQNLAGYKRQEALRPYLSSEEDRKKGKKFARYQLGDLLLHLEKKHGEDWGKVYDEAWERIDKKVEGLSKHIKLEEERRSEDAQSKAALTDWLRAKASFVIEGLKEADKDEFCRCELKLQKWYGDLRGKPFAIEAENSILDISGFSKQYNCAFIWQKDGVKKLNLYLIINYFKGGKLRFKKIKPEAFEANRFYTVINKKSGEIVPMEVNFNFDDPNLIILPLAFGKRQGREFIWNDLLSLETGSLKLANGRVIEKTLYNRRTRQDEPALFVALTFERREVLDSSNIKPMNLIGVDRGENIPAVIALTDPEGCPLSRFKDSLGNPTHILRIGESYKEKQRTIQAKKEVEQRRAGGYSRKYASKAKNLADDMVRNTARDLLYYAVTQDAMLIFENLSRGFGRQGKRTFMAERQYTRMEDWLTAKLAYEGLPSKTYLSKTLAQYTSKTCSNCGFTITSADYDRVLEKLKKTATGWMTTINGKELKVEGQITYYNRYKRQNVVKDLSVELDRLSEESVNNDISSWTKGRSGEALSLLKKRFSHRPVQEKFVCLNCGFETHADEQAALNIARSWLFLRSQEYKKYQTNKTTGNTDKRAFVETWQSFYRKKLKEVWKPAV

SEQ ID NO: 33542 - protein, 978 aa, synthetic construct
  REGION 1..978: note = engineered CasX variant
QEIKRINKIRRRLVKDSNTKKAGKTGPMKTLLVPVMTPDLRERLENLRKKPENIPQPISNTSRANLNKLLTDYTEMKKAILHVYWEEFQKDPVGLMSRVAQPASKKIDQNKLKPEMDEKGNLTTAGFACSQCGQPLFVYKLEQVSEKGKAYTNYFGRCNVAEHEKLILLAQLKPEKDSDEAVTYSLGKFGQRALDFYSIHVTKESTHPVKPLAQIAGNRYASTPVGKALSDACMGTIASFLSKYQDIIIEHQKVVKGNQKRLESLRELAGKENLEYPSVTLPPQPHTKEGVDAYNEVIARVRWWVNLNLWQKLKLSRDDAKPLLRLKGFPSFPLVERQANEVDWWDMVCNVKKLINEKKEDGKVFWQNLAGYKRQEALRPYLSSEEDRKKGKKFARYQLGDLLLHLEKKHGEDWGKVYDEAWERIDKKVEGLSKHIKLEEERRSEDAQSKAALTDWLRAKASFVIEGLKEADKDEFCRCELKLQKWYGDLRGKPFAIEAENSILDISGFSKQYNCAFIWQKDGVKKLNLYLIINYFKGGKLRFKKIKPEAFEANRFYTVINKKSGEIVPMEVNFNFDDPNLIILPLAFGKRQGREFIWNDLLSLETGSLKLANGRVIEKTLYNRRTRQDEPALFVALTFERREVLDSSNIKPMNLIGVDRGENIPAVIALTDPEGCPLSRFKDSLGNPTHILRIGESYKEKQRTIQAKKEVEQRRAGGYSRKYASKAKNLADDMVRNTARDLLYYAVTQDAMLIFENLSRGFGRQGKRTFMAERQYTRMEDWLTAKLAYEGLPSKTYLSKTLAQYTSKTCSNCGFTITSADYDRVLEKLKKTATGWMTTINGKELKVEGQITYYNRYKRQNVVKDLSVELDRLSEESVNNDISSWTKGRSGEALSLLKKRFSHRPVQEKFVCLNCGFETHADEQAALNIARSWLFLRSQEYKKYQTNKTTGNTDKRAFVETWQSFYRKKLKEVWKPAV

SEQ ID NO: 33543 - protein, 978 aa, synthetic construct
  REGION 1..978: note = engineered CasX variant
QEIKRINKIRRRLVKDSNTKKAGKTGPMKTLLVPVMTPDLRERLENLRKKPENIPQPISNTSRANLNKLLTDYTEMKKAILHVYWEEFQKDPVGLMSRVAQPASKKIDQNKLKPEMDEKGNLTTAGFACSQCGQPLFVYKLEQVSEKGKAYTNYFGRCNVAEHEKLILLAQLKPEKDSDEAVTYSLGKFGQRALDFYSIHVTKESTHPVKPLAQIAGNRYASAPVGKALSDACMGTIASFLSKYQDIIIEHQKVVKGNQKRLESLRELAGKENLEYPSVTLPPQPHTKEGVDAYNEVIARVRWWVNLNLWQKLKLSRDDAKPLLRLKGFPSFPLVERQANEVDWWDMVCNVKKLINEKKEDGKVFWQNLAGYKRQEALRPYLSSEEDRKKGKKFARYQLGDLLLHLEKKHGEDWGKVYDEAWERIDKKVEGLSKHIKLEEERRSEDAQSKAALTDWLRAKASFVIEGLKEADKDEFCRCELKLQKWYGDLRGKPFAIEAENSILDISGFSKQYNCAFIWQKDGVKKLNLYLIINYFKGGKLRFKKIKPEAFEANRFYTVINKKSGEIVPMEVNFNFDDPNLIILPLAFGKRQGREFIWNDLLSLETGSLKLANGRVIEKTLYNRRTRQDEPALFVALTFERREVLDSSNIKPMNLIGVDRGENIPAVIALTDPEGCPLSRFKDSLGNPTHILRIGESYKEKQRTIQAKKEVEQRRAGGYSRKYASKAKNLADDMVRNTARDLLYYAVTQDAMLIFENLSRGFGRQGKRTFMAERQYTRMEDWLTAKLAYEGLPSKTYLSKTLAQYTSKTCSNCGFTITSADYDRVLEKLKKTATGWMTTINGKELKVEGQITYYNRYKRQNVVKDLSVELDRLSEESVNNDISSWTKGRSGEALSLLKKRFSHRPVQEKFVCLNCGFETHADEQAALNIARSWLFLRSQEYKKYQTNKTTGNTDKRAFVETWQSFYRKKLKEVWKPAV

SEQ ID NO: 33544 - protein, 978 aa, synthetic construct
  REGION 1..978: note = engineered CasX variant
QEIKRINKIRRRLVKDSNTKKAGKTGPMKTLLVPVMTPDLRERLENLRKKPENIPQPISNTSRANLNKLLTDYTEMKKAILHVYWEEFQKDPVGLMSRVAQPASKKIDQNKLKPEMDEKGNLTTAGFACSQCGQPLFVYKLEQVSEKGKAYTNYFGRCNVAEHEKLILLAQLKPEKDSDEAVTYSLGKFGQRALDFYSIHVTKESTHPVKPLAQIAGNRYASVPVGKALSDACMGTIASFLSKYQDIIIEHQKVVKGNQKRLESLRELAGKENLEYPSVTLPPQPHTKEGVDAYNEVIARVRWWVNLNLWQKLKLSRDDAKPLLRLKGFPSFPLVERQANEVDWWDMVCNVKKLINEKKEDGKVFWQNLAGYKRQEALRPYLSSEEDRKKGKKFARYQLGDLLLHLEKKHGEDWGKVYDEAWERIDKKVEGLSKHIKLEEERRSEDAQSKAALTDWLRAKASFVIEGLKEADKDEFCRCELKLQKWYGDLRGKPFAIEAENSILDISGFSKQYNCAFIWQKDGVKKLNLYLIINYFKGGKLRFKKIKPEAFEANRFYTVINKKSGEIVPMEVNFNFDDPNLIILPLAFGKRQGREFIWNDLLSLETGSLKLANGRVIEKTLYNRRTRQDEPALFVALTFERREVLDSSNIKPMNLIGVDRGENIPAVIALTDPEGCPLSRFKDSLGNPTHILRIGESYKEKQRTIQAKKEVEQRRAGGYSRKYASKAKNLADDMVRNTARDLLYYAVTQDAMLIFENLSRGFGRQGKRTFMAERQYTRMEDWLTAKLAYEGLPSKTYLSKTLAQYTSKTCSNCGFTITSADYDRVLEKLKKTATGWMTTINGKELKVEGQITYYNRYKRQNVVKDLSVELDRLSEESVNNDISSWTKGRSGEALSLLKKRFSHRPVQEKFVCLNCGFETHADEQAALNIARSWLFLRSQEYKKYQTNKTTGNTDKRAFVETWQSFYRKKLKEVWKPAV

SEQ ID NO: 33545 - protein, 978 aa, synthetic construct
  REGION 1..978: note = engineered CasX variant
QEIKRINKIRRRLVKDSNTKKAGKTGPMKTLLVPVMTPDLRERLENLRKKPENIPQPISNTSRANLNKLLTDYTEMKKAILHVYWEEFQKDPVGLMSRVAQPASKKIDQNKLKPEMDEKGNLTTAGFACSQCGQPLFVYKLEQVSEKGKAYTNYFGRCNVAEHEKLIKLAQLKPEKDSDEAVTYSLGKFGQRALDFYSIHVTKESTHPVKPLAQIAGNRYASGPVGKALSDACMGTIASFLSKYQDIIIEHQKVVKGNQKRLESLRELAGKENLEYPSVTLPPQPHTKEGVDAYNEVIARVRWWVNLNLWQKLKLSRDDAKPLLRLKGFPSFPLVERQANEVDWWDMVCNVKKLINEKKEDGKVFWQNLAGYKRQEALRPYLSSEEDRKKGKKFARYQLGDLLLHLEKKHGEDWGKVYDEAWERIDKKVEGLSKHIKLEEERRSEDAQSKAALTDWLRAKASFVIEGLKEADKDEFCRCELKLQKWYGDLRGKPFAIEAENSILDISGFSKQYNCAFIWQKDGVKKLNLYLIINYFKGGKLRFKKIKPEAFEANRFYTVINKKSGEIVPMEVNFNFDDPNLIILPLAFGKRQGREFIWNDLLSLETGSLKLANGRVIEKTLYNRRTRQDEPALFVALTFERREVLDSSNIKPMNLIGVDRGENIPAVIALTDPEGCPLSRFKDSLGNPTHILRIGESYKEKQRTIQAKKEVEQRRAGGYSRKYASKAKNLADDMVRNTARDLLYYAVTQDAMLIFENLSRGFGRQGKRTFMAERQYTRMEDWLTAKLAYEGLPSKTYLSKTLAQYTSKTCSNCGFTITSADYDRVLEKLKKTATGWMTTINGKELKVEGQITYYNRYKRQNVVKDLSVELDRLSEESVNNDISSWTKGRSGEALSLLKKRFSHRPVQEKFVCLNCGFETHADEQAALNIARSWLFLRSQEYKKYQTNKTTGNTDKRAFVETWQSFYRKKLKEVWKPAV

SEQ ID NO: 33546 - protein, 977 aa, synthetic construct
  REGION 1..977: note = engineered CasX variant
QEIKRINKIRRRLVKDSNTKKAGKTGPMKTLLVPVMTPDLRERLENLRKKPENIPQPISNTSRANLNKLLTDYTEMKKAILHVYWEEFQKDPVGLMSRVAQPASKKIDQNKLKPEMDEKGNLTTAGFACSQCGQPLFVYKLEQVSEKGKAYTNYFGRCNVAEHEKLILLAQLKPEKDSDEAVTYSLGKFGQRALDFYSIHVTKESTHPVKPLAQIAGNRYASPVGKALSDACMGTIASFLSKYQDIIIEHQKVVKGNQKRLESLRELAGKENLEYPSVTLPPQPHTKEGVDAYNEVIARVRWWVNLNLWQKLKLSRDDAKPLLRLKGFPSFPLVERQANEVDWWDMVCNVKKLINEKKEDGKVFWQNLAGYKRQEALRPYLSSEEDRKKGKKFARYQLGDLLLHLEKKHGEDWGKVYDEAWERIDKKVEGLSKHIKLEEERRSEDAQSKAALTDWLRAKASFVIEGLKEADKDEFCRCELKLQKWYGDLRGKPFAIEAENSILDISGFSKQYNCAFIWQKDGVKKLNLYLIINYFKGGKLRFKKIKPEAFEANRFYTVINKKSGEIVPMEVNFNFDDPNLIILPLAFGKRQGREFIWNDLLSLETGSLKLANGRVIEKTLYNRRTRQDEPALFVALTFERREVLDSSNIKPMNLIGVDRGENIPAVIALTDPEGCPLSRFKDSLGNPTHILRIGESYKEKQRTIQAKKEVEQRRAGGYSRKYASKAKNLADDMVRNTARDLLYYAVTQDAMLIFENLSRGFGRQGKRTFMAERQYTRMEDWLTAKLAYEGLPSKTYLSKTLAQYTSKTCSNCGFTITSADYDRVLEKLKKTATGWMTTINGKELKVEGQITYYNRYKRQNVVKDLSVELDRLSEESVNNDISSWTKGRSGEALSLLKKRFSHRPVQEKFVCLNCGFETHADEQAALNIARSWLFLRSQEYKKYQTNKTTGNTDKRAFVETWQSFYRKKLKEVWKPAV

SEQ ID NO: 33547 - protein, 979 aa, synthetic construct
  REGION 1..979: note = engineered CasX variant
QEIKRINKIRRRLVKDSNTKKAGKTGPMKTLLVPVMTPDLRERLENLRKKPENIPQPISNTSRANLNKLLTDYTEMKKAILHVYWEEFQKDPVGLMSRVAQPASKKIDQNKLKPEMDEKGNLTTAGFACSQCGQPLFVYKLEQVSEKGKAYTNYFGRCNVAEHEKLILLAQLKPEKDSDEAVTYSLGKFGQRALDFYSIHVTKESTHPVKPLAQIAGNRYASYPVGKALSDACMGTIASFLSKYQDIIIEHQKVVKGNQKRLESLRELAGKENLEYPSVTLPPQPHTKEGVDAYNEVIARVRMWVNLNLWQKLKLSRDDAKPLLRLKGFPSFPLVERQQANEVDWWDMVCNVKKLINEKKEDGKVFWQNLAGYKRQEALRPYLSSEEDRKKGKKFARYQLGDLLLHLEKKHGEDWGKVYDEAWERIDKKVEGLSKHIKLEEERRSEDAQSKAALTDWLRAKASFVIEGLKEADKDEFCRCELKLQKWYGDLRGKPFAIEAENSILDISGFSKQYNCAFIWQKDGVKKLNLYLIINYFKGGKLRFKKIKPEAFEANRFYTVINKKSGEIVPMEVNFNFDDPNLIILPLAFGKRQGREFIWNDLLSLETGSLKLANGRVIEKTLYNRRTRQDEPALFVALTFERREVLDSSNIKPMNLIGVDRGENIPAVIALTDPEGCPLSRFKDSLGNPTHILRIGESYKEKQRTIQAKKEVEQRRAGGYSRKYASKAKNLADDMVRNTARDLLYYAVTQDAMLIFENLSRGFGRQGKRTFMAERQYTRMEDWLTAKLAYEGLPSKTYLSKTLAQYTSKTCSNCGFTITSADYDRVLEKLKKTATGWMTTINGKELKVEGQITYYNRYKRQNVVKDLSVELDRLSEESVNNDISSWTKGRSGEALSLLKKRFSHRPVQEKFVCLNCGFETHADEQAALNIARSWLFLRSQEYKKYQTNKTTGNTDKRAFVETWQSFYRKKLKEVWKPAV

SEQ ID NO: 33548 - protein, 979 aa, synthetic construct
  REGION 1..979: note = engineered CasX variant
QEIKRINKIRRRLVKDSNTKKAGKTGPMKTLLVPVMTPDLRERLENLRKKPENIPQPISNTSRANLNKLLTDYTEMKKAILHVYWEEFQKDPVGLMSRVAQPASKKIDQNKLKPEMDEKGNLTTAGFACSQCGQPLFVYKLEQVSEKGKAYTNYFGRCNVAEHEKLILLAQLKPEKDSDEAVTYSLGKFGQRALDFYSIHVTKESTHPVKPLAQIAGNRYASHPVGKALSDACMGTIASFLSKYQDIIIEHQKVVKGNQKRLESLRELAGKENLEYPSVTLPPQPHTKEGVDAYNEVIARVRMWVNLNLWQKLKLSRDDAKPLLRLKGFPSFPLVERQQANEVDWWDMVCNVKKLINEKKEDGKVFWQNLAGYKRQEALRPYLSSEEDRKKGKKFARYQLGDLLLHLEKKHGEDWGKVYDEAWERIDKKVEGLSKHIKLEEERRSEDAQSKAALTDWLRAKASFVIEGLKEADKDEFCRCELKLQKWYGDLRGKPFAIEAENSILDISGFSKQYNCAFIWQKDGVKKLNLYLIINYFKGGKLRFKKIKPEAFEANRFYTVINKKSGEIVPMEVNFNFDDPNLIILPLAFGKRQGREFIWNDLLSLETGSLKLANGRVIEKTLYNRRTRQDEPALFVALTFERREVLDSSNIKPMNLIGVDRGENIPAVIALTDPEGCPLSRFKDSLGNPTHILRIGESYKEKQRTIQAKKEVEQRRAGGYSRKYASKAKNLADDMVRNTARDLLYYAVTQDAMLIFENLSRGFGRQGKRTFMAERQYTRMEDWLTAKLAYEGLPSKTYLSKTLAQYTSKTCSNCGFTITSADYDRVLEKLKKTATGWMTTINGKELKVEGQITYYNRYKRQNVVKDLSVELDRLSEESVNNDISSWTKGRSGEALSLLKKRFSHRPVQEKFVCLNCGFETHADEQAALNIARSWLFLRSQEYKKYQTNKTTGNTDKRAFVETWQSFYRKKLKEVWKPAV

SEQ ID NO: 33549 - protein, 979 aa, synthetic construct
  REGION 1..979: note = engineered CasX variant
QEIKRINKIRRRLVKDSNTKKAGKTGPMKTLLVPVMTPDLRERLENLRKKPENIPQPISNTSRANLNKLLTDYTEMKKAILHVYWEEFQKDPVGLMSRVAQPASKKIDQNKLKPEMDEKGNLTTAGFACSQCGQPLFVYKLEQVSEKGKAYTNYFGRCNVAEHEKLILLAQLKPEKDSDEAVTYSLGKFGQRALDFYSIHVTKESTHPVKPLAQIAGNRYASSPVGKALSDACMGTIASFLSKYQDIIIEHQKVVKGNQKRLESLRELAGKENLEYPSVTLPPQPHTKEGVDAYNEVIARVRMWVNLNLWQKLKLSRDDAKPLLRLKGFPSFPLVERQQANEVDWWDMVCNVKKLINEKKEDGKVFWQNLAGYKRQEALRPYLSSEEDRKKGKKFARYQLGDLLLHLEKKHGEDWGKVYDEAWERIDKKVEGLSKHIKLEEERRSEDAQSKAALTDWLRAKASFVIEGLKEADKDEFCRCELKLQKWYGDLRGKPFAIEAENSILDISGFSKQYNCAFIWQKDGVKKLNLYLIINYFKGGKLRFKKIKPEAFEANRFYTVINKKSGEIVPMEVNFNFDDPNLIILPLAFGKRQGREFIWNDLLSLETGSLKLANGRVIEKTLYNRRTRQDEPALFVALTFERREVLDSSNIKPMNLIGVDRGENIPAVIALTDPEGCPLSRFKDSLGNPTHILRIGESYKEKQRTIQAKKEVEQRRAGGYSRKYASKAKNLADDMVRNTARDLLYYAVTQDAMLIFENLSRGFGRQGKRTFMAERQYTRMEDWLTAKLAYEGLPSKTYLSKTLAQYTSKTCSNCGFTITSADYDRVLEKLKKTATGWMTTINGKELKVEGQITYYNRYKRQNVVKDLSVELDRLSEESVNNDISSWTKGRSGEALSLLKKRFSHRPVQEKFVCLNCGFETHADEQAALNIARSWLFLRSQEYKKYQTNKTTGNTDKRAFVETWQSFYRKKLKEVWKPAV

SEQ ID NO: 33550 - protein, 979 aa, synthetic construct
  REGION 1..979: note = engineered CasX variant
QEIKRINKIRRRLVKDSNTKKAGKTGPMKTLLVPVMTPDLRERLENLRKKPENIPQPISNTSRANLNKLLTDYTEMKKAILHVYWEEFQKDPVGLMSRVAQPASKKIDQNKLKPEMDEKGNLTTAGFACSQCGQPLFVYKLEQVSEKGKAYTNYFGRCNVAEHEKLILLAQLKPEKDSDEAVTYSLGKFGQRALDFYSIHVTKESTHPVKPLAQIAGNRYASTPVGKALSDACMGTIASFLSKYQDIIIEHQKVVKGNQKRLESLRELAGKENLEYPSVTLPPQPHTKEGVDAYNEVIARVRMWVNLNLWQKLKLSRDDAKPLLRLKGFPSFPLVERQQANEVDWWDMVCNVKKLINEKKEDGKVFWQNLAGYKRQEALRPYLSSEEDRKKGKKFARYQLGDLLLHLEKKHGEDWGKVYDEAWERIDKKVEGLSKHIKLEEERRSEDAQSKAALTDWLRAKASFVIEGLKEADKDEFCRCELKLQKWYGDLRGKPFAIEAENSILDISGFSKQYNCAFIWQKDGVKKLNLYLIINYFKGGKLRFKKIKPEAFEANRFYTVINKKSGEIVPMEVNFNFDDPNLIILPLAFGKRQGREFIWNDLLSLETGSLKLANGRVIEKTLYNRRTRQDEPALFVALTFERREVLDSSNIKPMNLIGVDRGENIPAVIALTDPEGCPLSRFKDSLGNPTHILRIGESYKEKQRTIQAKKEVEQRRAGGYSRKYASKAKNLADDMVRNTARDLLYYAVTQDAMLIFENLSRGFGRQGKRTFMAERQYTRMEDWLTAKLAYEGLPSKTYLSKTLAQYTSKTCSNCGFTITSADYDRVLEKLKKTATGWMTTINGKELKVEGQITYYNRYKRQNVVKDLSVELDRLSEESVNNDISSWTKGRSGEALSLLKKRFSHRPVQEKFVCLNCGFETHADEQAALNIARSWLFLRSQEYKKYQTNKTTGNTDKRAFVETWQSFYRKKLKEVWKPAV

SEQ ID NO: 33551 - protein, 979 aa, synthetic construct
  REGION 1..979: note = engineered CasX variant
QEIKRINKIRRRLVKDSNTKKAGKTGPMKTLLVPVMTPDLRERLENLRKKPENIPQPISNTSRANLNKLLTDYTEMKKAILHVYWEEFQKDPVGLMSRVAQPASKKIDQNKLKPEMDEKGNLTTAGFACSQCGQPLFVYKLEQVSEKGKAYTNYFGRCNVAEHEKLILLAQLKPEKDSDEAVTYSLGKFGQRALDFYSIHVTKESTHPVKPLAQIAGNRYASAPVGKALSDACMGTIASFLSKYQDIIIEHQKVVKGNQKRLESLRELAGKENLEYPSVTLPPQPHTKEGVDAYNEVIARVRMWVNLNLWQKLKLSRDDAKPLLRLKGFPSFPLVERQQANEVDWWDMVCNVKKLINEKKEDGKVFWQNLAGYKRQEALRPYLSSEEDRKKGKKFARYQLGDLLLHLEKKHGEDWGKVYDEAWERIDKKVEGLSKHIKLEEERRSEDAQSKAALTDWLRAKASFVIEGLKEADKDEFCRCELKLQKWYGDLRGKPFAIEAENSILDISGFSKQYNCAFIWQKDGVKKLNLYLIINYFKGGKLRFKKIKPEAFEANRFYTVINKKSGEIVPMEVNFNFDDPNLIILPLAFGKRQGREFIWNDLLSLETGSLKLANGRVIEKTLYNRRTRQDEPALFVALTFERREVLDSSNIKPMNLIGVDRGENIPAVIALTDPEGCPLSRFKDSLGNPTHILRIGESYKEKQRTIQAKKEVEQRRAGGYSRKYASKAKNLADDMVRNTARDLLYYAVTQDAMLIFENLSRGFGRQGKRTFMAERQYTRMEDWLTAKLAYEGLPSKTYLSKTLAQYTSKTCSNCGFTITSADYDRVLEKLKKTATGWMTTINGKELKVEGQITYYNRYKRQNVVKDLSVELDRLSEESVNNDISSWTKGRSGEALSLLKKRFSHRPVQEKFVCLNCGFETHADEQAALNIARSWLFLRSQEYKKYQTNKTTGNTDKRAFVETWQSFYRKKLKEVWKPAV

SEQ ID NO: 33552 - protein, 979 aa, synthetic construct
  REGION 1..979: note = engineered CasX variant
QEIKRINKIRRRLVKDSNTKKAGKTGPMKTLLVPVMTPDLRERLENLRKKPENIPQPISNTSRANLNKLLTDYTEMKKAILHVYWEEFQKDPVGLMSRVAQPASKKIDQNKLKPEMDEKGNLTTAGFACSQCGQPLFVYKLEQVSEKGKAYTNYFGRCNVAEHEKLILLAQLKPEKDSDEAVTYSLGKFGQRALDFYSIHVTKESTHPVKPLAQIAGNRYASVPVGKALSDACMGTIASFLSKYQDIIIEHQKVVKGNQKRLESLRELAGKENLEYPSVTLPPQPHTKEGVDAYNEVIARVRMWVNLNLWQKLKLSRDDAKPLLRLKGFPSFPLVERQQANEVDWWDMVCNVKKLINEKKEDGKVFWQNLAGYKRQEALRPYLSSEEDRKKGKKFARYQLGDLLLHLEKKHGEDWGKVYDEAWERIDKKVEGLSKHIKLEEERRSEDAQSKAALTDWLRAKASFVIEGLKEADKDEFCRCELKLQKWYGDLRGKPFAIEAENSILDISGFSKQYNCAFIWQKDGVKKLNLYLIINYFKGGKLRFKKIKPEAFEANRFYTVINKKSGEIVPMEVNFNFDDPNLIILPLAFGKRQGREFIWNDLLSLETGSLKLANGRVIEKTLYNRRTRQDEPALFVALTFERREVLDSSNIKPMNLIGVDRGENIPAVIALTDPEGCPLSRFKDSLGNPTHILRIGESYKEKQRTIQAKKEVEQRRAGGYSRKYASKAKNLADDMVRNTARDLLYYAVTQDAMLIFENLSRGFGRQGKRTFMAERQYTRMEDWLTAKLAYEGLPSKTYLSKTLAQYTSKTCSNCGFTITSADYDRVLEKLKKTATGWMTTINGKELKVEGQITYYNRYKRQNVVKDLSVELDRLSEESVNNDISSWTKGRSGEALSLLKKRFSHRPVQEKFVCLNCGFETHADEQAALNIARSWLFLRSQEYKKYQTNKTTGNTDKRAFVETWQSFYRKKLKEVWKPAV

SEQ ID NO: 33553 - protein, 979 aa, synthetic construct
  REGION 1..979: note = engineered CasX variant
QEIKRINKIRRRLVKDSNTKKAGKTGPMKTLLVPVMTPDLRERLENLRKKPENIPQPISNTSRANLNKLLTDYTEMKKAILHVYWEEFQKDPVGLMSRVAQPASKKIDQNKLKPEMDEKGNLTTAGFACSQCGQPLFVYKLEQVSEKGKAYTNYFGRCNVAEHEKLIKLAQLKPEKDSDEAVTYSLGKFGQRALDFYSIHVTKESTHPVKPLAQIAGNRYASGPVGKALSDACMGTIASFLSKYQDIIIEHQKVVKGNQKRLESLRELAGKENLEYPSVTLPPQPHTKEGVDAYNEVIARVRMWVNLNLWQKLKLSRDDAKPLLRLKGFPSFPLVERQQANEVDWWDMVCNVKKLINEKKEDGKVFWQNLAGYKRQEALRPYLSSEEDRKKGKKFARYQLGDLLLHLEKKHGEDWGKVYDEAWERIDKKVEGLSKHIKLEEERRSEDAQSKAALTDWLRAKASFVIEGLKEADKDEFCRCELKLQKWYGDLRGKPFAIEAENSILDISGFSKQYNCAFIWQKDGVKKLNLYLIINYFKGGKLRFKKIKPEAFEANRFYTVINKKSGEIVPMEVNFNFDDPNLIILPLAFGKRQGREFIWNDLLSLETGSLKLANGRVIEKTLYNRRTRQDEPALFVALTFERREVLDSSNIKPMNLIGVDRGENIPAVIALTDPEGCPLSRFKDSLGNPTHILRIGESYKEKQRTIQAKKEVEQRRAGGYSRKYASKAKNLADDMVRNTARDLLYYAVTQDAMLIFENLSRGFGRQGKRTFMAERQYTRMEDWLTAKLAYEGLPSKTYLSKTLAQYTSKTCSNCGFTITSADYDRVLEKLKKTATGWMTTINGKELKVEGQITYYNRYKRQNVVKDLSVELDRLSEESVNNDISSWTKGRSGEALSLLKKRFSHRPVQEKFVCLNCGFETHADEQAALNIARSWLFLRSQEYKKYQTNKTTGNTDKRAFVETWQSFYRKKLKEVWKPAV

SEQ ID NO: 33554 - protein, 978 aa, synthetic construct
  REGION 1..978: note = engineered CasX variant
QEIKRINKIRRRLVKDSNTKKAGKTGPMKTLLVPVMTPDLRERLENLRKKPENIPQPISNTSRANLNKLLTDYTEMKKAILHVYWEEFQKDPVGLMSRVAQPASKKIDQNKLKPEMDEKGNLTTAGFACSQCGQPLFVYKLEQVSEKGKAYTNYFGRCNVAEHEKLILLAQLKPEKDSDEAVTYSLGKFGQRALDFYSIHVTKESTHPVKPLAQIAGNRYASPVGKALSDACMGTIASFLSKYQDIIIEHQKVVKGNQKRLESLRELAGKENLEYPSVTLPPQPHTKEGVDAYNEVIARVRMWVNLNLWQKLKLSRDDAKPLLRLKGFPSFPLVERQQANEVDWWDMVCNVKKLINEKKEDGKVFWQNLAGYKRQEALRPYLSSEEDRKKGKKFARYQLGDLLLHLEKKHGEDWGKVYDEAWERIDKKVEGLSKHIKLEEERRSEDAQSKAALTDWLRAKASFVIEGLKEADKDEFCRCELKLQKWYGDLRGKPFAIEAENSILDISGFSKQYNCAFIWQKDGVKKLNLYLIINYFKGGKLRFKKIKPEAFEANRFYTVINKKSGEIVPMEVNFNFDDPNLIILPLAFGKRQGREFIWNDLLSLETGSLKLANGRVIEKTLYNRRTRQDEPALFVALTFERREVLDSSNIKPMNLIGVDRGENIPAVIALTDPEGCPLSRFKDSLGNPTHILRIGESYKEKQRTIQAKKEVEQRRAGGYSRKYASKAKNLADDMVRNTARDLLYYAVTQDAMLIFENLSRGFGRQGKRTFMAERQYTRMEDWLTAKLAYEGLPSKTYLSKTLAQYTSKTCSNCGFTITSADYDRVLEKLKKTATGWMTTINGKELKVEGQITYYNRYKRQNVVKDLSVELDRLSEESVNNDISSWTKGRSGEALSLLKKRFSHRPVQEKFVCLNCGFETHADEQAALNIARSWLFLRSQEYKKYQTNKTTGNTDKRAFVETWQSFYRKKLKEVWKPAV

SEQ ID NO: 33555 - protein, 979 aa, synthetic construct
  REGION 1..979: note = engineered CasX variant
QEIKRINKIRRRLVKDSNTKKAGKTGPMKTLLVPVMTPDLRERLENLRKKPENIPQPISNTSRANLNKLLTDYTEMKKAILHVYWEEFQKDPVGLMSRVAQPASKKIDQNKLKPEMDEKGNLTTAGFACSQCGQPLFVYKLEQVSEKGKAYTNYFGRCNVAEHEKLILLAQLKPEKDSDEAVTYSLGKFGQRALDFYSIHVTKESTHPVKPLAQIAGNRYASYPVGKALSDACMGTIASFLSKYQDIIIEHQKVVKGNQKRLESLRELAGKENLEYPSVTLPPQPHTKEGVDAYNEVIARVRMWVNLNLWQKLKLSRDDAKPLLRLKGFPSFPLVERQANAEVDWWDMVCNVKKLINEKKEDGKVFWQNLAGYKRQEALRPYLSSEEDRKKGKKFARYQLGDLLLHLEKKHGEDWGKVYDEAWERIDKKVEGLSKHIKLEEERRSEDAQSKAALTDWLRAKASFVIEGLKEADKDEFCRCELKLQKWYGDLRGKPFAIEAENSILDISGFSKQYNCAFIWQKDGVKKLNLYLIINYFKGGKLRFKKIKPEAFEANRFYTVINKKSGEIVPMEVNFNFDDPNLIILPLAFGKRQGREFIWNDLLSLETGSLKLANGRVIEKTLYNRRTRQDEPALFVALTFERREVLDSSNIKPMNLIGVDRGENIPAVIALTDPEGCPLSRFKDSLGNPTHILRIGESYKEKQRTIQAKKEVEQRRAGGYSRKYASKAKNLADDMVRNTARDLLYYAVTQDAMLIFENLSRGFGRQGKRTFMAERQYTRMEDWLTAKLAYEGLPSKTYLSKTLAQYTSKTCSNCGFTITSADYDRVLEKLKKTATGWMTTINGKELKVEGQITYYNRYKRQNVVKDLSVELDRLSEESVNNDISSWTKGRSGEALSLLKKRFSHRPVQEKFVCLNCGFETHADEQAALNIARSWLFLRSQEYKKYQTNKTTGNTDKRAFVETWQSFYRKKLKEVWKPAV

SEQ ID NO: 33556 - protein, 979 aa, synthetic construct
  REGION 1..979: note = engineered CasX variant
QEIKRINKIRRRLVKDSNTKKAGKTGPMKTLLVPVMTPDLRERLENLRKKPENIPQPISNTSRANLNKLLTDYTEMKKAILHVYWEEFQKDPVGLMSRVAQPASKKIDQNKLKPEMDEKGNLTTAGFACSQCGQPLFVYKLEQVSEKGKAYTNYFGRCNVAEHEKLILLAQLKPEKDSDEAVTYSLGKFGQRALDFYSIHVTKESTHPVKPLAQIAGNRYASHPVGKALSDACMGTIASFLSKYQDIIIEHQKVVKGNQKRLESLRELAGKENLEYPSVTLPPQPHTKEGVDAYNEVIARVRMWVNLNLWQKLKLSRDDAKPLLRLKGFPSFPLVERQANAEVDWWDMVCNVKKLINEKKEDGKVFWQNLAGYKRQEALRPYLSSEEDRKKGKKFARYQLGDLLLHLEKKHGEDWGKVYDEAWERIDKKVEGLSKHIKLEEERRSEDAQSKAALTDWLRAKASFVIEGLKEADKDEFCRCELKLQKWYGDLRGKPFAIEAENSILDISGFSKQYNCAFIWQKDGVKKLNLYLIINYFKGGKLRFKKIKPEAFEANRFYTVINKKSGEIVPMEVNFNFDDPNLIILPLAFGKRQGREFIWNDLLSLETGSLKLANGRVIEKTLYNRRTRQDEPALFVALTFERREVLDSSNIKPMNLIGVDRGENIPAVIALTDPEGCPLSRFKDSLGNPTHILRIGESYKEKQRTIQAKKEVEQRRAGGYSRKYASKAKNLADDMVRNTARDLLYYAVTQDAMLIFENLSRGFGRQGKRTFMAERQYTRMEDWLTAKLAYEGLPSKTYLSKTLAQYTSKTCSNCGFTITSADYDRVLEKLKKTATGWMTTINGKELKVEGQITYYNRYKRQNVVKDLSVELDRLSEESVNNDISSWTKGRSGEALSLLKKRFSHRPVQEKFVCLNCGFETHADEQAALNIARSWLFLRSQEYKKYQTNKTTGNTDKRAFVETWQSFYRKKLKEVWKPAV

SEQ ID NO: 33557 - protein, 979 aa, synthetic construct
  REGION 1..979: note = engineered CasX variant
QEIKRINKIRRRLVKDSNTKKAGKTGPMKTLLVPVMTPDLRERLENLRKKPENIPQPISNTSRANLNKLLTDYTEMKKAILHVYWEEFQKDPVGLMSRVAQPASKKIDQNKLKPEMDEKGNLTTAGFACSQCGQPLFVYKLEQVSEKGKAYTNYFGRCNVAEHEKLILLAQLKPEKDSDEAVTYSLGKFGQRALDFYSIHVTKESTHPVKPLAQIAGNRYASSPVGKALSDACMGTIASFLSKYQDIIIEHQKVVKGNQKRLESLRELAGKENLEYPSVTLPPQPHTKEGVDAYNEVIARVRMWVNLNLWQKLKLSRDDAKPLLRLKGFPSFPLVERQANAEVDWWDMVCNVKKLINEKKEDGKVFWQNLAGYKRQEALRPYLSSEEDRKKGKKFARYQLGDLLLHLEKKHGEDWGKVYDEAWERIDKKVEGLSKHIKLEEERRSEDAQSKAALTDWLRAKASFVIEGLKEADKDEFCRCELKLQKWYGDLRGKPFAIEAENSILDISGFSKQYNCAFIWQKDGVKKLNLYLIINYFKGGKLRFKKIKPEAFEANRFYTVINKKSGEIVPMEVNFNFDDPNLIILPLAFGKRQGREFIWNDLLSLETGSLKLANGRVIEKTLYNRRTRQDEPALFVALTFERREVLDSSNIKPMNLIGVDRGENIPAVIALTDPEGCPLSRFKDSLGNPTHILRIGESYKEKQRTIQAKKEVEQRRAGGYSRKYASKAKNLADDMVRNTARDLLYYAVTQDAMLIFENLSRGFGRQGKRTFMAERQYTRMEDWLTAKLAYEGLPSKTYLSKTLAQYTSKTCSNCGFTITSADYDRVLEKLKKTATGWMTTINGKELKVEGQITYYNRYKRQNVVKDLSVELDRLSEESVNNDISSWTKGRSGEALSLLKKRFSHRPVQEKFVCLNCGFETHADEQAALNIARSWLFLRSQEYKKYQTNKTTGNTDKRAFVETWQSFYRKKLKEVWKPAV

SEQ ID NO: 33558 - protein, 979 aa, synthetic construct
  REGION 1..979: note = engineered CasX variant
QEIKRINKIRRRLVKDSNTKKAGKTGPMKTLLVPVMTPDLRERLENLRKKPENIPQPISNTSRANLNKLLTDYTEMKKAILHVYWEEFQKDPVGLMSRVAQPASKKIDQNKLKPEMDEKGNLTTAGFACSQCGQPLFVYKLEQVSEKGKAYTNYFGRCNVAEHEKLILLAQLKPEKDSDEAVTYSLGKFGQRALDFYSIHVTKESTHPVKPLAQIAGNRYASTPVGKALSDACMGTIASFLSKYQDIIIEHQKVVKGNQKRLESLRELAGKENLEYPSVTLPPQPHTKEGVDAYNEVIARVRMWVNLNLWQKLKLSRDDAKPLLRLKGFPSFPLVERQANAEVDWWDMVCNVKKLINEKKEDGKVFWQNLAGYKRQEALRPYLSSEEDRKKGKKFARYQLGDLLLHLEKKHGEDWGKVYDEAWERIDKKVEGLSKHIKLEEERRSEDAQSKAALTDWLRAKASFVIEGLKEADKDEFCRCELKLQKWYGDLRGKPFAIEAENSILDISGFSKQYNCAFIWQKDGVKKLNLYLIINYFKGGKLRFKKIKPEAFEANRFYTVINKKSGEIVPMEVNFNFDDPNLIILPLAFGKRQGREFIWNDLLSLETGSLKLANGRVIEKTLYNRRTRQDEPALFVALTFERREVLDSSNIKPMNLIGVDRGENIPAVIALTDPEGCPLSRFKDSLGNPTHILRIGESYKEKQRTIQAKKEVEQRRAGGYSRKYASKAKNLADDMVRNTARDLLYYAVTQDAMLIFENLSRGFGRQGKRTFMAERQYTRMEDWLTAKLAYEGLPSKTYLSKTLAQYTSKTCSNCGFTITSADYDRVLEKLKKTATGWMTTINGKELKVEGQITYYNRYKRQNVVKDLSVELDRLSEESVNNDISSWTKGRSGEALSLLKKRFSHRPVQEKFVCLNCGFETHADEQAALNIARSWLFLRSQEYKKYQTNKTTGNTDKRAFVETWQSFYRKKLKEVWKPAV

SEQ ID NO: 33559 - protein, 979 aa, synthetic construct
  REGION 1..979: note = engineered CasX variant
QEIKRINKIRRRLVKDSNTKKAGKTGPMKTLLVPVMTPDLRERLENLRKKPENIPQPISNTSRANLNKLLTDYTEMKKAILHVYWEEFQKDPVGLMSRVAQPASKKIDQNKLKPEMDEKGNLTTAGFACSQCGQPLFVYKLEQVSEKGKAYTNYFGRCNVAEHEKLILLAQLKPEKDSDEAVTYSLGKFGQRALDFYSIHVTKESTHPVKPLAQIAGNRYASAPVGKALSDACMGTIASFLSKYQDIIIEHQKVVKGNQKRLESLRELAGKENLEYPSVTLPPQPHTKEGVDAYNEVIARVRMWVNLNLWQKLKLSRDDAKPLLRLKGFPSFPLVERQANAEVDWWDMVCNVKKLINEKKEDGKVFWQNLAGYKRQEALRPYLSSEEDRKKGKKFARYQLGDLLLHLEKKHGEDWGKVYDEAWERIDKKVEGLSKHIKLEEERRSEDAQSKAALTDWLRAKASFVIEGLKEADKDEFCRCELKLQKWYGDLRGKPFAIEAENSILDISGFSKQYNCAFIWQKDGVKKLNLYLIINYFKGGKLRFKKIKPEAFEANRFYTVINKKSGEIVPMEVNFNFDDPNLIILPLAFGKRQGREFIWNDLLSLETGSLKLANGRVIEKTLYNRRTRQDEPALFVALTFERREVLDSSNIKPMNLIGVDRGENIPAVIALTDPEGCPLSRFKDSLGNPTHILRIGESYKEKQRTIQAKKEVEQRRAGGYSRKYASKAKNLADDMVRNTARDLLYYAVTQDAMLIFENLSRGFGRQGKRTFMAERQYTRMEDWLTAKLAYEGLPSKTYLSKTLAQYTSKTCSNCGFTITSADYDRVLEKLKKTATGWMTTINGKELKVEGQITYYNRYKRQNVVKDLSVELDRLSEESVNNDISSWTKGRSGEALSLLKKRFSHRPVQEKFVCLNCGFETHADEQAALNIARSWLFLRSQEYKKYQTNKTTGNTDKRAFVETWQSFYRKKLKEVWKPAV

SEQ ID NO: 33560 - protein, 979 aa, synthetic construct
  REGION 1..979: note = engineered CasX variant
QEIKRINKIRRRLVKDSNTKKAGKTGPMKTLLVPVMTPDLRERLENLRKKPENIPQPISNTSRANLNKLLTDYTEMKKAILHVYWEEFQKDPVGLMSRVAQPASKKIDQNKLKPEMDEKGNLTTAGFACSQCGQPLFVYKLEQVSEKGKAYTNYFGRCNVAEHEKLILLAQLKPEKDSDEAVTYSLGKFGQRALDFYSIHVTKESTHPVKPLAQIAGNRYASVPVGKALSDACMGTIASFLSKYQDIIIEHQKVVKGNQKRLESLRELAGKENLEYPSVTLPPQPHTKEGVDAYNEVIARVRMWVNLNLWQKLKLSRDDAKPLLRLKGFPSFPLVERQANAEVDWWDMVCNVKKLINEKKEDGKVFWQNLAGYKRQEALRPYLSSEEDRKKGKKFARYQLGDLLLHLEKKHGEDWGKVYDEAWERIDKKVEGLSKHIKLEEERRSEDAQSKAALTDWLRAKASFVIEGLKEADKDEFCRCELKLQKWYGDLRGKPFAIEAENSILDISGFSKQYNCAFIWQKDGVKKLNLYLIINYFKGGKLRFKKIKPEAFEANRFYTVINKKSGEIVPMEVNFNFDDPNLIILPLAFGKRQGREFIWNDLLSLETGSLKLANGRVIEKTLYNRRTRQDEPALFVALTFERREVLDSSNIKPMNLIGVDRGENIPAVIALTDPEGCPLSRFKDSLGNPTHILRIGESYKEKQRTIQAKKEVEQRRAGGYSRKYASKAKNLADDMVRNTARDLLYYAVTQDAMLIFENLSRGFGRQGKRTFMAERQYTRMEDWLTAKLAYEGLPSKTYLSKTLAQYTSKTCSNCGFTITSADYDRVLEKLKKTATGWMTTINGKELKVEGQITYYNRYKRQNVVKDLSVELDRLSEESVNNDISSWTKGRSGEALSLLKKRFSHRPVQEKFVCLNCGFETHADEQAALNIARSWLFLRSQEYKKYQTNKTTGNTDKRAFVETWQSFYRKKLKEVWKPAV

SEQ ID NO: 33561 - protein, 979 aa, synthetic construct
  REGION 1..979: note = engineered CasX variant
QEIKRINKIRRRLVKDSNTKKAGKTGPMKTLLVPVMTPDLRERLENLRKKPENIPQPISNTSRANLNKLLTDYTEMKKAILHVYWEEFQKDPVGLMSRVAQPASKKIDQNKLKPEMDEKGNLTTAGFACSQCGQPLFVYKLEQVSEKGKAYTNYFGRCNVAEHEKLIKLAQLKPEKDSDEAVTYSLGKFGQRALDFYSIHVTKESTHPVKPLAQIAGNRYASGPVGKALSDACMGTIASFLSKYQDIIIEHQKVVKGNQKRLESLRELAGKENLEYPSVTLPPQPHTKEGVDAYNEVIARVRMWVNLNLWQKLKLSRDDAKPLLRLKGFPSFPLVERQANAEVDWWDMVCNVKKLINEKKEDGKVFWQNLAGYKRQEALRPYLSSEEDRKKGKKFARYQLGDLLLHLEKKHGEDWGKVYDEAWERIDKKVEGLSKHIKLEEERRSEDAQSKAALTDWLRAKASFVIEGLKEADKDEFCRCELKLQKWYGDLRGKPFAIEAENSILDISGFSKQYNCAFIWQKDGVKKLNLYLIINYFKGGKLRFKKIKPEAFEANRFYTVINKKSGEIVPMEVNFNFDDPNLIILPLAFGKRQGREFIWNDLLSLETGSLKLANGRVIEKTLYNRRTRQDEPALFVALTFERREVLDSSNIKPMNLIGVDRGENIPAVIALTDPEGCPLSRFKDSLGNPTHILRIGESYKEKQRTIQAKKEVEQRRAGGYSRKYASKAKNLADDMVRNTARDLLYYAVTQDAMLIFENLSRGFGRQGKRTFMAERQYTRMEDWLTAKLAYEGLPSKTYLSKTLAQYTSKTCSNCGFTITSADYDRVLEKLKKTATGWMTTINGKELKVEGQITYYNRYKRQNVVKDLSVELDRLSEESVNNDISSWTKGRSGEALSLLKKRFSHRPVQEKFVCLNCGFETHADEQAALNIARSWLFLRSQEYKKYQTNKTTGNTDKRAFVETWQSFYRKKLKEVWKPAV

SEQ ID NO: 33562 - protein, 978 aa, synthetic construct
  REGION 1..978: note = engineered CasX variant
QEIKRINKIRRRLVKDSNTKKAGKTGPMKTLLVPVMTPDLRERLENLRKKPENIPQPISNTSRANLNKLLTDYTEMKKAILHVYWEEFQKDPVGLMSRVAQPASKKIDQNKLKPEMDEKGNLTTAGFACSQCGQPLFVYKLEQVSEKGKAYTNYFGRCNVAEHEKLILLAQLKPEKDSDEAVTYSLGKFGQRALDFYSIHVTKESTHPVKPLAQIAGNRYASPVGKALSDACMGTIASFLSKYQDIIIEHQKVVKGNQKRLESLRELAGKENLEYPSVTLPPQPHTKEGVDAYNEVIARVRMWVNLNLWQKLKLSRDDAKPLLRLKGFPSFPLVERQANAEVDWWDMVCNVKKLINEKKEDGKVFWQNLAGYKRQEALRPYLSSEEDRKKGKKFARYQLGDLLLHLEKKHGEDWGKVYDEAWERIDKKVEGLSKHIKLEEERRSEDAQSKAALTDWLRAKASFVIEGLKEADKDEFCRCELKLQKWYGDLRGKPFAIEAENSILDISGFSKQYNCAFIWQKDGVKKLNLYLIINYFKGGKLRFKKIKPEAFEANRFYTVINKKSGEIVPMEVNFNFDDPNLIILPLAFGKRQGREFIWNDLLSLETGSLKLANGRVIEKTLYNRRTRQDEPALFVALTFERREVLDSSNIKPMNLIGVDRGENIPAVIALTDPEGCPLSRFKDSLGNPTHILRIGESYKEKQRTIQAKKEVEQRRAGGYSRKYASKAKNLADDMVRNTARDLLYYAVTQDAMLIFENLSRGFGRQGKRTFMAERQYTRMEDWLTAKLAYEGLPSKTYLSKTLAQYTSKTCSNCGFTITSADYDRVLEKLKKTATGWMTTINGKELKVEGQITYYNRYKRQNVVKDLSVELDRLSEESVNNDISSWTKGRSGEALSLLKKRFSHRPVQEKFVCLNCGFETHADEQAALNIARSWLFLRSQEYKKYQTNKTTGNTDKRAFVETWQSFYRKKLKEVWKPAV

SEQ ID NO: 33563 - protein, 978 aa, synthetic construct
  REGION 1..978: note = engineered CasX variant
QEIKRINKIRRRLVKDSNTKKAGKTGPMKTLLVPVMTPDLRERLENLRKKPENIPQPISNTSRANLNKLLTDYTEMKKAILHVYWEEFQKDPVGLMSRVAQPASKKIDQNKLKPEMDEKGNLTTAGFACSQCGQPLFVYKLEQVSEKGKAYTNYFGRCNVAEHEKLILLAQLKPEKDSDEAVTYSLGKFGQRALDFYSIHVTKESTHPVKPLAQIAGNRYASYPVGKALSDACMGTIASFLSKYQDIIIEHQKVVKGNQKRLESLRELAGKENLEYPSVTLPPQPHTKEGVDAYNEVIARVRMWVNLNLWQKLKLSRDDAKPLLRLKGFPSFPLVERQANEVDWWDMVCNVKKLINEKKEDGKVFWQNLAGYKRQEALRPYLSSEEDRKKGKKFARTQLGDLLLHLEKKHGEDWGKVYDEAWERIDKKVEGLSKHIKLEEERRSEDAQSKAALTDWLRAKASFVIEGLKEADKDEFCRCELKLQKWYGDLRGKPFAIEAENSILDISGFSKQYNCAFIWQKDGVKKLNLYLIINYFKGGKLRFKKIKPEAFEANRFYTVINKKSGEIVPMEVNFNFDDPNLIILPLAFGKRQGREFIWNDLLSLETGSLKLANGRVIEKTLYNRRTRQDEPALFVALTFERREVLDSSNIKPMNLIGVDRGENIPAVIALTDPEGCPLSRFKDSLGNPTHILRIGESYKEKQRTIQAKKEVEQRRAGGYSRKYASKAKNLADDMVRNTARDLLYYAVTQDAMLIFENLSRGFGRQGKRTFMAERQYTRMEDWLTAKLAYEGLPSKTYLSKTLAQYTSKTCSNCGFTITSADYDRVLEKLKKTATGWMTTINGKELKVEGQITYYNRYKRQNVVKDLSVELDRLSEESVNNDISSWTKGRSGEALSLLKKRFSHRPVQEKFVCLNCGFETHADEQAALNIARSWLFLRSQEYKKYQTNKTTGNTDKRAFVETWQSFYRKKLKEVWKPAV

SEQ ID NO: 33564 - protein, 978 aa, synthetic construct
  REGION 1..978: note = engineered CasX variant
QEIKRINKIRRRLVKDSNTKKAGKTGPMKTLLVPVMTPDLRERLENLRKKPENIPQPISNTSRANLNKLLTDYTEMKKAILHVYWEEFQKDPVGLMSRVAQPASKKIDQNKLKPEMDEKGNLTTAGFACSQCGQPLFVYKLEQVSEKGKAYTNYFGRCNVAEHEKLILLAQLKPEKDSDEAVTYSLGKFGQRALDFYSIHVTKESTHPVKPLAQIAGNRYASHPVGKALSDACMGTIASFLSKYQDIIIEHQKVVKGNQKRLESLRELAGKENLEYPSVTLPPQPHTKEGVDAYNEVIARVRMWVNLNLWQKLKLSRDDAKPLLRLKGFPSFPLVERQANEVDWWDMVCNVKKLINEKKEDGKVFWQNLAGYKRQEALRPYLSSEEDRKKGKKFARTQLGDLLLHLEKKHGEDWGKVYDEAWERIDKKVEGLSKHIKLEEERRSEDAQSKAALTDWLRAKASFVIEGLKEADKDEFCRCELKLQKWYGDLRGKPFAIEAENSILDISGFSKQYNCAFIWQKDGVKKLNLYLIINYFKGGKLRFKKIKPEAFEANRFYTVINKKSGEIVPMEVNFNFDDPNLIILPLAFGKRQGREFIWNDLLSLETGSLKLANGRVIEKTLYNRRTRQDEPALFVALTFERREVLDSSNIKPMNLIGVDRGENIPAVIALTDPEGCPLSRFKDSLGNPTHILRIGESYKEKQRTIQAKKEVEQRRAGGYSRKYASKAKNLADDMVRNTARDLLYYAVTQDAMLIFENLSRGFGRQGKRTFMAERQYTRMEDWLTAKLAYEGLPSKTYLSKTLAQYTSKTCSNCGFTITSADYDRVLEKLKKTATGWMTTINGKELKVEGQITYYNRYKRQNVVKDLSVELDRLSEESVNNDISSWTKGRSGEALSLLKKRFSHRPVQEKFVCLNCGFETHADEQAALNIARSWLFLRSQEYKKYQTNKTTGNTDKRAFVETWQSFYRKKLKEVWKPAV

SEQ ID NO: 33565 - protein, 978 aa, synthetic construct
  REGION 1..978: note = engineered CasX variant
QEIKRINKIRRRLVKDSNTKKAGKTGPMKTLLVPVMTPDLRERLENLRKKPENIPQPISNTSRANLNKLLTDYTEMKKAILHVYWEEFQKDPVGLMSRVAQPASKKIDQNKLKPEMDEKGNLTTAGFACSQCGQPLFVYKLEQVSEKGKAYTNYFGRCNVAEHEKLILLAQLKPEKDSDEAVTYSLGKFGQRALDFYSIHVTKESTHPVKPLAQIAGNRYASSPVGKALSDACMGTIASFLSKYQDIIIEHQKVVKGNQKRLESLRELAGKENLEYPSVTLPPQPHTKEGVDAYNEVIARVRMWVNLNLWQKLKLSRDDAKPLLRLKGFPSFPLVERQANEVDWWDMVCNVKKLINEKKEDGKVFWQNLAGYKRQEALRPYLSSEEDRKKGKKFARTQLGDLLLHLEKKHGEDWGKVYDEAWERIDKKVEGLSKHIKLEEERRSEDAQSKAALTDWLRAKASFVIEGLKEADKDEFCRCELKLQKWYGDLRGKPFAIEAENSILDISGFSKQYNCAFIWQKDGVKKLNLYLIINYFKGGKLRFKKIKPEAFEANRFYTVINKKSGEIVPMEVNFNFDDPNLIILPLAFGKRQGREFIWNDLLSLETGSLKLANGRVIEKTLYNRRTRQDEPALFVALTFERREVLDSSNIKPMNLIGVDRGENIPAVIALTDPEGCPLSRFKDSLGNPTHILRIGESYKEKQRTIQAKKEVEQRRAGGYSRKYASKAKNLADDMVRNTARDLLYYAVTQDAMLIFENLSRGFGRQGKRTFMAERQYTRMEDWLTAKLAYEGLPSKTYLSKTLAQYTSKTCSNCGFTITSADYDRVLEKLKKTATGWMTTINGKELKVEGQITYYNRYKRQNVVKDLSVELDRLSEESVNNDISSWTKGRSGEALSLLKKRFSHRPVQEKFVCLNCGFETHADEQAALNIARSWLFLRSQEYKKYQTNKTTGNTDKRAFVETWQSFYRKKLKEVWKPAV

SEQ ID NO: 33566 - protein, 978 aa, synthetic construct
  REGION 1..978: note = engineered CasX variant
QEIKRINKIRRRLVKDSNTKKAGKTGPMKTLLVPVMTPDLRERLENLRKKPENIPQPISNTSRANLNKLLTDYTEMKKAILHVYWEEFQKDPVGLMSRVAQPASKKIDQNKLKPEMDEKGNLTTAGFACSQCGQPLFVYKLEQVSEKGKAYTNYFGRCNVAEHEKLILLAQLKPEKDSDEAVTYSLGKFGQRALDFYSIHVTKESTHPVKPLAQIAGNRYASTPVGKALSDACMGTIASFLSKYQDIIIEHQKVVKGNQKRLESLRELAGKENLEYPSVTLPPQPHTKEGVDAYNEVIARVRMWVNLNLWQKLKLSRDDAKPLLRLKGFPSFPLVERQANEVDWWDMVCNVKKLINEKKEDGKVFWQNLAGYKRQEALRPYLSSEEDRKKGKKFARTQLGDLLLHLEKKHGEDWGKVYDEAWERIDKKVEGLSKHIKLEEERRSEDAQSKAALTDWLRAKASFVIEGLKEADKDEFCRCELKLQKWYGDLRGKPFAIEAENSILDISGFSKQYNCAFIWQKDGVKKLNLYLIINYFKGGKLRFKKIKPEAFEANRFYTVINKKSGEIVPMEVNFNFDDPNLIILPLAFGKRQGREFIWNDLLSLETGSLKLANGRVIEKTLYNRRTRQDEPALFVALTFERREVLDSSNIKPMNLIGVDRGENIPAVIALTDPEGCPLSRFKDSLGNPTHILRIGESYKEKQRTIQAKKEVEQRRAGGYSRKYASKAKNLADDMVRNTARDLLYYAVTQDAMLIFENLSRGFGRQGKRTFMAERQYTRMEDWLTAKLAYEGLPSKTYLSKTLAQYTSKTCSNCGFTITSADYDRVLEKLKKTATGWMTTINGKELKVEGQITYYNRYKRQNVVKDLSVELDRLSEESVNNDISSWTKGRSGEALSLLKKRFSHRPVQEKFVCLNCGFETHADEQAALNIARSWLFLRSQEYKKYQTNKTTGNTDKRAFVETWQSFYRKKLKEVWKPAV

SEQ ID NO: 33567 - protein, 978 aa, synthetic construct
  REGION 1..978: note = engineered CasX variant
QEIKRINKIRRRLVKDSNTKKAGKTGPMKTLLVPVMTPDLRERLENLRKKPENIPQPISNTSRANLNKLLTDYTEMKKAILHVYWEEFQKDPVGLMSRVAQPASKKIDQNKLKPEMDEKGNLTTAGFACSQCGQPLFVYKLEQVSEKGKAYTNYFGRCNVAEHEKLILLAQLKPEKDSDEAVTYSLGKFGQRALDFYSIHVTKESTHPVKPLAQIAGNRYASAPVGKALSDACMGTIASFLSKYQDIIIEHQKVVKGNQKRLESLRELAGKENLEYPSVTLPPQPHTKEGVDAYNEVIARVRMWVNLNLWQKLKLSRDDAKPLLRLKGFPSFPLVERQANEVDWWDMVCNVKKLINEKKEDGKVFWQNLAGYKRQEALRPYLSSEEDRKKGKKFARTQLGDLLLHLEKKHGEDWGKVYDEAWERIDKKVEGLSKHIKLEEERRSEDAQSKAALTDWLRAKASFVIEGLKEADKDEFCRCELKLQKWYGDLRGKPFAIEAENSILDISGFSKQYNCAFIWQKDGVKKLNLYLIINYFKGGKLRFKKIKPEAFEANRFYTVINKKSGEIVPMEVNFNFDDPNLIILPLAFGKRQGREFIWNDLLSLETGSLKLANGRVIEKTLYNRRTRQDEPALFVALTFERREVLDSSNIKPMNLIGVDRGENIPAVIALTDPEGCPLSRFKDSLGNPTHILRIGESYKEKQRTIQAKKEVEQRRAGGYSRKYASKAKNLADDMVRNTARDLLYYAVTQDAMLIFENLSRGFGRQGKRTFMAERQYTRMEDWLTAKLAYEGLPSKTYLSKTLAQYTSKTCSNCGFTITSADYDRVLEKLKKTATGWMTTINGKELKVEGQITYYNRYKRQNVVKDLSVELDRLSEESVNNDISSWTKGRSGEALSLLKKRFSHRPVQEKFVCLNCGFETHADEQAALNIARSWLFLRSQEYKKYQTNKTTGNTDKRAFVETWQSFYRKKLKEVWKPAV

SEQ ID NO: 33568 - protein, 978 aa, synthetic construct
  REGION 1..978: note = engineered CasX variant
QEIKRINKIRRRLVKDSNTKKAGKTGPMKTLLVPVMTPDLRERLENLRKKPENIPQPISNTSRANLNKLLTDYTEMKKAILHVYWEEFQKDPVGLMSRVAQPASKKIDQNKLKPEMDEKGNLTTAGFACSQCGQPLFVYKLEQVSEKGKAYTNYFGRCNVAEHEKLILLAQLKPEKDSDEAVTYSLGKFGQRALDFYSIHVTKESTHPVKPLAQIAGNRYASVPVGKALSDACMGTIASFLSKYQDIIIEHQKVVKGNQKRLESLRELAGKENLEYPSVTLPPQPHTKEGVDAYNEVIARVRMWVNLNLWQKLKLSRDDAKPLLRLKGFPSFPLVERQANEVDWWDMVCNVKKLINEKKEDGKVFWQNLAGYKRQEALRPYLSSEEDRKKGKKFARTQLGDLLLHLEKKHGEDWGKVYDEAWERIDKKVEGLSKHIKLEEERRSEDAQSKAALTDWLRAKASFVIEGLKEADKDEFCRCELKLQKWYGDLRGKPFAIEAENSILDISGFSKQYNCAFIWQKDGVKKLNLYLIINYFKGGKLRFKKIKPEAFEANRFYTVINKKSGEIVPMEVNFNFDDPNLIILPLAFGKRQGREFIWNDLLSLETGSLKLANGRVIEKTLYNRRTRQDEPALFVALTFERREVLDSSNIKPMNLIGVDRGENIPAVIALTDPEGCPLSRFKDSLGNPTHILRIGESYKEKQRTIQAKKEVEQRRAGGYSRKYASKAKNLADDMVRNTARDLLYYAVTQDAMLIFENLSRGFGRQGKRTFMAERQYTRMEDWLTAKLAYEGLPSKTYLSKTLAQYTSKTCSNCGFTITSADYDRVLEKLKKTATGWMTTINGKELKVEGQITYYNRYKRQNVVKDLSVELDRLSEESVNNDISSWTKGRSGEALSLLKKRFSHRPVQEKFVCLNCGFETHADEQAALNIARSWLFLRSQEYKKYQTNKTTGNTDKRAFVETWQSFYRKKLKEVWKPAV

SEQ ID NO: 33569 - protein, 978 aa, synthetic construct
  REGION 1..978: note = engineered CasX variant
QEIKRINKIRRRLVKDSNTKKAGKTGPMKTLLVPVMTPDLRERLENLRKKPENIPQPISNTSRANLNKLLTDYTEMKKAILHVYWEEFQKDPVGLMSRVAQPASKKIDQNKLKPEMDEKGNLTTAGFACSQCGQPLFVYKLEQVSEKGKAYTNYFGRCNVAEHEKLIKLAQLKPEKDSDEAVTYSLGKFGQRALDFYSIHVTKESTHPVKPLAQIAGNRYASGPVGKALSDACMGTIASFLSKYQDIIIEHQKVVKGNQKRLESLRELAGKENLEYPSVTLPPQPHTKEGVDAYNEVIARVRMWVNLNLWQKLKLSRDDAKPLLRLKGFPSFPLVERQANEVDWWDMVCNVKKLINEKKEDGKVFWQNLAGYKRQEALRPYLSSEEDRKKGKKFARTQLGDLLLHLEKKHGEDWGKVYDEAWERIDKKVEGLSKHIKLEEERRSEDAQSKAALTDWLRAKASFVIEGLKEADKDEFCRCELKLQKWYGDLRGKPFAIEAENSILDISGFSKQYNCAFIWQKDGVKKLNLYLIINYFKGGKLRFKKIKPEAFEANRFYTVINKKSGEIVPMEVNFNFDDPNLIILPLAFGKRQGREFIWNDLLSLETGSLKLANGRVIEKTLYNRRTRQDEPALFVALTFERREVLDSSNIKPMNLIGVDRGENIPAVIALTDPEGCPLSRFKDSLGNPTHILRIGESYKEKQRTIQAKKEVEQRRAGGYSRKYASKAKNLADDMVRNTARDLLYYAVTQDAMLIFENLSRGFGRQGKRTFMAERQYTRMEDWLTAKLAYEGLPSKTYLSKTLAQYTSKTCSNCGFTITSADYDRVLEKLKKTATGWMTTINGKELKVEGQITYYNRYKRQNVVKDLSVELDRLSEESVNNDISSWTKGRSGEALSLLKKRFSHRPVQEKFVCLNCGFETHADEQAALNIARSWLFLRSQEYKKYQTNKTTGNTDKRAFVETWQSFYRKKLKEVWKPAV

SEQ ID NO: 33570 - protein, 977 aa, synthetic construct
  REGION 1..977: note = engineered CasX variant
QEIKRINKIRRRLVKDSNTKKAGKTGPMKTLLVPVMTPDLRERLENLRKKPENIPQPISNTSRANLNKLLTDYTEMKKAILHVYWEEFQKDPVGLMSRVAQPASKKIDQNKLKPEMDEKGNLTTAGFACSQCGQPLFVYKLEQVSEKGKAYTNYFGRCNVAEHEKLILLAQLKPEKDSDEAVTYSLGKFGQRALDFYSIHVTKESTHPVKPLAQIAGNRYASPVGKALSDACMGTIASFLSKYQDIIIEHQKVVKGNQKRLESLRELAGKENLEYPSVTLPPQPHTKEGVDAYNEVIARVRMWVNLNLWQKLKLSRDDAKPLLRLKGFPSFPLVERQANEVDWWDMVCNVKKLINEKKEDGKVFWQNLAGYKRQEALRPYLSSEEDRKKGKKFARTQLGDLLLHLEKKHGEDWGKVYDEAWERIDKKVEGLSKHIKLEEERRSEDAQSKAALTDWLRAKASFVIEGLKEADKDEFCRCELKLQKWYGDLRGKPFAIEAENSILDISGFSKQYNCAFIWQKDGVKKLNLYLIINYFKGGKLRFKKIKPEAFEANRFYTVINKKSGEIVPMEVNFNFDDPNLIILPLAFGKRQGREFIWNDLLSLETGSLKLANGRVIEKTLYNRRTRQDEPALFVALTFERREVLDSSNIKPMNLIGVDRGENIPAVIALTDPEGCPLSRFKDSLGNPTHILRIGESYKEKQRTIQAKKEVEQRRAGGYSRKYASKAKNLADDMVRNTARDLLYYAVTQDAMLIFENLSRGFGRQGKRTFMAERQYTRMEDWLTAKLAYEGLPSKTYLSKTLAQYTSKTCSNCGFTITSADYDRVLEKLKKTATGWMTTINGKELKVEGQITYYNRYKRQNVVKDLSVELDRLSEESVNNDISSWTKGRSGEALSLLKKRFSHRPVQEKFVCLNCGFETHADEQAALNIARSWLFLRSQEYKKYQTNKTTGNTDKRAFVETWQSFYRKKLKEVWKPAV

SEQ ID NO: 33571 - protein, 979 aa, synthetic construct
  REGION 1..979: note = engineered CasX variant
QEIKRINKIRRRLVKDSNTKKAGKTGPMKTLLVPVMTPDLRERLENLRKKPENIPQPISNTSRANLNKLLTDYTEMKKAILHVYWEEFQKDPVGLMSRVAQPASKKIDQNKLKPEMDEKGNLTTAGFACSQCGQPLFVYKLEQVSEKGKAYTNYFGRCNVAEHEKLILLAQLKPEKDSDEAVTYSLGKFGQRALDFYSIHVTKESTHPVKPLAQIAGNRYASYPVGKALSDACMGTIASFLSKYQDIIIEHQKVVKGNQKRLESLRELAGKENLEYPSVTLPPQPHTKEGVDAYNEVIARVRMWVNLNLWQKLKLSRDDAKPLLRLKGFPSFPLVERQANEVDWWDMVCNVKKLINEKKEDGKVFWQNLAGYKRQEALRPYLSSEEDRKKGKKFARYQLGDLLLHLEKKHEGEDWGKVYDEAWERIDKKVEGLSKHIKLEEERRSEDAQSKAALTDWLRAKASFVIEGLKEADKDEFCRCELKLQKWYGDLRGKPFAIEAENSILDISGFSKQYNCAFIWQKDGVKKLNLYLIINYFKGGKLRFKKIKPEAFEANRFYTVINKKSGEIVPMEVNFNFDDPNLIILPLAFGKRQGREFIWNDLLSLETGSLKLANGRVIEKTLYNRRTRQDEPALFVALTFERREVLDSSNIKPMNLIGVDRGENIPAVIALTDPEGCPLSRFKDSLGNPTHILRIGESYKEKQRTIQAKKEVEQRRAGGYSRKYASKAKNLADDMVRNTARDLLYYAVTQDAMLIFENLSRGFGRQGKRTFMAERQYTRMEDWLTAKLAYEGLPSKTYLSKTLAQYTSKTCSNCGFTITSADYDRVLEKLKKTATGWMTTINGKELKVEGQITYYNRYKRQNVVKDLSVELDRLSEESVNNDISSWTKGRSGEALSLLKKRFSHRPVQEKFVCLNCGFETHADEQAALNIARSWLFLRSQEYKKYQTNKTTGNTDKRAFVETWQSFYRKKLKEVWKPAV

SEQ ID NO: 33572 - protein, 979 aa, synthetic construct
  REGION 1..979: note = engineered CasX variant
QEIKRINKIRRRLVKDSNTKKAGKTGPMKTLLVPVMTPDLRERLENLRKKPENIPQPISNTSRANLNKLLTDYTEMKKAILHVYWEEFQKDPVGLMSRVAQPASKKIDQNKLKPEMDEKGNLTTAGFACSQCGQPLFVYKLEQVSEKGKAYTNYFGRCNVAEHEKLILLAQLKPEKDSDEAVTYSLGKFGQRALDFYSIHVTKESTHPVKPLAQIAGNRYASHPVGKALSDACMGTIASFLSKYQDIIIEHQKVVKGNQKRLESLRELAGKENLEYPSVTLPPQPHTKEGVDAYNEVIARVRMWVNLNLWQKLKLSRDDAKPLLRLKGFPSFPLVERQANEVDWWDMVCNVKKLINEKKEDGKVFWQNLAGYKRQEALRPYLSSEEDRKKGKKFARYQLGDLLLHLEKKHEGEDWGKVYDEAWERIDKKVEGLSKHIKLEEERRSEDAQSKAALTDWLRAKASFVIEGLKEADKDEFCRCELKLQKWYGDLRGKPFAIEAENSILDISGFSKQYNCAFIWQKDGVKKLNLYLIINYFKGGKLRFKKIKPEAFEANRFYTVINKKSGEIVPMEVNFNFDDPNLIILPLAFGKRQGREFIWNDLLSLETGSLKLANGRVIEKTLYNRRTRQDEPALFVALTFERREVLDSSNIKPMNLIGVDRGENIPAVIALTDPEGCPLSRFKDSLGNPTHILRIGESYKEKQRTIQAKKEVEQRRAGGYSRKYASKAKNLADDMVRNTARDLLYYAVTQDAMLIFENLSRGFGRQGKRTFMAERQYTRMEDWLTAKLAYEGLPSKTYLSKTLAQYTSKTCSNCGFTITSADYDRVLEKLKKTATGWMTTINGKELKVEGQITYYNRYKRQNVVKDLSVELDRLSEESVNNDISSWTKGRSGEALSLLKKRFSHRPVQEKFVCLNCGFETHADEQAALNIARSWLFLRSQEYKKYQTNKTTGNTDKRAFVETWQSFYRKKLKEVWKPAV

SEQ ID NO: 33573 - protein, 979 aa, synthetic construct
  REGION 1..979: note = engineered CasX variant
QEIKRINKIRRRLVKDSNTKKAGKTGPMKTLLVPVMTPDLRERLENLRKKPENIPQPISNTSRANLNKLLTDYTEMKKAILHVYWEEFQKDPVGLMSRVAQPASKKIDQNKLKPEMDEKGNLTTAGFACSQCGQPLFVYKLEQVSEKGKAYTNYFGRCNVAEHEKLILLAQLKPEKDSDEAVTYSLGKFGQRALDFYSIHVTKESTHPVKPLAQIAGNRYASSPVGKALSDACMGTIASFLSKYQDIIIEHQKVVKGNQKRLESLRELAGKENLEYPSVTLPPQPHTKEGVDAYNEVIARVRMWVNLNLWQKLKLSRDDAKPLLRLKGFPSFPLVERQANEVDWWDMVCNVKKLINEKKEDGKVFWQNLAGYKRQEALRPYLSSEEDRKKGKKFARYQLGDLLLHLEKKHEGEDWGKVYDEAWERIDKKVEGLSKHIKLEEERRSEDAQSKAALTDWLRAKASFVIEGLKEADKDEFCRCELKLQKWYGDLRGKPFAIEAENSILDISGFSKQYNCAFIWQKDGVKKLNLYLIINYFKGGKLRFKKIKPEAFEANRFYTVINKKSGEIVPMEVNFNFDDPNLIILPLAFGKRQGREFIWNDLLSLETGSLKLANGRVIEKTLYNRRTRQDEPALFVALTFERREVLDSSNIKPMNLIGVDRGENIPAVIALTDPEGCPLSRFKDSLGNPTHILRIGESYKEKQRTIQAKKEVEQRRAGGYSRKYASKAKNLADDMVRNTARDLLYYAVTQDAMLIFENLSRGFGRQGKRTFMAERQYTRMEDWLTAKLAYEGLPSKTYLSKTLAQYTSKTCSNCGFTITSADYDRVLEKLKKTATGWMTTINGKELKVEGQITYYNRYKRQNVVKDLSVELDRLSEESVNNDISSWTKGRSGEALSLLKKRFSHRPVQEKFVCLNCGFETHADEQAALNIARSWLFLRSQEYKKYQTNKTTGNTDKRAFVETWQSFYRKKLKEVWKPAV

SEQ ID NO: 33574 - protein, 979 aa, synthetic construct
  REGION 1..979: note = engineered CasX variant
QEIKRINKIRRRLVKDSNTKKAGKTGPMKTLLVPVMTPDLRERLENLRKKPENIPQPISNTSRANLNKLLTDYTEMKKAILHVYWEEFQKDPVGLMSRVAQPASKKIDQNKLKPEMDEKGNLTTAGFACSQCGQPLFVYKLEQVSEKGKAYTNYFGRCNVAEHEKLILLAQLKPEKDSDEAVTYSLGKFGQRALDFYSIHVTKESTHPVKPLAQIAGNRYASTPVGKALSDACMGTIASFLSKYQDIIIEHQKVVKGNQKRLESLRELAGKENLEYPSVTLPPQPHTKEGVDAYNEVIARVRMWVNLNLWQKLKLSRDDAKPLLRLKGFPSFPLVERQANEVDWWDMVCNVKKLINEKKEDGKVFWQNLAGYKRQEALRPYLSSEEDRKKGKKFARYQLGDLLLHLEKKHEGEDWGKVYDEAWERIDKKVEGLSKHIKLEEERRSEDAQSKAALTDWLRAKASFVIEGLKEADKDEFCRCELKLQKWYGDLRGKPFAIEAENSILDISGFSKQYNCAFIWQKDGVKKLNLYLIINYFKGGKLRFKKIKPEAFEANRFYTVINKKSGEIVPMEVNFNFDDPNLIILPLAFGKRQGREFIWNDLLSLETGSLKLANGRVIEKTLYNRRTRQDEPALFVALTFERREVLDSSNIKPMNLIGVDRGENIPAVIALTDPEGCPLSRFKDSLGNPTHILRIGESYKEKQRTIQAKKEVEQRRAGGYSRKYASKAKNLADDMVRNTARDLLYYAVTQDAMLIFENLSRGFGRQGKRTFMAERQYTRMEDWLTAKLAYEGLPSKTYLSKTLAQYTSKTCSNCGFTITSADYDRVLEKLKKTATGWMTTINGKELKVEGQITYYNRYKRQNVVKDLSVELDRLSEESVNNDISSWTKGRSGEALSLLKKRFSHRPVQEKFVCLNCGFETHADEQAALNIARSWLFLRSQEYKKYQTNKTTGNTDKRAFVETWQSFYRKKLKEVWKPAV

SEQ ID NO: 33575 - protein, 979 aa, synthetic construct
  REGION 1..979: note = engineered CasX variant
QEIKRINKIRRRLVKDSNTKKAGKTGPMKTLLVPVMTPDLRERLENLRKKPENIPQPISNTSRANLNKLLTDYTEMKKAILHVYWEEFQKDPVGLMSRVAQPASKKIDQNKLKPEMDEKGNLTTAGFACSQCGQPLFVYKLEQVSEKGKAYTNYFGRCNVAEHEKLILLAQLKPEKDSDEAVTYSLGKFGQRALDFYSIHVTKESTHPVKPLAQIAGNRYASAPVGKALSDACMGTIASFLSKYQDIIIEHQKVVKGNQKRLESLRELAGKENLEYPSVTLPPQPHTKEGVDAYNEVIARVRMWVNLNLWQKLKLSRDDAKPLLRLKGFPSFPLVERQANEVDWWDMVCNVKKLINEKKEDGKVFWQNLAGYKRQEALRPYLSSEEDRKKGKKFARYQLGDLLLHLEKKHEGEDWGKVYDEAWERIDKKVEGLSKHIKLEEERRSEDAQSKAALTDWLRAKASFVIEGLKEADKDEFCRCELKLQKWYGDLRGKPFAIEAENSILDISGFSKQYNCAFIWQKDGVKKLNLYLIINYFKGGKLRFKKIKPEAFEANRFYTVINKKSGEIVPMEVNFNFDDPNLIILPLAFGKRQGREFIWNDLLSLETGSLKLANGRVIEKTLYNRRTRQDEPALFVALTFERREVLDSSNIKPMNLIGVDRGENIPAVIALTDPEGCPLSRFKDSLGNPTHILRIGESYKEKQRTIQAKKEVEQRRAGGYSRKYASKAKNLADDMVRNTARDLLYYAVTQDAMLIFENLSRGFGRQGKRTFMAERQYTRMEDWLTAKLAYEGLPSKTYLSKTLAQYTSKTCSNCGFTITSADYDRVLEKLKKTATGWMTTINGKELKVEGQITYYNRYKRQNVVKDLSVELDRLSEESVNNDISSWTKGRSGEALSLLKKRFSHRPVQEKFVCLNCGFETHADEQAALNIARSWLFLRSQEYKKYQTNKTTGNTDKRAFVETWQSFYRKKLKEVWKPAV

SEQ ID NO: 33576 - protein, 979 aa, synthetic construct
  REGION 1..979: note = engineered CasX variant
QEIKRINKIRRRLVKDSNTKKAGKTGPMKTLLVPVMTPDLRERLENLRKKPENIPQPISNTSRANLNKLLTDYTEMKKAILHVYWEEFQKDPVGLMSRVAQPASKKIDQNKLKPEMDEKGNLTTAGFACSQCGQPLFVYKLEQVSEKGKAYTNYFGRCNVAEHEKLILLAQLKPEKDSDEAVTYSLGKFGQRALDFYSIHVTKESTHPVKPLAQIAGNRYASVPVGKALSDACMGTIASFLSKYQDIIIEHQKVVKGNQKRLESLRELAGKENLEYPSVTLPPQPHTKEGVDAYNEVIARVRMWVNLNLWQKLKLSRDDAKPLLRLKGFPSFPLVERQANEVDWWDMVCNVKKLINEKKEDGKVFWQNLAGYKRQEALRPYLSSEEDRKKGKKFARYQLGDLLLHLEKKHEGEDWGKVYDEAWERIDKKVEGLSKHIKLEEERRSEDAQSKAALTDWLRAKASFVIEGLKEADKDEFCRCELKLQKWYGDLRGKPFAIEAENSILDISGFSKQYNCAFIWQKDGVKKLNLYLIINYFKGGKLRFKKIKPEAFEANRFYTVINKKSGEIVPMEVNFNFDDPNLIILPLAFGKRQGREFIWNDLLSLETGSLKLANGRVIEKTLYNRRTRQDEPALFVALTFERREVLDSSNIKPMNLIGVDRGENIPAVIALTDPEGCPLSRFKDSLGNPTHILRIGESYKEKQRTIQAKKEVEQRRAGGYSRKYASKAKNLADDMVRNTARDLLYYAVTQDAMLIFENLSRGFGRQGKRTFMAERQYTRMEDWLTAKLAYEGLPSKTYLSKTLAQYTSKTCSNCGFTITSADYDRVLEKLKKTATGWMTTINGKELKVEGQITYYNRYKRQNVVKDLSVELDRLSEESVNNDISSWTKGRSGEALSLLKKRFSHRPVQEKFVCLNCGFETHADEQAALNIARSWLFLRSQEYKKYQTNKTTGNTDKRAFVETWQSFYRKKLKEVWKPAV

SEQ ID NO: 33577 - protein, 979 aa, synthetic construct
  REGION 1..979: note = engineered CasX variant
QEIKRINKIRRRLVKDSNTKKAGKTGPMKTLLVPVMTPDLRERLENLRKKPENIPQPISNTSRANLNKLLTDYTEMKKAILHVYWEEFQKDPVGLMSRVAQPASKKIDQNKLKPEMDEKGNLTTAGFACSQCGQPLFVYKLEQVSEKGKAYTNYFGRCNVAEHEKLIKLAQLKPEKDSDEAVTYSLGKFGQRALDFYSIHVTKESTHPVKPLAQIAGNRYASGPVGKALSDACMGTIASFLSKYQDIIIEHQKVVKGNQKRLESLRELAGKENLEYPSVTLPPQPHTKEGVDAYNEVIARVRMWVNLNLWQKLKLSRDDAKPLLRLKGFPSFPLVERQANEVDWWDMVCNVKKLINEKKEDGKVFWQNLAGYKRQEALRPYLSSEEDRKKGKKFARYQLGDLLLHLEKKHEGEDWGKVYDEAWERIDKKVEGLSKHIKLEEERRSEDAQSKAALTDWLRAKASFVIEGLKEADKDEFCRCELKLQKWYGDLRGKPFAIEAENSILDISGFSKQYNCAFIWQKDGVKKLNLYLIINYFKGGKLRFKKIKPEAFEANRFYTVINKKSGEIVPMEVNFNFDDPNLIILPLAFGKRQGREFIWNDLLSLETGSLKLANGRVIEKTLYNRRTRQDEPALFVALTFERREVLDSSNIKPMNLIGVDRGENIPAVIALTDPEGCPLSRFKDSLGNPTHILRIGESYKEKQRTIQAKKEVEQRRAGGYSRKYASKAKNLADDMVRNTARDLLYYAVTQDAMLIFENLSRGFGRQGKRTFMAERQYTRMEDWLTAKLAYEGLPSKTYLSKTLAQYTSKTCSNCGFTITSADYDRVLEKLKKTATGWMTTINGKELKVEGQITYYNRYKRQNVVKDLSVELDRLSEESVNNDISSWTKGRSGEALSLLKKRFSHRPVQEKFVCLNCGFETHADEQAALNIARSWLFLRSQEYKKYQTNKTTGNTDKRAFVETWQSFYRKKLKEVWKPAV

SEQ ID NO: 33578 - protein, 978 aa, synthetic construct
  REGION 1..978: note = engineered CasX variant
QEIKRINKIRRRLVKDSNTKKAGKTGPMKTLLVPVMTPDLRERLENLRKKPENIPQPISNTSRANLNKLLTDYTEMKKAILHVYWEEFQKDPVGLMSRVAQPASKKIDQNKLKPEMDEKGNLTTAGFACSQCGQPLFVYKLEQVSEKGKAYTNYFGRCNVAEHEKLILLAQLKPEKDSDEAVTYSLGKFGQRALDFYSIHVTKESTHPVKPLAQIAGNRYASPVGKALSDACMGTIASFLSKYQDIIIEHQKVVKGNQKRLESLRELAGKENLEYPSVTLPPQPHTKEGVDAYNEVIARVRMWVNLNLWQKLKLSRDDAKPLLRLKGFPSFPLVERQANEVDWWDMVCNVKKLINEKKEDGKVFWQNLAGYKRQEALRPYLSSEEDRKKGKKFARYQLGDLLLHLEKKHEGEDWGKVYDEAWERIDKKVEGLSKHIKLEEERRSEDAQSKAALTDWLRAKASFVIEGLKEADKDEFCRCELKLQKWYGDLRGKPFAIEAENSILDISGFSKQYNCAFIWQKDGVKKLNLYLIINYFKGGKLRFKKIKPEAFEANRFYTVINKKSGEIVPMEVNFNFDDPNLIILPLAFGKRQGREFIWNDLLSLETGSLKLANGRVIEKTLYNRRTRQDEPALFVALTFERREVLDSSNIKPMNLIGVDRGENIPAVIALTDPEGCPLSRFKDSLGNPTHILRIGESYKEKQRTIQAKKEVEQRRAGGYSRKYASKAKNLADDMVRNTARDLLYYAVTQDAMLIFENLSRGFGRQGKRTFMAERQYTRMEDWLTAKLAYEGLPSKTYLSKTLAQYTSKTCSNCGFTITSADYDRVLEKLKKTATGWMTTINGKELKVEGQITYYNRYKRQNVVKDLSVELDRLSEESVNNDISSWTKGRSGEALSLLKKRFSHRPVQEKFVCLNCGFETHADEQAALNIARSWLFLRSQEYKKYQTNKTTGNTDKRAFVETWQSFYRKKLKEVWKPAV

SEQ ID NO: 33579 - protein, 978 aa, synthetic construct
  REGION 1..978: note = engineered CasX variant
QEIKRINKIRRRLVKDSNTKKAGKTGPMKTLLVPVMTPDLRERLENLRKKPENIPQPISNTSRANLNKLLTDYTEMKKAILHVYWEEFQKDPVGLMSRVAQPASKKIDQNKLKPEMDEKGNLTTAGFACSQCGQPLFVYKLEQVSEKGKAYTNYFGRCNVAEHEKLILLAQLKPEKDSDEAVTYSLGKFGQRALDFYSIHVTKESTHPVKPLAQIAGNRYASYPVGKALSDACMGTIASFLSKYQDIIIEHQKVVKGNQKRLESLRELAGKENLEYPSVTLPPQPHTKEGVDAYNEVIARVRMWVNLNLWQKLKLSRDDAKPLLRLKGFPSFPLVERQANEVDWWDMVCNVKKLINEKKEDGKVFWQNLAGYKRQEALRPYLSSEEDRKKGKKFARYQLGDLLLHLEKKHGEDWGKVYDEAWERIDKKVEGLSKHIKLEEERRSEDAQSKAALTDWLRAKASFVIEGLKEADKDEFCRCDLKLQKWYGDLRGKPFAIEAENSILDISGFSKQYNCAFIWQKDGVKKLNLYLIINYFKGGKLRFKKIKPEAFEANRFYTVINKKSGEIVPMEVNFNFDDPNLIILPLAFGKRQGREFIWNDLLSLETGSLKLANGRVIEKTLYNRRTRQDEPALFVALTFERREVLDSSNIKPMNLIGVDRGENIPAVIALTDPEGCPLSRFKDSLGNPTHILRIGESYKEKQRTIQAKKEVEQRRAGGYSRKYASKAKNLADDMVRNTARDLLYYAVTQDAMLIFENLSRGFGRQGKRTFMAERQYTRMEDWLTAKLAYEGLPSKTYLSKTLAQYTSKTCSNCGFTITSADYDRVLEKLKKTATGWMTTINGKELKVEGQITYYNRYKRQNVVKDLSVELDRLSEESVNNDISSWTKGRSGEALSLLKKRFSHRPVQEKFVCLNCGFETHADEQAALNIARSWLFLRSQEYKKYQTNKTTGNTDKRAFVETWQSFYRKKLKEVWKPAV

SEQ ID NO: 33580 - protein, 978 aa, synthetic construct
  REGION 1..978: note = engineered CasX variant
QEIKRINKIRRRLVKDSNTKKAGKTGPMKTLLVPVMTPDLRERLENLRKKPENIPQPISNTSRANLNKLLTDYTEMKKAILHVYWEEFQKDPVGLMSRVAQPASKKIDQNKLKPEMDEKGNLTTAGFACSQCGQPLFVYKLEQVSEKGKAYTNYFGRCNVAEHEKLILLAQLKPEKDSDEAVTYSLGKFGQRALDFYSIHVTKESTHPVKPLAQIAGNRYASHPVGKALSDACMGTIASFLSKYQDIIIEHQKVVKGNQKRLESLRELAGKENLEYPSVTLPPQPHTKEGVDAYNEVIARVRMWVNLNLWQKLKLSRDDAKPLLRLKGFPSFPLVERQANEVDWWDMVCNVKKLINEKKEDGKVFWQNLAGYKRQEALRPYLSSEEDRKKGKKFARYQLGDLLLHLEKKHGEDWGKVYDEAWERIDKKVEGLSKHIKLEEERRSEDAQSKAALTDWLRAKASFVIEGLKEADKDEFCRCDLKLQKWYGDLRGKPFAIEAENSILDISGFSKQYNCAFIWQKDGVKKLNLYLIINYFKGGKLRFKKIKPEAFEANRFYTVINKKSGEIVPMEVNFNFDDPNLIILPLAFGKRQGREFIWNDLLSLETGSLKLANGRVIEKTLYNRRTRQDEPALFVALTFERREVLDSSNIKPMNLIGVDRGENIPAVIALTDPEGCPLSRFKDSLGNPTHILRIGESYKEKQRTIQAKKEVEQRRAGGYSRKYASKAKNLADDMVRNTARDLLYYAVTQDAMLIFENLSRGFGRQGKRTFMAERQYTRMEDWLTAKLAYEGLPSKTYLSKTLAQYTSKTCSNCGFTITSADYDRVLEKLKKTATGWMTTINGKELKVEGQITYYNRYKRQNVVKDLSVELDRLSEESVNNDISSWTKGRSGEALSLLKKRFSHRPVQEKFVCLNCGFETHADEQAALNIARSWLFLRSQEYKKYQTNKTTGNTDKRAFVETWQSFYRKKLKEVWKPAV

SEQ ID NO: 33581 - protein, 978 aa, synthetic construct
  REGION 1..978: note = engineered CasX variant
QEIKRINKIRRRLVKDSNTKKAGKTGPMKTLLVPVMTPDLRERLENLRKKPENIPQPISNTSRANLNKLLTDYTEMKKAILHVYWEEFQKDPVGLMSRVAQPASKKIDQNKLKPEMDEKGNLTTAGFACSQCGQPLFVYKLEQVSEKGKAYTNYFGRCNVAEHEKLILLAQLKPEKDSDEAVTYSLGKFGQRALDFYSIHVTKESTHPVKPLAQIAGNRYASSPVGKALSDACMGTIASFLSKYQDIIIEHQKVVKGNQKRLESLRELAGKENLEYPSVTLPPQPHTKEGVDAYNEVIARVRMWVNLNLWQKLKLSRDDAKPLLRLKGFPSFPLVERQANEVDWWDMVCNVKKLINEKKEDGKVFWQNLAGYKRQEALRPYLSSEEDRKKGKKFARYQLGDLLLHLEKKHGEDWGKVYDEAWERIDKKVEGLSKHIKLEEERRSEDAQSKAALTDWLRAKASFVIEGLKEADKDEFCRCDLKLQKWYGDLRGKPFAIEAENSILDISGFSKQYNCAFIWQKDGVKKLNLYLIINYFKGGKLRFKKIKPEAFEANRFYTVINKKSGEIVPMEVNFNFDDPNLIILPLAFGKRQGREFIWNDLLSLETGSLKLANGRVIEKTLYNRRTRQDEPALFVALTFERREVLDSSNIKPMNLIGVDRGENIPAVIALTDPEGCPLSRFKDSLGNPTHILRIGESYKEKQRTIQAKKEVEQRRAGGYSRKYASKAKNLADDMVRNTARDLLYYAVTQDAMLIFENLSRGFGRQGKRTFMAERQYTRMEDWLTAKLAYEGLPSKTYLSKTLAQYTSKTCSNCGFTITSADYDRVLEKLKKTATGWMTTINGKELKVEGQITYYNRYKRQNVVKDLSVELDRLSEESVNNDISSWTKGRSGEALSLLKKRFSHRPVQEKFVCLNCGFETHADEQAALNIARSWLFLRSQEYKKYQTNKTTGNTDKRAFVETWQSFYRKKLKEVWKPAV

SEQ ID NO: 33582 - protein, 978 aa, synthetic construct
  REGION 1..978: note = engineered CasX variant
QEIKRINKIRRRLVKDSNTKKAGKTGPMKTLLVPVMTPDLRERLENLRKKPENIPQPISNTSRANLNKLLTDYTEMKKAILHVYWEEFQKDPVGLMSRVAQPASKKIDQNKLKPEMDEKGNLTTAGFACSQCGQPLFVYKLEQVSEKGKAYTNYFGRCNVAEHEKLILLAQLKPEKDSDEAVTYSLGKFGQRALDFYSIHVTKESTHPVKPLAQIAGNRYASTPVGKALSDACMGTIASFLSKYQDIIIEHQKVVKGNQKRLESLRELAGKENLEYPSVTLPPQPHTKEGVDAYNEVIARVRMWVNLNLWQKLKLSRDDAKPLLRLKGFPSFPLVERQANEVDWWDMVCNVKKLINEKKEDGKVFWQNLAGYKRQEALRPYLSSEEDRKKGKKFARYQLGDLLLHLEKKHGEDWGKVYDEAWERIDKKVEGLSKHIKLEEERRSEDAQSKAALTDWLRAKASFVIEGLKEADKDEFCRCDLKLQKWYGDLRGKPFAIEAENSILDISGFSKQYNCAFIWQKDGVKKLNLYLIINYFKGGKLRFKKIKPEAFEANRFYTVINKKSGEIVPMEVNFNFDDPNLIILPLAFGKRQGREFIWNDLLSLETGSLKLANGRVIEKTLYNRRTRQDEPALFVALTFERREVLDSSNIKPMNLIGVDRGENIPAVIALTDPEGCPLSRFKDSLGNPTHILRIGESYKEKQRTIQAKKEVEQRRAGGYSRKYASKAKNLADDMVRNTARDLLYYAVTQDAMLIFENLSRGFGRQGKRTFMAERQYTRMEDWLTAKLAYEGLPSKTYLSKTLAQYTSKTCSNCGFTITSADYDRVLEKLKKTATGWMTTINGKELKVEGQITYYNRYKRQNVVKDLSVELDRLSEESVNNDISSWTKGRSGEALSLLKKRFSHRPVQEKFVCLNCGFETHADEQAALNIARSWLFLRSQEYKKYQTNKTTGNTDKRAFVETWQSFYRKKLKEVWKPAV

SEQ ID NO: 33583 - protein, 978 aa, synthetic construct
  REGION 1..978: note = engineered CasX variant
QEIKRINKIRRRLVKDSNTKKAGKTGPMKTLLVPVMTPDLRERLENLRKKPENIPQPISNTSRANLNKLLTDYTEMKKAILHVYWEEFQKDPVGLMSRVAQPASKKIDQNKLKPEMDEKGNLTTAGFACSQCGQPLFVYKLEQVSEKGKAYTNYFGRCNVAEHEKLILLAQLKPEKDSDEAVTYSLGKFGQRALDFYSIHVTKESTHPVKPLAQIAGNRYASAPVGKALSDACMGTIASFLSKYQDIIIEHQKVVKGNQKRLESLRELAGKENLEYPSVTLPPQPHTKEGVDAYNEVIARVRMWVNLNLWQKLKLSRDDAKPLLRLKGFPSFPLVERQANEVDWWDMVCNVKKLINEKKEDGKVFWQNLAGYKRQEALRPYLSSEEDRKKGKKFARYQLGDLLLHLEKKHGEDWGKVYDEAWERIDKKVEGLSKHIKLEEERRSEDAQSKAALTDWLRAKASFVIEGLKEADKDEFCRCDLKLQKWYGDLRGKPFAIEAENSILDISGFSKQYNCAFIWQKDGVKKLNLYLIINYFKGGKLRFKKIKPEAFEANRFYTVINKKSGEIVPMEVNFNFDDPNLIILPLAFGKRQGREFIWNDLLSLETGSLKLANGRVIEKTLYNRRTRQDEPALFVALTFERREVLDSSNIKPMNLIGVDRGENIPAVIALTDPEGCPLSRFKDSLGNPTHILRIGESYKEKQRTIQAKKEVEQRRAGGYSRKYASKAKNLADDMVRNTARDLLYYAVTQDAMLIFENLSRGFGRQGKRTFMAERQYTRMEDWLTAKLAYEGLPSKTYLSKTLAQYTSKTCSNCGFTITSADYDRVLEKLKKTATGWMTTINGKELKVEGQITYYNRYKRQNVVKDLSVELDRLSEESVNNDISSWTKGRSGEALSLLKKRFSHRPVQEKFVCLNCGFETHADEQAALNIARSWLFLRSQEYKKYQTNKTTGNTDKRAFVETWQSFYRKKLKEVWKPAV

SEQ ID NO: 33584 - protein, 978 aa, synthetic construct
  REGION 1..978: note = engineered CasX variant
QEIKRINKIRRRLVKDSNTKKAGKTGPMKTLLVPVMTPDLRERLENLRKKPENIPQPISNTSRANLNKLLTDYTEMKKAILHVYWEEFQKDPVGLMSRVAQPASKKIDQNKLKPEMDEKGNLTTAGFACSQCGQPLFVYKLEQVSEKGKAYTNYFGRCNVAEHEKLILLAQLKPEKDSDEAVTYSLGKFGQRALDFYSIHVTKESTHPVKPLAQIAGNRYASVPVGKALSDACMGTIASFLSKYQDIIIEHQKVVKGNQKRLESLRELAGKENLEYPSVTLPPQPHTKEGVDAYNEVIARVRMWVNLNLWQKLKLSRDDAKPLLRLKGFPSFPLVERQANEVDWWDMVCNVKKLINEKKEDGKVFWQNLAGYKRQEALRPYLSSEEDRKKGKKFARYQLGDLLLHLEKKHGEDWGKVYDEAWERIDKKVEGLSKHIKLEEERRSEDAQSKAALTDWLRAKASFVIEGLKEADKDEFCRCDLKLQKWYGDLRGKPFAIEAENSILDISGFSKQYNCAFIWQKDGVKKLNLYLIINYFKGGKLRFKKIKPEAFEANRFYTVINKKSGEIVPMEVNFNFDDPNLIILPLAFGKRQGREFIWNDLLSLETGSLKLANGRVIEKTLYNRRTRQDEPALFVALTFERREVLDSSNIKPMNLIGVDRGENIPAVIALTDPEGCPLSRFKDSLGNPTHILRIGESYKEKQRTIQAKKEVEQRRAGGYSRKYASKAKNLADDMVRNTARDLLYYAVTQDAMLIFENLSRGFGRQGKRTFMAERQYTRMEDWLTAKLAYEGLPSKTYLSKTLAQYTSKTCSNCGFTITSADYDRVLEKLKKTATGWMTTINGKELKVEGQITYYNRYKRQNVVKDLSVELDRLSEESVNNDISSWTKGRSGEALSLLKKRFSHRPVQEKFVCLNCGFETHADEQAALNIARSWLFLRSQEYKKYQTNKTTGNTDKRAFVETWQSFYRKKLKEVWKPAV

SEQ ID NO: 33585 - protein, 978 aa, synthetic construct
  REGION 1..978: note = engineered CasX variant
QEIKRINKIRRRLVKDSNTKKAGKTGPMKTLLVPVMTPDLRERLENLRKKPENIPQPISNTSRANLNKLLTDYTEMKKAILHVYWEEFQKDPVGLMSRVAQPASKKIDQNKLKPEMDEKGNLTTAGFACSQCGQPLFVYKLEQVSEKGKAYTNYFGRCNVAEHEKLIKLAQLKPEKDSDEAVTYSLGKFGQRALDFYSIHVTKESTHPVKPLAQIAGNRYASGPVGKALSDACMGTIASFLSKYQDIIIEHQKVVKGNQKRLESLRELAGKENLEYPSVTLPPQPHTKEGVDAYNEVIARVRMWVNLNLWQKLKLSRDDAKPLLRLKGFPSFPLVERQANEVDWWDMVCNVKKLINEKKEDGKVFWQNLAGYKRQEALRPYLSSEEDRKKGKKFARYQLGDLLLHLEKKHGEDWGKVYDEAWERIDKKVEGLSKHIKLEEERRSEDAQSKAALTDWLRAKASFVIEGLKEADKDEFCRCDLKLQKWYGDLRGKPFAIEAENSILDISGFSKQYNCAFIWQKDGVKKLNLYLIINYFKGGKLRFKKIKPEAFEANRFYTVINKKSGEIVPMEVNFNFDDPNLIILPLAFGKRQGREFIWNDLLSLETGSLKLANGRVIEKTLYNRRTRQDEPALFVALTFERREVLDSSNIKPMNLIGVDRGENIPAVIALTDPEGCPLSRFKDSLGNPTHILRIGESYKEKQRTIQAKKEVEQRRAGGYSRKYASKAKNLADDMVRNTARDLLYYAVTQDAMLIFENLSRGFGRQGKRTFMAERQYTRMEDWLTAKLAYEGLPSKTYLSKTLAQYTSKTCSNCGFTITSADYDRVLEKLKKTATGWMTTINGKELKVEGQITYYNRYKRQNVVKDLSVELDRLSEESVNNDISSWTKGRSGEALSLLKKRFSHRPVQEKFVCLNCGFETHADEQAALNIARSWLFLRSQEYKKYQTNKTTGNTDKRAFVETWQSFYRKKLKEVWKPAV

SEQ ID NO: 33586 - protein, 977 aa, synthetic construct
  REGION 1..977: note = engineered CasX variant
QEIKRINKIRRRLVKDSNTKKAGKTGPMKTLLVPVMTPDLRERLENLRKKPENIPQPISNTSRANLNKLLTDYTEMKKAILHVYWEEFQKDPVGLMSRVAQPASKKIDQNKLKPEMDEKGNLTTAGFACSQCGQPLFVYKLEQVSEKGKAYTNYFGRCNVAEHEKLILLAQLKPEKDSDEAVTYSLGKFGQRALDFYSIHVTKESTHPVKPLAQIAGNRYASPVGKALSDACMGTIASFLSKYQDIIIEHQKVVKGNQKRLESLRELAGKENLEYPSVTLPPQPHTKEGVDAYNEVIARVRMWVNLNLWQKLKLSRDDAKPLLRLKGFPSFPLVERQANEVDWWDMVCNVKKLINEKKEDGKVFWQNLAGYKRQEALRPYLSSEEDRKKGKKFARYQLGDLLLHLEKKHGEDWGKVYDEAWERIDKKVEGLSKHIKLEEERRSEDAQSKAALTDWLRAKASFVIEGLKEADKDEFCRCDLKLQKWYGDLRGKPFAIEAENSILDISGFSKQYNCAFIWQKDGVKKLNLYLIINYFKGGKLRFKKIKPEAFEANRFYTVINKKSGEIVPMEVNFNFDDPNLIILPLAFGKRQGREFIWNDLLSLETGSLKLANGRVIEKTLYNRRTRQDEPALFVALTFERREVLDSSNIKPMNLIGVDRGENIPAVIALTDPEGCPLSRFKDSLGNPTHILRIGESYKEKQRTIQAKKEVEQRRAGGYSRKYASKAKNLADDMVRNTARDLLYYAVTQDAMLIFENLSRGFGRQGKRTFMAERQYTRMEDWLTAKLAYEGLPSKTYLSKTLAQYTSKTCSNCGFTITSADYDRVLEKLKKTATGWMTTINGKELKVEGQITYYNRYKRQNVVKDLSVELDRLSEESVNNDISSWTKGRSGEALSLLKKRFSHRPVQEKFVCLNCGFETHADEQAALNIARSWLFLRSQEYKKYQTNKTTGNTDKRAFVETWQSFYRKKLKEVWKPAV

SEQ ID NO: 33587 - protein, 978 aa, synthetic construct
  REGION 1..978: note = engineered CasX variant
QEIKRINKIRRRLVKDSNTKKAGKTGPMKTLLVPVMTPDLRERLENLRKKPENIPQPISNTSRANLNKLLTDYTEMKKAILHVYWEEFQKDPVGLMSRVAQPASKKIDQNKLKPEMDEKGNLTTAGFACSQCGQPLFVYKLEQVSEKGKAYTNYFGRCNVAEHEKLILLAQLKPEKDSDEAVTYSLGKFGQRALDFYSIHVTKESTHPVKPLAQIAGNRYASYPVGKALSDACMGTIASFLSKYQDIIIEHQKVVKGNQKRLESLRELAGKENLEYPSVTLPPQPHTKEGVDAYNEVIARVRMWVNLNLWQKLKLSRDDAKPLLRLKGFPSFPLVERQANEVDWWDMVCNVKKLINEKKEDGKVFWQNLAGYKRQEALRPYLSSEEDRKKGKKFARYQLGDLLLHLEKKHGEDWGKVYDEAWERIDKKVEGLSKHIKLEEERRSEDAQSKAALTDWLRAKASFVIEGLKEADKDEFCRCELKLQKWYGDLRGKPFAIEAENSILDISGFSKQYNCAFIWQKDGVKKLNLYLIINYFKGGKLRFKKIKPEAFEANRFYTVINKKSGEIVPMEVNFNFDDPNLIILPLAFGKRFGREFIWNDLLSLETGSLKLANGRVIEKTLYNRRTRQDEPALFVALTFERREVLDSSNIKPMNLIGVDRGENIPAVIALTDPEGCPLSRFKDSLGNPTHILRIGESYKEKQRTIQAKKEVEQRRAGGYSRKYASKAKNLADDMVRNTARDLLYYAVTQDAMLIFENLSRGFGRQGKRTFMAERQYTRMEDWLTAKLAYEGLPSKTYLSKTLAQYTSKTCSNCGFTITSADYDRVLEKLKKTATGWMTTINGKELKVEGQITYYNRYKRQNVVKDLSVELDRLSEESVNNDISSWTKGRSGEALSLLKKRFSHRPVQEKFVCLNCGFETHADEQAALNIARSWLFLRSQEYKKYQTNKTTGNTDKRAFVETWQSFYRKKLKEVWKPAV

SEQ ID NO: 33588 - protein, 978 aa, synthetic construct
  REGION 1..978: note = engineered CasX variant
QEIKRINKIRRRLVKDSNTKKAGKTGPMKTLLVPVMTPDLRERLENLRKKPENIPQPISNTSRANLNKLLTDYTEMKKAILHVYWEEFQKDPVGLMSRVAQPASKKIDQNKLKPEMDEKGNLTTAGFACSQCGQPLFVYKLEQVSEKGKAYTNYFGRCNVAEHEKLILLAQLKPEKDSDEAVTYSLGKFGQRALDFYSIHVTKESTHPVKPLAQIAGNRYASHPVGKALSDACMGTIASFLSKYQDIIIEHQKVVKGNQKRLESLRELAGKENLEYPSVTLPPQPHTKEGVDAYNEVIARVRMWVNLNLWQKLKLSRDDAKPLLRLKGFPSFPLVERQANEVDWWDMVCNVKKLINEKKEDGKVFWQNLAGYKRQEALRPYLSSEEDRKKGKKFARYQLGDLLLHLEKKHGEDWGKVYDEAWERIDKKVEGLSKHIKLEEERRSEDAQSKAALTDWLRAKASFVIEGLKEADKDEFCRCELKLQKWYGDLRGKPFAIEAENSILDISGFSKQYNCAFIWQKDGVKKLNLYLIINYFKGGKLRFKKIKPEAFEANRFYTVINKKSGEIVPMEVNFNFDDPNLIILPLAFGKRFGREFIWNDLLSLETGSLKLANGRVIEKTLYNRRTRQDEPALFVALTFERREVLDSSNIKPMNLIGVDRGENIPAVIALTDPEGCPLSRFKDSLGNPTHILRIGESYKEKQRTIQAKKEVEQRRAGGYSRKYASKAKNLADDMVRNTARDLLYYAVTQDAMLIFENLSRGFGRQGKRTFMAERQYTRMEDWLTAKLAYEGLPSKTYLSKTLAQYTSKTCSNCGFTITSADYDRVLEKLKKTATGWMTTINGKELKVEGQITYYNRYKRQNVVKDLSVELDRLSEESVNNDISSWTKGRSGEALSLLKKRFSHRPVQEKFVCLNCGFETHADEQAALNIARSWLFLRSQEYKKYQTNKTTGNTDKRAFVETWQSFYRKKLKEVWKPAV

SEQ ID NO: 33589 - protein, 978 aa, synthetic construct
  REGION 1..978: note = engineered CasX variant
QEIKRINKIRRRLVKDSNTKKAGKTGPMKTLLVPVMTPDLRERLENLRKKPENIPQPISNTSRANLNKLLTDYTEMKKAILHVYWEEFQKDPVGLMSRVAQPASKKIDQNKLKPEMDEKGNLTTAGFACSQCGQPLFVYKLEQVSEKGKAYTNYFGRCNVAEHEKLILLAQLKPEKDSDEAVTYSLGKFGQRALDFYSIHVTKESTHPVKPLAQIAGNRYASSPVGKALSDACMGTIASFLSKYQDIIIEHQKVVKGNQKRLESLRELAGKENLEYPSVTLPPQPHTKEGVDAYNEVIARVRMWVNLNLWQKLKLSRDDAKPLLRLKGFPSFPLVERQANEVDWWDMVCNVKKLINEKKEDGKVFWQNLAGYKRQEALRPYLSSEEDRKKGKKFARYQLGDLLLHLEKKHGEDWGKVYDEAWERIDKKVEGLSKHIKLEEERRSEDAQSKAALTDWLRAKASFVIEGLKEADKDEFCRCELKLQKWYGDLRGKPFAIEAENSILDISGFSKQYNCAFIWQKDGVKKLNLYLIINYFKGGKLRFKKIKPEAFEANRFYTVINKKSGEIVPMEVNFNFDDPNLIILPLAFGKRFGREFIWNDLLSLETGSLKLANGRVIEKTLYNRRTRQDEPALFVALTFERREVLDSSNIKPMNLIGVDRGENIPAVIALTDPEGCPLSRFKDSLGNPTHILRIGESYKEKQRTIQAKKEVEQRRAGGYSRKYASKAKNLADDMVRNTARDLLYYAVTQDAMLIFENLSRGFGRQGKRTFMAERQYTRMEDWLTAKLAYEGLPSKTYLSKTLAQYTSKTCSNCGFTITSADYDRVLEKLKKTATGWMTTINGKELKVEGQITYYNRYKRQNVVKDLSVELDRLSEESVNNDISSWTKGRSGEALSLLKKRFSHRPVQEKFVCLNCGFETHADEQAALNIARSWLFLRSQEYKKYQTNKTTGNTDKRAFVETWQSFYRKKLKEVWKPAV

SEQ ID NO: 33590 - protein, 978 aa, synthetic construct
  REGION 1..978: note = engineered CasX variant
QEIKRINKIRRRLVKDSNTKKAGKTGPMKTLLVPVMTPDLRERLENLRKKPENIPQPISNTSRANLNKLLTDYTEMKKAILHVYWEEFQKDPVGLMSRVAQPASKKIDQNKLKPEMDEKGNLTTAGFACSQCGQPLFVYKLEQVSEKGKAYTNYFGRCNVAEHEKLILLAQLKPEKDSDEAVTYSLGKFGQRALDFYSIHVTKESTHPVKPLAQIAGNRYASTPVGKALSDACMGTIASFLSKYQDIIIEHQKVVKGNQKRLESLRELAGKENLEYPSVTLPPQPHTKEGVDAYNEVIARVRMWVNLNLWQKLKLSRDDAKPLLRLKGFPSFPLVERQANEVDWWDMVCNVKKLINEKKEDGKVFWQNLAGYKRQEALRPYLSSEEDRKKGKKFARYQLGDLLLHLEKKHGEDWGKVYDEAWERIDKKVEGLSKHIKLEEERRSEDAQSKAALTDWLRAKASFVIEGLKEADKDEFCRCELKLQKWYGDLRGKPFAIEAENSILDISGFSKQYNCAFIWQKDGVKKLNLYLIINYFKGGKLRFKKIKPEAFEANRFYTVINKKSGEIVPMEVNFNFDDPNLIILPLAFGKRFGREFIWNDLLSLETGSLKLANGRVIEKTLYNRRTRQDEPALFVALTFERREVLDSSNIKPMNLIGVDRGENIPAVIALTDPEGCPLSRFKDSLGNPTHILRIGESYKEKQRTIQAKKEVEQRRAGGYSRKYASKAKNLADDMVRNTARDLLYYAVTQDAMLIFENLSRGFGRQGKRTFMAERQYTRMEDWLTAKLAYEGLPSKTYLSKTLAQYTSKTCSNCGFTITSADYDRVLEKLKKTATGWMTTINGKELKVEGQITYYNRYKRQNVVKDLSVELDRLSEESVNNDISSWTKGRSGEALSLLKKRFSHRPVQEKFVCLNCGFETHADEQAALNIARSWLFLRSQEYKKYQTNKTTGNTDKRAFVETWQSFYRKKLKEVWKPAV

SEQ ID NO: 33591 - protein, 978 aa, synthetic construct
  REGION 1..978: note = engineered CasX variant
QEIKRINKIRRRLVKDSNTKKAGKTGPMKTLLVPVMTPDLRERLENLRKKPENIPQPISNTSRANLNKLLTDYTEMKKAILHVYWEEFQKDPVGLMSRVAQPASKKIDQNKLKPEMDEKGNLTTAGFACSQCGQPLFVYKLEQVSEKGKAYTNYFGRCNVAEHEKLILLAQLKPEKDSDEAVTYSLGKFGQRALDFYSIHVTKESTHPVKPLAQIAGNRYASAPVGKALSDACMGTIASFLSKYQDIIIEHQKVVKGNQKRLESLRELAGKENLEYPSVTLPPQPHTKEGVDAYNEVIARVRMWVNLNLWQKLKLSRDDAKPLLRLKGFPSFPLVERQANEVDWWDMVCNVKKLINEKKEDGKVFWQNLAGYKRQEALRPYLSSEEDRKKGKKFARYQLGDLLLHLEKKHGEDWGKVYDEAWERIDKKVEGLSKHIKLEEERRSEDAQSKAALTDWLRAKASFVIEGLKEADKDEFCRCELKLQKWYGDLRGKPFAIEAENSILDISGFSKQYNCAFIWQKDGVKKLNLYLIINYFKGGKLRFKKIKPEAFEANRFYTVINKKSGEIVPMEVNFNFDDPNLIILPLAFGKRFGREFIWNDLLSLETGSLKLANGRVIEKTLYNRRTRQDEPALFVALTFERREVLDSSNIKPMNLIGVDRGENIPAVIALTDPEGCPLSRFKDSLGNPTHILRIGESYKEKQRTIQAKKEVEQRRAGGYSRKYASKAKNLADDMVRNTARDLLYYAVTQDAMLIFENLSRGFGRQGKRTFMAERQYTRMEDWLTAKLAYEGLPSKTYLSKTLAQYTSKTCSNCGFTITSADYDRVLEKLKKTATGWMTTINGKELKVEGQITYYNRYKRQNVVKDLSVELDRLSEESVNNDISSWTKGRSGEALSLLKKRFSHRPVQEKFVCLNCGFETHADEQAALNIARSWLFLRSQEYKKYQTNKTTGNTDKRAFVETWQSFYRKKLKEVWKPAV

SEQ ID NO: 33592 - protein, 978 aa, synthetic construct
  REGION 1..978: note = engineered CasX variant
QEIKRINKIRRRLVKDSNTKKAGKTGPMKTLLVPVMTPDLRERLENLRKKPENIPQPISNTSRANLNKLLTDYTEMKKAILHVYWEEFQKDPVGLMSRVAQPASKKIDQNKLKPEMDEKGNLTTAGFACSQCGQPLFVYKLEQVSEKGKAYTNYFGRCNVAEHEKLILLAQLKPEKDSDEAVTYSLGKFGQRALDFYSIHVTKESTHPVKPLAQIAGNRYASVPVGKALSDACMGTIASFLSKYQDIIIEHQKVVKGNQKRLESLRELAGKENLEYPSVTLPPQPHTKEGVDAYNEVIARVRMWVNLNLWQKLKLSRDDAKPLLRLKGFPSFPLVERQANEVDWWDMVCNVKKLINEKKEDGKVFWQNLAGYKRQEALRPYLSSEEDRKKGKKFARYQLGDLLLHLEKKHGEDWGKVYDEAWERIDKKVEGLSKHIKLEEERRSEDAQSKAALTDWLRAKASFVIEGLKEADKDEFCRCELKLQKWYGDLRGKPFAIEAENSILDISGFSKQYNCAFIWQKDGVKKLNLYLIINYFKGGKLRFKKIKPEAFEANRFYTVINKKSGEIVPMEVNFNFDDPNLIILPLAFGKRFGREFIWNDLLSLETGSLKLANGRVIEKTLYNRRTRQDEPALFVALTFERREVLDSSNIKPMNLIGVDRGENIPAVIALTDPEGCPLSRFKDSLGNPTHILRIGESYKEKQRTIQAKKEVEQRRAGGYSRKYASKAKNLADDMVRNTARDLLYYAVTQDAMLIFENLSRGFGRQGKRTFMAERQYTRMEDWLTAKLAYEGLPSKTYLSKTLAQYTSKTCSNCGFTITSADYDRVLEKLKKTATGWMTTINGKELKVEGQITYYNRYKRQNVVKDLSVELDRLSEESVNNDISSWTKGRSGEALSLLKKRFSHRPVQEKFVCLNCGFETHADEQAALNIARSWLFLRSQEYKKYQTNKTTGNTDKRAFVETWQSFYRKKLKEVWKPAV

SEQ ID NO: 33593 - protein, 978 aa, synthetic construct
  REGION 1..978: note = engineered CasX variant
QEIKRINKIRRRLVKDSNTKKAGKTGPMKTLLVPVMTPDLRERLENLRKKPENIPQPISNTSRANLNKLLTDYTEMKKAILHVYWEEFQKDPVGLMSRVAQPASKKIDQNKLKPEMDEKGNLTTAGFACSQCGQPLFVYKLEQVSEKGKAYTNYFGRCNVAEHEKLIKLAQLKPEKDSDEAVTYSLGKFGQRALDFYSIHVTKESTHPVKPLAQIAGNRYASGPVGKALSDACMGTIASFLSKYQDIIIEHQKVVKGNQKRLESLRELAGKENLEYPSVTLPPQPHTKEGVDAYNEVIARVRMWVNLNLWQKLKLSRDDAKPLLRLKGFPSFPLVERQANEVDWWDMVCNVKKLINEKKEDGKVFWQNLAGYKRQEALRPYLSSEEDRKKGKKFARYQLGDLLLHLEKKHGEDWGKVYDEAWERIDKKVEGLSKHIKLEEERRSEDAQSKAALTDWLRAKASFVIEGLKEADKDEFCRCELKLQKWYGDLRGKPFAIEAENSILDISGFSKQYNCAFIWQKDGVKKLNLYLIINYFKGGKLRFKKIKPEAFEANRFYTVINKKSGEIVPMEVNFNFDDPNLIILPLAFGKRFGREFIWNDLLSLETGSLKLANGRVIEKTLYNRRTRQDEPALFVALTFERREVLDSSNIKPMNLIGVDRGENIPAVIALTDPEGCPLSRFKDSLGNPTHILRIGESYKEKQRTIQAKKEVEQRRAGGYSRKYASKAKNLADDMVRNTARDLLYYAVTQDAMLIFENLSRGFGRQGKRTFMAERQYTRMEDWLTAKLAYEGLPSKTYLSKTLAQYTSKTCSNCGFTITSADYDRVLEKLKKTATGWMTTINGKELKVEGQITYYNRYKRQNVVKDLSVELDRLSEESVNNDISSWTKGRSGEALSLLKKRFSHRPVQEKFVCLNCGFETHADEQAALNIARSWLFLRSQEYKKYQTNKTTGNTDKRAFVETWQSFYRKKLKEVWKPAV

SEQ ID NO: 33594 - protein, 977 aa, synthetic construct
  REGION 1..977: note = engineered CasX variant
QEIKRINKIRRRLVKDSNTKKAGKTGPMKTLLVPVMTPDLRERLENLRKKPENIPQPISNTSRANLNKLLTDYTEMKKAILHVYWEEFQKDPVGLMSRVAQPASKKIDQNKLKPEMDEKGNLTTAGFACSQCGQPLFVYKLEQVSEKGKAYTNYFGRCNVAEHEKLILLAQLKPEKDSDEAVTYSLGKFGQRALDFYSIHVTKESTHPVKPLAQIAGNRYASPVGKALSDACMGTIASFLSKYQDIIIEHQKVVKGNQKRLESLRELAGKENLEYPSVTLPPQPHTKEGVDAYNEVIARVRMWVNLNLWQKLKLSRDDAKPLLRLKGFPSFPLVERQANEVDWWDMVCNVKKLINEKKEDGKVFWQNLAGYKRQEALRPYLSSEEDRKKGKKFARYQLGDLLLHLEKKHGEDWGKVYDEAWERIDKKVEGLSKHIKLEEERRSEDAQSKAALTDWLRAKASFVIEGLKEADKDEFCRCELKLQKWYGDLRGKPFAIEAENSILDISGFSKQYNCAFIWQKDGVKKLNLYLIINYFKGGKLRFKKIKPEAFEANRFYTVINKKSGEIVPMEVNFNFDDPNLIILPLAFGKRFGREFIWNDLLSLETGSLKLANGRVIEKTLYNRRTRQDEPALFVALTFERREVLDSSNIKPMNLIGVDRGENIPAVIALTDPEGCPLSRFKDSLGNPTHILRIGESYKEKQRTIQAKKEVEQRRAGGYSRKYASKAKNLADDMVRNTARDLLYYAVTQDAMLIFENLSRGFGRQGKRTFMAERQYTRMEDWLTAKLAYEGLPSKTYLSKTLAQYTSKTCSNCGFTITSADYDRVLEKLKKTATGWMTTINGKELKVEGQITYYNRYKRQNVVKDLSVELDRLSEESVNNDISSWTKGRSGEALSLLKKRFSHRPVQEKFVCLNCGFETHADEQAALNIARSWLFLRSQEYKKYQTNKTTGNTDKRAFVETWQSFYRKKLKEVWKPAV

SEQ ID NO: 33595 - protein, 978 aa, synthetic construct
  REGION 1..978: note = engineered CasX variant
QEIKRINKIRRRLVKDSNTKKAGKTGPMKTLLVPVMTPDLRERLENLRKKPENIPQPISNTSRANLNKLLTDYTEMKKAILHVYWEEFQKDPVGLMSRVAQPASKKIDQNKLKPEMDEKGNLTTAGFACSQCGQPLFVYKLEQVSEKGKAYTNYFGRCNVAEHEKLILLAQLKPEKDSDEAVTYSLGKFGQRALDFYSIHVTKESTHPVKPLAQIAGNRYASYPVGKALSDACMGTIASFLSKYQDIIIEHQKVVKGNQKRLESLRELAGKENLEYPSVTLPPQPHTKEGVDAYNEVIARVRMWVNLNLWQKLKLSRDDAKPLLRLKGFPSFPLVERQANEVDWWDMVCNVKKLINEKKEDGKVFWQNLAGYKRQEALRPYLSSEEDRKKGKKFARYQLGDLLLHLEKKHGEDWGKVYDEAWERIDKKVEGLSKHIKLEEERRSEDAQSKAALTDWLRAKASFVIEGLKEADKDEFCRCELKLQKWYGDLRGKPFAIEAENSILDISGFSKQYNCAFIWQKDGVKKLNLYLIINYFKGGKLRFKKIKPEAFEANRFYTVINKKSGEIVPMEVNFNFDDPNLIILPLAFGKRVGREFIWNDLLSLETGSLKLANGRVIEKTLYNRRTRQDEPALFVALTFERREVLDSSNIKPMNLIGVDRGENIPAVIALTDPEGCPLSRFKDSLGNPTHILRIGESYKEKQRTIQAKKEVEQRRAGGYSRKYASKAKNLADDMVRNTARDLLYYAVTQDAMLIFENLSRGFGRQGKRTFMAERQYTRMEDWLTAKLAYEGLPSKTYLSKTLAQYTSKTCSNCGFTITSADYDRVLEKLKKTATGWMTTINGKELKVEGQITYYNRYKRQNVVKDLSVELDRLSEESVNNDISSWTKGRSGEALSLLKKRFSHRPVQEKFVCLNCGFETHADEQAALNIARSWLFLRSQEYKKYQTNKTTGNTDKRAFVETWQSFYRKKLKEVWKPAV

SEQ ID NO: 33596 - protein, 978 aa, synthetic construct
  REGION 1..978: note = engineered CasX variant
QEIKRINKIRRRLVKDSNTKKAGKTGPMKTLLVPVMTPDLRERLENLRKKPENIPQPISNTSRANLNKLLTDYTEMKKAILHVYWEEFQKDPVGLMSRVAQPASKKIDQNKLKPEMDEKGNLTTAGFACSQCGQPLFVYKLEQVSEKGKAYTNYFGRCNVAEHEKLILLAQLKPEKDSDEAVTYSLGKFGQRALDFYSIHVTKESTHPVKPLAQIAGNRYASHPVGKALSDACMGTIASFLSKYQDIIIEHQKVVKGNQKRLESLRELAGKENLEYPSVTLPPQPHTKEGVDAYNEVIARVRMWVNLNLWQKLKLSRDDAKPLLRLKGFPSFPLVERQANEVDWWDMVCNVKKLINEKKEDGKVFWQNLAGYKRQEALRPYLSSEEDRKKGKKFARYQLGDLLLHLEKKHGEDWGKVYDEAWERIDKKVEGLSKHIKLEEERRSEDAQSKAALTDWLRAKASFVIEGLKEADKDEFCRCELKLQKWYGDLRGKPFAIEAENSILDISGFSKQYNCAFIWQKDGVKKLNLYLIINYFKGGKLRFKKIKPEAFEANRFYTVINKKSGEIVPMEVNFNFDDPNLIILPLAFGKRVGREFIWNDLLSLETGSLKLANGRVIEKTLYNRRTRQDEPALFVALTFERREVLDSSNIKPMNLIGVDRGENIPAVIALTDPEGCPLSRFKDSLGNPTHILRIGESYKEKQRTIQAKKEVEQRRAGGYSRKYASKAKNLADDMVRNTARDLLYYAVTQDAMLIFENLSRGFGRQGKRTFMAERQYTRMEDWLTAKLAYEGLPSKTYLSKTLAQYTSKTCSNCGFTITSADYDRVLEKLKKTATGWMTTINGKELKVEGQITYYNRYKRQNVVKDLSVELDRLSEESVNNDISSWTKGRSGEALSLLKKRFSHRPVQEKFVCLNCGFETHADEQAALNIARSWLFLRSQEYKKYQTNKTTGNTDKRAFVETWQSFYRKKLKEVWKPAV

SEQ ID NO: 33597 - protein, 978 aa, synthetic construct
  REGION 1..978: note = engineered CasX variant
QEIKRINKIRRRLVKDSNTKKAGKTGPMKTLLVPVMTPDLRERLENLRKKPENIPQPISNTSRANLNKLLTDYTEMKKAILHVYWEEFQKDPVGLMSRVAQPASKKIDQNKLKPEMDEKGNLTTAGFACSQCGQPLFVYKLEQVSEKGKAYTNYFGRCNVAEHEKLILLAQLKPEKDSDEAVTYSLGKFGQRALDFYSIHVTKESTHPVKPLAQIAGNRYASSPVGKALSDACMGTIASFLSKYQDIIIEHQKVVKGNQKRLESLRELAGKENLEYPSVTLPPQPHTKEGVDAYNEVIARVRMWVNLNLWQKLKLSRDDAKPLLRLKGFPSFPLVERQANEVDWWDMVCNVKKLINEKKEDGKVFWQNLAGYKRQEALRPYLSSEEDRKKGKKFARYQLGDLLLHLEKKHGEDWGKVYDEAWERIDKKVEGLSKHIKLEEERRSEDAQSKAALTDWLRAKASFVIEGLKEADKDEFCRCELKLQKWYGDLRGKPFAIEAENSILDISGFSKQYNCAFIWQKDGVKKLNLYLIINYFKGGKLRFKKIKPEAFEANRFYTVINKKSGEIVPMEVNFNFDDPNLIILPLAFGKRVGREFIWNDLLSLETGSLKLANGRVIEKTLYNRRTRQDEPALFVALTFERREVLDSSNIKPMNLIGVDRGENIPAVIALTDPEGCPLSRFKDSLGNPTHILRIGESYKEKQRTIQAKKEVEQRRAGGYSRKYASKAKNLADDMVRNTARDLLYYAVTQDAMLIFENLSRGFGRQGKRTFMAERQYTRMEDWLTAKLAYEGLPSKTYLSKTLAQYTSKTCSNCGFTITSADYDRVLEKLKKTATGWMTTINGKELKVEGQITYYNRYKRQNVVKDLSVELDRLSEESVNNDISSWTKGRSGEALSLLKKRFSHRPVQEKFVCLNCGFETHADEQAALNIARSWLFLRSQEYKKYQTNKTTGNTDKRAFVETWQSFYRKKLKEVWKPAV

SEQ ID NO: 33598 - protein, 978 aa, synthetic construct
  REGION 1..978: note = engineered CasX variant
QEIKRINKIRRRLVKDSNTKKAGKTGPMKTLLVPVMTPDLRERLENLRKKPENIPQPISNTSRANLNKLLTDYTEMKKAILHVYWEEFQKDPVGLMSRVAQPASKKIDQNKLKPEMDEKGNLTTAGFACSQCGQPLFVYKLEQVSEKGKAYTNYFGRCNVAEHEKLILLAQLKPEKDSDEAVTYSLGKFGQRALDFYSIHVTKESTHPVKPLAQIAGNRYASTPVGKALSDACMGTIASFLSKYQDIIIEHQKVVKGNQKRLESLRELAGKENLEYPSVTLPPQPHTKEGVDAYNEVIARVRMWVNLNLWQKLKLSRDDAKPLLRLKGFPSFPLVERQANEVDWWDMVCNVKKLINEKKEDGKVFWQNLAGYKRQEALRPYLSSEEDRKKGKKFARYQLGDLLLHLEKKHGEDWGKVYDEAWERIDKKVEGLSKHIKLEEERRSEDAQSKAALTDWLRAKASFVIEGLKEADKDEFCRCELKLQKWYGDLRGKPFAIEAENSILDISGFSKQYNCAFIWQKDGVKKLNLYLIINYFKGGKLRFKKIKPEAFEANRFYTVINKKSGEIVPMEVNFNFDDPNLIILPLAFGKRVGREFIWNDLLSLETGSLKLANGRVIEKTLYNRRTRQDEPALFVALTFERREVLDSSNIKPMNLIGVDRGENIPAVIALTDPEGCPLSRFKDSLGNPTHILRIGESYKEKQRTIQAKKEVEQRRAGGYSRKYASKAKNLADDMVRNTARDLLYYAVTQDAMLIFENLSRGFGRQGKRTFMAERQYTRMEDWLTAKLAYEGLPSKTYLSKTLAQYTSKTCSNCGFTITSADYDRVLEKLKKTATGWMTTINGKELKVEGQITYYNRYKRQNVVKDLSVELDRLSEESVNNDISSWTKGRSGEALSLLKKRFSHRPVQEKFVCLNCGFETHADEQAALNIARSWLFLRSQEYKKYQTNKTTGNTDKRAFVETWQSFYRKKLKEVWKPAV

SEQ ID NO: 33599 - protein, 978 aa, synthetic construct
  REGION 1..978: note = engineered CasX variant
QEIKRINKIRRRLVKDSNTKKAGKTGPMKTLLVPVMTPDLRERLENLRKKPENIPQPISNTSRANLNKLLTDYTEMKKAILHVYWEEFQKDPVGLMSRVAQPASKKIDQNKLKPEMDEKGNLTTAGFACSQCGQPLFVYKLEQVSEKGKAYTNYFGRCNVAEHEKLILLAQLKPEKDSDEAVTYSLGKFGQRALDFYSIHVTKESTHPVKPLAQIAGNRYASAPVGKALSDACMGTIASFLSKYQDIIIEHQKVVKGNQKRLESLRELAGKENLEYPSVTLPPQPHTKEGVDAYNEVIARVRMWVNLNLWQKLKLSRDDAKPLLRLKGFPSFPLVERQANEVDWWDMVCNVKKLINEKKEDGKVFWQNLAGYKRQEALRPYLSSEEDRKKGKKFARYQLGDLLLHLEKKHGEDWGKVYDEAWERIDKKVEGLSKHIKLEEERRSEDAQSKAALTDWLRAKASFVIEGLKEADKDEFCRCELKLQKWYGDLRGKPFAIEAENSILDISGFSKQYNCAFIWQKDGVKKLNLYLIINYFKGGKLRFKKIKPEAFEANRFYTVINKKSGEIVPMEVNFNFDDPNLIILPLAFGKRVGREFIWNDLLSLETGSLKLANGRVIEKTLYNRRTRQDEPALFVALTFERREVLDSSNIKPMNLIGVDRGENIPAVIALTDPEGCPLSRFKDSLGNPTHILRIGESYKEKQRTIQAKKEVEQRRAGGYSRKYASKAKNLADDMVRNTARDLLYYAVTQDAMLIFENLSRGFGRQGKRTFMAERQYTRMEDWLTAKLAYEGLPSKTYLSKTLAQYTSKTCSNCGFTITSADYDRVLEKLKKTATGWMTTINGKELKVEGQITYYNRYKRQNVVKDLSVELDRLSEESVNNDISSWTKGRSGEALSLLKKRFSHRPVQEKFVCLNCGFETHADEQAALNIARSWLFLRSQEYKKYQTNKTTGNTDKRAFVETWQSFYRKKLKEVWKPAV

SEQ ID NO: 33600 - protein, 978 aa, synthetic construct
  REGION 1..978: note = engineered CasX variant
QEIKRINKIRRRLVKDSNTKKAGKTGPMKTLLVPVMTPDLRERLENLRKKPENIPQPISNTSRANLNKLLTDYTEMKKAILHVYWEEFQKDPVGLMSRVAQPASKKIDQNKLKPEMDEKGNLTTAGFACSQCGQPLFVYKLEQVSEKGKAYTNYFGRCNVAEHEKLILLAQLKPEKDSDEAVTYSLGKFGQRALDFYSIHVTKESTHPVKPLAQIAGNRYASVPVGKALSDACMGTIASFLSKYQDIIIEHQKVVKGNQKRLESLRELAGKENLEYPSVTLPPQPHTKEGVDAYNEVIARVRMWVNLNLWQKLKLSRDDAKPLLRLKGFPSFPLVERQANEVDWWDMVCNVKKLINEKKEDGKVFWQNLAGYKRQEALRPYLSSEEDRKKGKKFARYQLGDLLLHLEKKHGEDWGKVYDEAWERIDKKVEGLSKHIKLEEERRSEDAQSKAALTDWLRAKASFVIEGLKEADKDEFCRCELKLQKWYGDLRGKPFAIEAENSILDISGFSKQYNCAFIWQKDGVKKLNLYLIINYFKGGKLRFKKIKPEAFEANRFYTVINKKSGEIVPMEVNFNFDDPNLIILPLAFGKRVGREFIWNDLLSLETGSLKLANGRVIEKTLYNRRTRQDEPALFVALTFERREVLDSSNIKPMNLIGVDRGENIPAVIALTDPEGCPLSRFKDSLGNPTHILRIGESYKEKQRTIQAKKEVEQRRAGGYSRKYASKAKNLADDMVRNTARDLLYYAVTQDAMLIFENLSRGFGRQGKRTFMAERQYTRMEDWLTAKLAYEGLPSKTYLSKTLAQYTSKTCSNCGFTITSADYDRVLEKLKKTATGWMTTINGKELKVEGQITYYNRYKRQNVVKDLSVELDRLSEESVNNDISSWTKGRSGEALSLLKKRFSHRPVQEKFVCLNCGFETHADEQAALNIARSWLFLRSQEYKKYQTNKTTGNTDKRAFVETWQSFYRKKLKEVWKPAV

SEQ ID NO: 33601 - protein, 978 aa, synthetic construct
  REGION 1..978: note = engineered CasX variant
QEIKRINKIRRRLVKDSNTKKAGKTGPMKTLLVPVMTPDLRERLENLRKKPENIPQPISNTSRANLNKLLTDYTEMKKAILHVYWEEFQKDPVGLMSRVAQPASKKIDQNKLKPEMDEKGNLTTAGFACSQCGQPLFVYKLEQVSEKGKAYTNYFGRCNVAEHEKLIKLAQLKPEKDSDEAVTYSLGKFGQRALDFYSIHVTKESTHPVKPLAQIAGNRYASGPVGKALSDACMGTIASFLSKYQDIIIEHQKVVKGNQKRLESLRELAGKENLEYPSVTLPPQPHTKEGVDAYNEVIARVRMWVNLNLWQKLKLSRDDAKPLLRLKGFPSFPLVERQANEVDWWDMVCNVKKLINEKKEDGKVFWQNLAGYKRQEALRPYLSSEEDRKKGKKFARYQLGDLLLHLEKKHGEDWGKVYDEAWERIDKKVEGLSKHIKLEEERRSEDAQSKAALTDWLRAKASFVIEGLKEADKDEFCRCELKLQKWYGDLRGKPFAIEAENSILDISGFSKQYNCAFIWQKDGVKKLNLYLIINYFKGGKLRFKKIKPEAFEANRFYTVINKKSGEIVPMEVNFNFDDPNLIILPLAFGKRVGREFIWNDLLSLETGSLKLANGRVIEKTLYNRRTRQDEPALFVALTFERREVLDSSNIKPMNLIGVDRGENIPAVIALTDPEGCPLSRFKDSLGNPTHILRIGESYKEKQRTIQAKKEVEQRRAGGYSRKYASKAKNLADDMVRNTARDLLYYAVTQDAMLIFENLSRGFGRQGKRTFMAERQYTRMEDWLTAKLAYEGLPSKTYLSKTLAQYTSKTCSNCGFTITSADYDRVLEKLKKTATGWMTTINGKELKVEGQITYYNRYKRQNVVKDLSVELDRLSEESVNNDISSWTKGRSGEALSLLKKRFSHRPVQEKFVCLNCGFETHADEQAALNIARSWLFLRSQEYKKYQTNKTTGNTDKRAFVETWQSFYRKKLKEVWKPAV

SEQ ID NO: 33602 - protein, 977 aa, synthetic construct
  REGION 1..977: note = engineered CasX variant
QEIKRINKIRRRLVKDSNTKKAGKTGPMKTLLVPVMTPDLRERLENLRKKPENIPQPISNTSRANLNKLLTDYTEMKKAILHVYWEEFQKDPVGLMSRVAQPASKKIDQNKLKPEMDEKGNLTTAGFACSQCGQPLFVYKLEQVSEKGKAYTNYFGRCNVAEHEKLILLAQLKPEKDSDEAVTYSLGKFGQRALDFYSIHVTKESTHPVKPLAQIAGNRYASPVGKALSDACMGTIASFLSKYQDIIIEHQKVVKGNQKRLESLRELAGKENLEYPSVTLPPQPHTKEGVDAYNEVIARVRMWVNLNLWQKLKLSRDDAKPLLRLKGFPSFPLVERQANEVDWWDMVCNVKKLINEKKEDGKVFWQNLAGYKRQEALRPYLSSEEDRKKGKKFARYQLGDLLLHLEKKHGEDWGKVYDEAWERIDKKVEGLSKHIKLEEERRSEDAQSKAALTDWLRAKASFVIEGLKEADKDEFCRCELKLQKWYGDLRGKPFAIEAENSILDISGFSKQYNCAFIWQKDGVKKLNLYLIINYFKGGKLRFKKIKPEAFEANRFYTVINKKSGEIVPMEVNFNFDDPNLIILPLAFGKRVGREFIWNDLLSLETGSLKLANGRVIEKTLYNRRTRQDEPALFVALTFERREVLDSSNIKPMNLIGVDRGENIPAVIALTDPEGCPLSRFKDSLGNPTHILRIGESYKEKQRTIQAKKEVEQRRAGGYSRKYASKAKNLADDMVRNTARDLLYYAVTQDAMLIFENLSRGFGRQGKRTFMAERQYTRMEDWLTAKLAYEGLPSKTYLSKTLAQYTSKTCSNCGFTITSADYDRVLEKLKKTATGWMTTINGKELKVEGQITYYNRYKRQNVVKDLSVELDRLSEESVNNDISSWTKGRSGEALSLLKKRFSHRPVQEKFVCLNCGFETHADEQAALNIARSWLFLRSQEYKKYQTNKTTGNTDKRAFVETWQSFYRKKLKEVWKPAV

SEQ ID NO: 33603 - protein, 979 aa, synthetic construct
  REGION 1..979: note = engineered CasX variant
QEIKRINKIRRRLVKDSNTKKAGKTGPMKTLLVPVMTPDLRERLENLRKKPENIPQPISNTSRANLNKLLTDYTEMKKAILHVYWEEFQKDPVGLMSRVAQPASKKIDQNKLKPEMDEKGNLTTAGFACSQCGQPLFVYKLEQVSEKGKAYTNYFGRCNVAEHEKLILLAQLKPEKDSDEAVTYSLGKFGQRALDFYSIHVTKESTHPVKPLAQIAGNRYASYPVGKALSDACMGTIASFLSKYQDIIIEHQKVVKGNQKRLESLRELAGKENLEYPSVTLPPQPHTKEGVDAYNEVIARVRMWVNLNLWQKLKLSRDDAKPLLRLKGFPSFPLVERQANEVDWWDMVCNVKKLINEKKEDGKVFWQNLAGYKRQEALRPYLSSEEDRKKGKKFARYQLGDLLLHLEKKHGEDWGKVYDEAWERIDKKVEGLSKHIKLEEERRSEDAQSKAALTDWLRAKASFVIEGLKEADKDEFCRCELKLQKWYGDLRGKPFAIEAENSILDISGFSKQYNCAFIWQKDGVKKLNLYLIINYFKGGKLRFKKIKPEAFEANRFYTVINKKSGEIVPMEVNFNFDDPNLIILPLAFGKRQGREFIWNDLLSLETGSLKLANGRVIEKTLYNRRTRQDEPALFVALTFERREVLDSSNIKTPMNLIGVDRGENIPAVIALTDPEGCPLSRFKDSLGNPTHILRIGESYKEKQRTIQAKKEVEQRRAGGYSRKYASKAKNLADDMVRNTARDLLYYAVTQDAMLIFENLSRGFGRQGKRTFMAERQYTRMEDWLTAKLAYEGLPSKTYLSKTLAQYTSKTCSNCGFTITSADYDRVLEKLKKTATGWMTTINGKELKVEGQITYYNRYKRQNVVKDLSVELDRLSEESVNNDISSWTKGRSGEALSLLKKRFSHRPVQEKFVCLNCGFETHADEQAALNIARSWLFLRSQEYKKYQTNKTTGNTDKRAFVETWQSFYRKKLKEVWKPAV

SEQ ID NO: 33604 - protein, 979 aa, synthetic construct
  REGION 1..979: note = engineered CasX variant
QEIKRINKIRRRLVKDSNTKKAGKTGPMKTLLVPVMTPDLRERLENLRKKPENIPQPISNTSRANLNKLLTDYTEMKKAILHVYWEEFQKDPVGLMSRVAQPASKKIDQNKLKPEMDEKGNLTTAGFACSQCGQPLFVYKLEQVSEKGKAYTNYFGRCNVAEHEKLILLAQLKPEKDSDEAVTYSLGKFGQRALDFYSIHVTKESTHPVKPLAQIAGNRYASHPVGKALSDACMGTIASFLSKYQDIIIEHQKVVKGNQKRLESLRELAGKENLEYPSVTLPPQPHTKEGVDAYNEVIARVRMWVNLNLWQKLKLSRDDAKPLLRLKGFPSFPLVERQANEVDWWDMVCNVKKLINEKKEDGKVFWQNLAGYKRQEALRPYLSSEEDRKKGKKFARYQLGDLLLHLEKKHGEDWGKVYDEAWERIDKKVEGLSKHIKLEEERRSEDAQSKAALTDWLRAKASFVIEGLKEADKDEFCRCELKLQKWYGDLRGKPFAIEAENSILDISGFSKQYNCAFIWQKDGVKKLNLYLIINYFKGGKLRFKKIKPEAFEANRFYTVINKKSGEIVPMEVNFNFDDPNLIILPLAFGKRQGREFIWNDLLSLETGSLKLANGRVIEKTLYNRRTRQDEPALFVALTFERREVLDSSNIKTPMNLIGVDRGENIPAVIALTDPEGCPLSRFKDSLGNPTHILRIGESYKEKQRTIQAKKEVEQRRAGGYSRKYASKAKNLADDMVRNTARDLLYYAVTQDAMLIFENLSRGFGRQGKRTFMAERQYTRMEDWLTAKLAYEGLPSKTYLSKTLAQYTSKTCSNCGFTITSADYDRVLEKLKKTATGWMTTINGKELKVEGQITYYNRYKRQNVVKDLSVELDRLSEESVNNDISSWTKGRSGEALSLLKKRFSHRPVQEKFVCLNCGFETHADEQAALNIARSWLFLRSQEYKKYQTNKTTGNTDKRAFVETWQSFYRKKLKEVWKPAV

SEQ ID NO: 33605 - protein, 979 aa, synthetic construct
  REGION 1..979: note = engineered CasX variant
QEIKRINKIRRRLVKDSNTKKAGKTGPMKTLLVPVMTPDLRERLENLRKKPENIPQPISNTSRANLNKLLTDYTEMKKAILHVYWEEFQKDPVGLMSRVAQPASKKIDQNKLKPEMDEKGNLTTAGFACSQCGQPLFVYKLEQVSEKGKAYTNYFGRCNVAEHEKLILLAQLKPEKDSDEAVTYSLGKFGQRALDFYSIHVTKESTHPVKPLAQIAGNRYASSPVGKALSDACMGTIASFLSKYQDIIIEHQKVVKGNQKRLESLRELAGKENLEYPSVTLPPQPHTKEGVDAYNEVIARVRMWVNLNLWQKLKLSRDDAKPLLRLKGFPSFPLVERQANEVDWWDMVCNVKKLINEKKEDGKVFWQNLAGYKRQEALRPYLSSEEDRKKGKKFARYQLGDLLLHLEKKHGEDWGKVYDEAWERIDKKVEGLSKHIKLEEERRSEDAQSKAALTDWLRAKASFVIEGLKEADKDEFCRCELKLQKWYGDLRGKPFAIEAENSILDISGFSKQYNCAFIWQKDGVKKLNLYLIINYFKGGKLRFKKIKPEAFEANRFYTVINKKSGEIVPMEVNFNFDDPNLIILPLAFGKRQGREFIWNDLLSLETGSLKLANGRVIEKTLYNRRTRQDEPALFVALTFERREVLDSSNIKTPMNLIGVDRGENIPAVIALTDPEGCPLSRFKDSLGNPTHILRIGESYKEKQRTIQAKKEVEQRRAGGYSRKYASKAKNLADDMVRNTARDLLYYAVTQDAMLIFENLSRGFGRQGKRTFMAERQYTRMEDWLTAKLAYEGLPSKTYLSKTLAQYTSKTCSNCGFTITSADYDRVLEKLKKTATGWMTTINGKELKVEGQITYYNRYKRQNVVKDLSVELDRLSEESVNNDISSWTKGRSGEALSLLKKRFSHRPVQEKFVCLNCGFETHADEQAALNIARSWLFLRSQEYKKYQTNKTTGNTDKRAFVETWQSFYRKKLKEVWKPAV

SEQ ID NO: 33606 - protein, 979 aa, synthetic construct
  REGION 1..979: note = engineered CasX variant
QEIKRINKIRRRLVKDSNTKKAGKTGPMKTLLVPVMTPDLRERLENLRKKPENIPQPISNTSRANLNKLLTDYTEMKKAILHVYWEEFQKDPVGLMSRVAQPASKKIDQNKLKPEMDEKGNLTTAGFACSQCGQPLFVYKLEQVSEKGKAYTNYFGRCNVAEHEKLILLAQLKPEKDSDEAVTYSLGKFGQRALDFYSIHVTKESTHPVKPLAQIAGNRYASTPVGKALSDACMGTIASFLSKYQDIIIEHQKVVKGNQKRLESLRELAGKENLEYPSVTLPPQPHTKEGVDAYNEVIARVRMWVNLNLWQKLKLSRDDAKPLLRLKGFPSFPLVERQANEVDWWDMVCNVKKLINEKKEDGKVFWQNLAGYKRQEALRPYLSSEEDRKKGKKFARYQLGDLLLHLEKKHGEDWGKVYDEAWERIDKKVEGLSKHIKLEEERRSEDAQSKAALTDWLRAKASFVIEGLKEADKDEFCRCELKLQKWYGDLRGKPFAIEAENSILDISGFSKQYNCAFIWQKDGVKKLNLYLIINYFKGGKLRFKKIKPEAFEANRFYTVINKKSGEIVPMEVNFNFDDPNLIILPLAFGKRQGREFIWNDLLSLETGSLKLANGRVIEKTLYNRRTRQDEPALFVALTFERREVLDSSNIKTPMNLIGVDRGENIPAVIALTDPEGCPLSRFKDSLGNPTHILRIGESYKEKQRTIQAKKEVEQRRAGGYSRKYASKAKNLADDMVRNTARDLLYYAVTQDAMLIFENLSRGFGRQGKRTFMAERQYTRMEDWLTAKLAYEGLPSKTYLSKTLAQYTSKTCSNCGFTITSADYDRVLEKLKKTATGWMTTINGKELKVEGQITYYNRYKRQNVVKDLSVELDRLSEESVNNDISSWTKGRSGEALSLLKKRFSHRPVQEKFVCLNCGFETHADEQAALNIARSWLFLRSQEYKKYQTNKTTGNTDKRAFVETWQSFYRKKLKEVWKPAV

SEQ ID NO: 33607 - protein, 979 aa, synthetic construct
  REGION 1..979: note = engineered CasX variant
QEIKRINKIRRRLVKDSNTKKAGKTGPMKTLLVPVMTPDLRERLENLRKKPENIPQPISNTSRANLNKLLTDYTEMKKAILHVYWEEFQKDPVGLMSRVAQPASKKIDQNKLKPEMDEKGNLTTAGFACSQCGQPLFVYKLEQVSEKGKAYTNYFGRCNVAEHEKLILLAQLKPEKDSDEAVTYSLGKFGQRALDFYSIHVTKESTHPVKPLAQIAGNRYASAPVGKALSDACMGTIASFLSKYQDIIIEHQKVVKGNQKRLESLRELAGKENLEYPSVTLPPQPHTKEGVDAYNEVIARVRMWVNLNLWQKLKLSRDDAKPLLRLKGFPSFPLVERQANEVDWWDMVCNVKKLINEKKEDGKVFWQNLAGYKRQEALRPYLSSEEDRKKGKKFARYQLGDLLLHLEKKHGEDWGKVYDEAWERIDKKVEGLSKHIKLEEERRSEDAQSKAALTDWLRAKASFVIEGLKEADKDEFCRCELKLQKWYGDLRGKPFAIEAENSILDISGFSKQYNCAFIWQKDGVKKLNLYLIINYFKGGKLRFKKIKPEAFEANRFYTVINKKSGEIVPMEVNFNFDDPNLIILPLAFGKRQGREFIWNDLLSLETGSLKLANGRVIEKTLYNRRTRQDEPALFVALTFERREVLDSSNIKTPMNLIGVDRGENIPAVIALTDPEGCPLSRFKDSLGNPTHILRIGESYKEKQRTIQAKKEVEQRRAGGYSRKYASKAKNLADDMVRNTARDLLYYAVTQDAMLIFENLSRGFGRQGKRTFMAERQYTRMEDWLTAKLAYEGLPSKTYLSKTLAQYTSKTCSNCGFTITSADYDRVLEKLKKTATGWMTTINGKELKVEGQITYYNRYKRQNVVKDLSVELDRLSEESVNNDISSWTKGRSGEALSLLKKRFSHRPVQEKFVCLNCGFETHADEQAALNIARSWLFLRSQEYKKYQTNKTTGNTDKRAFVETWQSFYRKKLKEVWKPAV

SEQ ID NO: 33608 - protein, 979 aa, synthetic construct
  REGION 1..979: note = engineered CasX variant
QEIKRINKIRRRLVKDSNTKKAGKTGPMKTLLVPVMTPDLRERLENLRKKPENIPQPISNTSRANLNKLLTDYTEMKKAILHVYWEEFQKDPVGLMSRVAQPASKKIDQNKLKPEMDEKGNLTTAGFACSQCGQPLFVYKLEQVSEKGKAYTNYFGRCNVAEHEKLILLAQLKPEKDSDEAVTYSLGKFGQRALDFYSIHVTKESTHPVKPLAQIAGNRYASVPVGKALSDACMGTIASFLSKYQDIIIEHQKVVKGNQKRLESLRELAGKENLEYPSVTLPPQPHTKEGVDAYNEVIARVRMWVNLNLWQKLKLSRDDAKPLLRLKGFPSFPLVERQANEVDWWDMVCNVKKLINEKKEDGKVFWQNLAGYKRQEALRPYLSSEEDRKKGKKFARYQLGDLLLHLEKKHGEDWGKVYDEAWERIDKKVEGLSKHIKLEEERRSEDAQSKAALTDWLRAKASFVIEGLKEADKDEFCRCELKLQKWYGDLRGKPFAIEAENSILDISGFSKQYNCAFIWQKDGVKKLNLYLIINYFKGGKLRFKKIKPEAFEANRFYTVINKKSGEIVPMEVNFNFDDPNLIILPLAFGKRQGREFIWNDLLSLETGSLKLANGRVIEKTLYNRRTRQDEPALFVALTFERREVLDSSNIKTPMNLIGVDRGENIPAVIALTDPEGCPLSRFKDSLGNPTHILRIGESYKEKQRTIQAKKEVEQRRAGGYSRKYASKAKNLADDMVRNTARDLLYYAVTQDAMLIFENLSRGFGRQGKRTFMAERQYTRMEDWLTAKLAYEGLPSKTYLSKTLAQYTSKTCSNCGFTITSADYDRVLEKLKKTATGWMTTINGKELKVEGQITYYNRYKRQNVVKDLSVELDRLSEESVNNDISSWTKGRSGEALSLLKKRFSHRPVQEKFVCLNCGFETHADEQAALNIARSWLFLRSQEYKKYQTNKTTGNTDKRAFVETWQSFYRKKLKEVWKPAV

SEQ ID NO: 33609 - protein, 979 aa, synthetic construct
  REGION 1..979: note = engineered CasX variant
QEIKRINKIRRRLVKDSNTKKAGKTGPMKTLLVPVMTPDLRERLENLRKKPENIPQPISNTSRANLNKLLTDYTEMKKAILHVYWEEFQKDPVGLMSRVAQPASKKIDQNKLKPEMDEKGNLTTAGFACSQCGQPLFVYKLEQVSEKGKAYTNYFGRCNVAEHEKLIKLAQLKPEKDSDEAVTYSLGKFGQRALDFYSIHVTKESTHPVKPLAQIAGNRYASGPVGKALSDACMGTIASFLSKYQDIIIEHQKVVKGNQKRLESLRELAGKENLEYPSVTLPPQPHTKEGVDAYNEVIARVRMWVNLNLWQKLKLSRDDAKPLLRLKGFPSFPLVERQANEVDWWDMVCNVKKLINEKKEDGKVFWQNLAGYKRQEALRPYLSSEEDRKKGKKFARYQLGDLLLHLEKKHGEDWGKVYDEAWERIDKKVEGLSKHIKLEEERRSEDAQSKAALTDWLRAKASFVIEGLKEADKDEFCRCELKLQKWYGDLRGKPFAIEAENSILDISGFSKQYNCAFIWQKDGVKKLNLYLIINYFKGGKLRFKKIKPEAFEANRFYTVINKKSGEIVPMEVNFNFDDPNLIILPLAFGKRQGREFIWNDLLSLETGSLKLANGRVIEKTLYNRRTRQDEPALFVALTFERREVLDSSNIKTPMNLIGVDRGENIPAVIALTDPEGCPLSRFKDSLGNPTHILRIGESYKEKQRTIQAKKEVEQRRAGGYSRKYASKAKNLADDMVRNTARDLLYYAVTQDAMLIFENLSRGFGRQGKRTFMAERQYTRMEDWLTAKLAYEGLPSKTYLSKTLAQYTSKTCSNCGFTITSADYDRVLEKLKKTATGWMTTINGKELKVEGQITYYNRYKRQNVVKDLSVELDRLSEESVNNDISSWTKGRSGEALSLLKKRFSHRPVQEKFVCLNCGFETHADEQAALNIARSWLFLRSQEYKKYQTNKTTGNTDKRAFVETWQSFYRKKLKEVWKPAV

SEQ ID NO: 33610 - protein, 978 aa, synthetic construct
  REGION 1..978: note = engineered CasX variant
QEIKRINKIRRRLVKDSNTKKAGKTGPMKTLLVPVMTPDLRERLENLRKKPENIPQPISNTSRANLNKLLTDYTEMKKAILHVYWEEFQKDPVGLMSRVAQPASKKIDQNKLKPEMDEKGNLTTAGFACSQCGQPLFVYKLEQVSEKGKAYTNYFGRCNVAEHEKLILLAQLKPEKDSDEAVTYSLGKFGQRALDFYSIHVTKESTHPVKPLAQIAGNRYASPVGKALSDACMGTIASFLSKYQDIIIEHQKVVKGNQKRLESLRELAGKENLEYPSVTLPPQPHTKEGVDAYNEVIARVRMWVNLNLWQKLKLSRDDAKPLLRLKGFPSFPLVERQANEVDWWDMVCNVKKLINEKKEDGKVFWQNLAGYKRQEALRPYLSSEEDRKKGKKFARYQLGDLLLHLEKKHGEDWGKVYDEAWERIDKKVEGLSKHIKLEEERRSEDAQSKAALTDWLRAKASFVIEGLKEADKDEFCRCELKLQKWYGDLRGKPFAIEAENSILDISGFSKQYNCAFIWQKDGVKKLNLYLIINYFKGGKLRFKKIKPEAFEANRFYTVINKKSGEIVPMEVNFNFDDPNLIILPLAFGKRQGREFIWNDLLSLETGSLKLANGRVIEKTLYNRRTRQDEPALFVALTFERREVLDSSNIKTPMNLIGVDRGENIPAVIALTDPEGCPLSRFKDSLGNPTHILRIGESYKEKQRTIQAKKEVEQRRAGGYSRKYASKAKNLADDMVRNTARDLLYYAVTQDAMLIFENLSRGFGRQGKRTFMAERQYTRMEDWLTAKLAYEGLPSKTYLSKTLAQYTSKTCSNCGFTITSADYDRVLEKLKKTATGWMTTINGKELKVEGQITYYNRYKRQNVVKDLSVELDRLSEESVNNDISSWTKGRSGEALSLLKKRFSHRPVQEKFVCLNCGFETHADEQAALNIARSWLFLRSQEYKKYQTNKTTGNTDKRAFVETWQSFYRKKLKEVWKPAV

SEQ ID NO: 33611 - protein, 979 aa, synthetic construct
  REGION 1..979: note = engineered CasX variant
QEIKRINKIRRRLVKDSNTKKAGKTGPMKTLLVPVMTPDLRERLENLRKKPENIPQPISNTSRANLNKLLTDYTEMKKAILHVYWEEFQKDPVGLMSRVAQPASKKIDQNKLKPEMDEKGNLTTAGFACSQCGQPLFVYKLEQVSEKGKAYTNYFGRCNVAEHEKLILLAQLKPEKDSDEAVTYSLGKFGQRALDFYSIHVTKESTHPVKPLAQIAGNRYASYPVGKALSDACMGTIASFLSKYQDIIIEHQKVVKGNQKRLESLRELAGKENLEYPSVTLPPQPHTKEGVDAYNEVIARVRMWVNLNLWQKLKLSRDDAKPLLRLKGFPSFPLVERQANEVDWWDMVCNVKKLINEKKEDGKVFWQNLAGYKRQEALRPYLSSEEDRKKGKKFARYQLGDLLLHLEKKHGEDWGKVYDEAWERIDKKVEGLSKHIKLEEERRSEDAQSKAALTDWLRAKASFVIEGLKEADKDEFCRCELKLQKWYGDLRGKPFAIEAENSILDISGFSKQYNCAFIWQKDGVKKLNLYLIINYFKGGKLRFKKIKPEAFEANRFYTVINKKSGEIVPMEVNFNFDDPNLIILPLAFGKRQGREFIWNDLLSLETGSLKLANGRVIEKTLYNRRTRQDEPALFVALTFERREVLDSSNIKPMSNLIGVDRGENIPAVIALTDPEGCPLSRFKDSLGNPTHILRIGESYKEKQRTIQAKKEVEQRRAGGYSRKYASKAKNLADDMVRNTARDLLYYAVTQDAMLIFENLSRGFGRQGKRTFMAERQYTRMEDWLTAKLAYEGLPSKTYLSKTLAQYTSKTCSNCGFTITSADYDRVLEKLKKTATGWMTTINGKELKVEGQITYYNRYKRQNVVKDLSVELDRLSEESVNNDISSWTKGRSGEALSLLKKRFSHRPVQEKFVCLNCGFETHADEQAALNIARSWLFLRSQEYKKYQTNKTTGNTDKRAFVETWQSFYRKKLKEVWKPAV

SEQ ID NO: 33612 - protein, 979 aa, synthetic construct
  REGION 1..979: note = engineered CasX variant
QEIKRINKIRRRLVKDSNTKKAGKTGPMKTLLVPVMTPDLRERLENLRKKPENIPQPISNTSRANLNKLLTDYTEMKKAILHVYWEEFQKDPVGLMSRVAQPASKKIDQNKLKPEMDEKGNLTTAGFACSQCGQPLFVYKLEQVSEKGKAYTNYFGRCNVAEHEKLILLAQLKPEKDSDEAVTYSLGKFGQRALDFYSIHVTKESTHPVKPLAQIAGNRYASHPVGKALSDACMGTIASFLSKYQDIIIEHQKVVKGNQKRLESLRELAGKENLEYPSVTLPPQPHTKEGVDAYNEVIARVRMWVNLNLWQKLKLSRDDAKPLLRLKGFPSFPLVERQANEVDWWDMVCNVKKLINEKKEDGKVFWQNLAGYKRQEALRPYLSSEEDRKKGKKFARYQLGDLLLHLEKKHGEDWGKVYDEAWERIDKKVEGLSKHIKLEEERRSEDAQSKAALTDWLRAKASFVIEGLKEADKDEFCRCELKLQKWYGDLRGKPFAIEAENSILDISGFSKQYNCAFIWQKDGVKKLNLYLIINYFKGGKLRFKKIKPEAFEANRFYTVINKKSGEIVPMEVNFNFDDPNLIILPLAFGKRQGREFIWNDLLSLETGSLKLANGRVIEKTLYNRRTRQDEPALFVALTFERREVLDSSNIKPMSNLIGVDRGENIPAVIALTDPEGCPLSRFKDSLGNPTHILRIGESYKEKQRTIQAKKEVEQRRAGGYSRKYASKAKNLADDMVRNTARDLLYYAVTQDAMLIFENLSRGFGRQGKRTFMAERQYTRMEDWLTAKLAYEGLPSKTYLSKTLAQYTSKTCSNCGFTITSADYDRVLEKLKKTATGWMTTINGKELKVEGQITYYNRYKRQNVVKDLSVELDRLSEESVNNDISSWTKGRSGEALSLLKKRFSHRPVQEKFVCLNCGFETHADEQAALNIARSWLFLRSQEYKKYQTNKTTGNTDKRAFVETWQSFYRKKLKEVWKPAV

SEQ ID NO: 33613 - protein, 979 aa, synthetic construct
  REGION 1..979: note = engineered CasX variant
QEIKRINKIRRRLVKDSNTKKAGKTGPMKTLLVPVMTPDLRERLENLRKKPENIPQPISNTSRANLNKLLTDYTEMKKAILHVYWEEFQKDPVGLMSRVAQPASKKIDQNKLKPEMDEKGNLTTAGFACSQCGQPLFVYKLEQVSEKGKAYTNYFGRCNVAEHEKLILLAQLKPEKDSDEAVTYSLGKFGQRALDFYSIHVTKESTHPVKPLAQIAGNRYASSPVGKALSDACMGTIASFLSKYQDIIIEHQKVVKGNQKRLESLRELAGKENLEYPSVTLPPQPHTKEGVDAYNEVIARVRMWVNLNLWQKLKLSRDDAKPLLRLKGFPSFPLVERQANEVDWWDMVCNVKKLINEKKEDGKVFWQNLAGYKRQEALRPYLSSEEDRKKGKKFARYQLGDLLLHLEKKHGEDWGKVYDEAWERIDKKVEGLSKHIKLEEERRSEDAQSKAALTDWLRAKASFVIEGLKEADKDEFCRCELKLQKWYGDLRGKPFAIEAENSILDISGFSKQYNCAFIWQKDGVKKLNLYLIINYFKGGKLRFKKIKPEAFEANRFYTVINKKSGEIVPMEVNFNFDDPNLIILPLAFGKRQGREFIWNDLLSLETGSLKLANGRVIEKTLYNRRTRQDEPALFVALTFERREVLDSSNIKPMSNLIGVDRGENIPAVIALTDPEGCPLSRFKDSLGNPTHILRIGESYKEKQRTIQAKKEVEQRRAGGYSRKYASKAKNLADDMVRNTARDLLYYAVTQDAMLIFENLSRGFGRQGKRTFMAERQYTRMEDWLTAKLAYEGLPSKTYLSKTLAQYTSKTCSNCGFTITSADYDRVLEKLKKTATGWMTTINGKELKVEGQITYYNRYKRQNVVKDLSVELDRLSEESVNNDISSWTKGRSGEALSLLKKRFSHRPVQEKFVCLNCGFETHADEQAALNIARSWLFLRSQEYKKYQTNKTTGNTDKRAFVETWQSFYRKKLKEVWKPAV

SEQ ID NO: 33614 - protein, 979 aa, synthetic construct
  REGION 1..979: note = engineered CasX variant
QEIKRINKIRRRLVKDSNTKKAGKTGPMKTLLVPVMTPDLRERLENLRKKPENIPQPISNTSRANLNKLLTDYTEMKKAILHVYWEEFQKDPVGLMSRVAQPASKKIDQNKLKPEMDEKGNLTTAGFACSQCGQPLFVYKLEQVSEKGKAYTNYFGRCNVAEHEKLILLAQLKPEKDSDEAVTYSLGKFGQRALDFYSIHVTKESTHPVKPLAQIAGNRYASTPVGKALSDACMGTIASFLSKYQDIIIEHQKVVKGNQKRLESLRELAGKENLEYPSVTLPPQPHTKEGVDAYNEVIARVRMWVNLNLWQKLKLSRDDAKPLLRLKGFPSFPLVERQANEVDWWDMVCNVKKLINEKKEDGKVFWQNLAGYKRQEALRPYLSSEEDRKKGKKFARYQLGDLLLHLEKKHGEDWGKVYDEAWERIDKKVEGLSKHIKLEEERRSEDAQSKAALTDWLRAKASFVIEGLKEADKDEFCRCELKLQKWYGDLRGKPFAIEAENSILDISGFSKQYNCAFIWQKDGVKKLNLYLIINYFKGGKLRFKKIKPEAFEANRFYTVINKKSGEIVPMEVNFNFDDPNLIILPLAFGKRQGREFIWNDLLSLETGSLKLANGRVIEKTLYNRRTRQDEPALFVALTFERREVLDSSNIKPMSNLIGVDRGENIPAVIALTDPEGCPLSRFKDSLGNPTHILRIGESYKEKQRTIQAKKEVEQRRAGGYSRKYASKAKNLADDMVRNTARDLLYYAVTQDAMLIFENLSRGFGRQGKRTFMAERQYTRMEDWLTAKLAYEGLPSKTYLSKTLAQYTSKTCSNCGFTITSADYDRVLEKLKKTATGWMTTINGKELKVEGQITYYNRYKRQNVVKDLSVELDRLSEESVNNDISSWTKGRSGEALSLLKKRFSHRPVQEKFVCLNCGFETHADEQAALNIARSWLFLRSQEYKKYQTNKTTGNTDKRAFVETWQSFYRKKLKEVWKPAV

SEQ ID NO: 33615 - protein, 979 aa, synthetic construct
  REGION 1..979: note = engineered CasX variant
QEIKRINKIRRRLVKDSNTKKAGKTGPMKTLLVPVMTPDLRERLENLRKKPENIPQPISNTSRANLNKLLTDYTEMKKAILHVYWEEFQKDPVGLMSRVAQPASKKIDQNKLKPEMDEKGNLTTAGFACSQCGQPLFVYKLEQVSEKGKAYTNYFGRCNVAEHEKLILLAQLKPEKDSDEAVTYSLGKFGQRALDFYSIHVTKESTHPVKPLAQIAGNRYASAPVGKALSDACMGTIASFLSKYQDIIIEHQKVVKGNQKRLESLRELAGKENLEYPSVTLPPQPHTKEGVDAYNEVIARVRMWVNLNLWQKLKLSRDDAKPLLRLKGFPSFPLVERQANEVDWWDMVCNVKKLINEKKEDGKVFWQNLAGYKRQEALRPYLSSEEDRKKGKKFARYQLGDLLLHLEKKHGEDWGKVYDEAWERIDKKVEGLSKHIKLEEERRSEDAQSKAALTDWLRAKASFVIEGLKEADKDEFCRCELKLQKWYGDLRGKPFAIEAENSILDISGFSKQYNCAFIWQKDGVKKLNLYLIINYFKGGKLRFKKIKPEAFEANRFYTVINKKSGEIVPMEVNFNFDDPNLIILPLAFGKRQGREFIWNDLLSLETGSLKLANGRVIEKTLYNRRTRQDEPALFVALTFERREVLDSSNIKPMSNLIGVDRGENIPAVIALTDPEGCPLSRFKDSLGNPTHILRIGESYKEKQRTIQAKKEVEQRRAGGYSRKYASKAKNLADDMVRNTARDLLYYAVTQDAMLIFENLSRGFGRQGKRTFMAERQYTRMEDWLTAKLAYEGLPSKTYLSKTLAQYTSKTCSNCGFTITSADYDRVLEKLKKTATGWMTTINGKELKVEGQITYYNRYKRQNVVKDLSVELDRLSEESVNNDISSWTKGRSGEALSLLKKRFSHRPVQEKFVCLNCGFETHADEQAALNIARSWLFLRSQEYKKYQTNKTTGNTDKRAFVETWQSFYRKKLKEVWKPAV

SEQ ID NO: 33616 - protein, 979 aa, synthetic construct
  REGION 1..979: note = engineered CasX variant
QEIKRINKIRRRLVKDSNTKKAGKTGPMKTLLVPVMTPDLRERLENLRKKPENIPQPISNTSRANLNKLLTDYTEMKKAILHVYWEEFQKDPVGLMSRVAQPASKKIDQNKLKPEMDEKGNLTTAGFACSQCGQPLFVYKLEQVSEKGKAYTNYFGRCNVAEHEKLILLAQLKPEKDSDEAVTYSLGKFGQRALDFYSIHVTKESTHPVKPLAQIAGNRYASVPVGKALSDACMGTIASFLSKYQDIIIEHQKVVKGNQKRLESLRELAGKENLEYPSVTLPPQPHTKEGVDAYNEVIARVRMWVNLNLWQKLKLSRDDAKPLLRLKGFPSFPLVERQANEVDWWDMVCNVKKLINEKKEDGKVFWQNLAGYKRQEALRPYLSSEEDRKKGKKFARYQLGDLLLHLEKKHGEDWGKVYDEAWERIDKKVEGLSKHIKLEEERRSEDAQSKAALTDWLRAKASFVIEGLKEADKDEFCRCELKLQKWYGDLRGKPFAIEAENSILDISGFSKQYNCAFIWQKDGVKKLNLYLIINYFKGGKLRFKKIKPEAFEANRFYTVINKKSGEIVPMEVNFNFDDPNLIILPLAFGKRQGREFIWNDLLSLETGSLKLANGRVIEKTLYNRRTRQDEPALFVALTFERREVLDSSNIKPMSNLIGVDRGENIPAVIALTDPEGCPLSRFKDSLGNPTHILRIGESYKEKQRTIQAKKEVEQRRAGGYSRKYASKAKNLADDMVRNTARDLLYYAVTQDAMLIFENLSRGFGRQGKRTFMAERQYTRMEDWLTAKLAYEGLPSKTYLSKTLAQYTSKTCSNCGFTITSADYDRVLEKLKKTATGWMTTINGKELKVEGQITYYNRYKRQNVVKDLSVELDRLSEESVNNDISSWTKGRSGEALSLLKKRFSHRPVQEKFVCLNCGFETHADEQAALNIARSWLFLRSQEYKKYQTNKTTGNTDKRAFVETWQSFYRKKLKEVWKPAV

SEQ ID NO: 33617 - protein, 979 aa, synthetic construct
  REGION 1..979: note = engineered CasX variant
QEIKRINKIRRRLVKDSNTKKAGKTGPMKTLLVPVMTPDLRERLENLRKKPENIPQPISNTSRANLNKLLTDYTEMKKAILHVYWEEFQKDPVGLMSRVAQPASKKIDQNKLKPEMDEKGNLTTAGFACSQCGQPLFVYKLEQVSEKGKAYTNYFGRCNVAEHEKLIKLAQLKPEKDSDEAVTYSLGKFGQRALDFYSIHVTKESTHPVKPLAQIAGNRYASGPVGKALSDACMGTIASFLSKYQDIIIEHQKVVKGNQKRLESLRELAGKENLEYPSVTLPPQPHTKEGVDAYNEVIARVRMWVNLNLWQKLKLSRDDAKPLLRLKGFPSFPLVERQANEVDWWDMVCNVKKLINEKKEDGKVFWQNLAGYKRQEALRPYLSSEEDRKKGKKFARYQLGDLLLHLEKKHGEDWGKVYDEAWERIDKKVEGLSKHIKLEEERRSEDAQSKAALTDWLRAKASFVIEGLKEADKDEFCRCELKLQKWYGDLRGKPFAIEAENSILDISGFSKQYNCAFIWQKDGVKKLNLYLIINYFKGGKLRFKKIKPEAFEANRFYTVINKKSGEIVPMEVNFNFDDPNLIILPLAFGKRQGREFIWNDLLSLETGSLKLANGRVIEKTLYNRRTRQDEPALFVALTFERREVLDSSNIKPMSNLIGVDRGENIPAVIALTDPEGCPLSRFKDSLGNPTHILRIGESYKEKQRTIQAKKEVEQRRAGGYSRKYASKAKNLADDMVRNTARDLLYYAVTQDAMLIFENLSRGFGRQGKRTFMAERQYTRMEDWLTAKLAYEGLPSKTYLSKTLAQYTSKTCSNCGFTITSADYDRVLEKLKKTATGWMTTINGKELKVEGQITYYNRYKRQNVVKDLSVELDRLSEESVNNDISSWTKGRSGEALSLLKKRFSHRPVQEKFVCLNCGFETHADEQAALNIARSWLFLRSQEYKKYQTNKTTGNTDKRAFVETWQSFYRKKLKEVWKPAV

SEQ ID NO: 33618 - protein, 978 aa, synthetic construct
  REGION 1..978: note = engineered CasX variant
QEIKRINKIRRRLVKDSNTKKAGKTGPMKTLLVPVMTPDLRERLENLRKKPENIPQPISNTSRANLNKLLTDYTEMKKAILHVYWEEFQKDPVGLMSRVAQPASKKIDQNKLKPEMDEKGNLTTAGFACSQCGQPLFVYKLEQVSEKGKAYTNYFGRCNVAEHEKLILLAQLKPEKDSDEAVTYSLGKFGQRALDFYSIHVTKESTHPVKPLAQIAGNRYASPVGKALSDACMGTIASFLSKYQDIIIEHQKVVKGNQKRLESLRELAGKENLEYPSVTLPPQPHTKEGVDAYNEVIARVRMWVNLNLWQKLKLSRDDAKPLLRLKGFPSFPLVERQANEVDWWDMVCNVKKLINEKKEDGKVFWQNLAGYKRQEALRPYLSSEEDRKKGKKFARYQLGDLLLHLEKKHGEDWGKVYDEAWERIDKKVEGLSKHIKLEEERRSEDAQSKAALTDWLRAKASFVIEGLKEADKDEFCRCELKLQKWYGDLRGKPFAIEAENSILDISGFSKQYNCAFIWQKDGVKKLNLYLIINYFKGGKLRFKKIKPEAFEANRFYTVINKKSGEIVPMEVNFNFDDPNLIILPLAFGKRQGREFIWNDLLSLETGSLKLANGRVIEKTLYNRRTRQDEPALFVALTFERREVLDSSNIKPMSNLIGVDRGENIPAVIALTDPEGCPLSRFKDSLGNPTHILRIGESYKEKQRTIQAKKEVEQRRAGGYSRKYASKAKNLADDMVRNTARDLLYYAVTQDAMLIFENLSRGFGRQGKRTFMAERQYTRMEDWLTAKLAYEGLPSKTYLSKTLAQYTSKTCSNCGFTITSADYDRVLEKLKKTATGWMTTINGKELKVEGQITYYNRYKRQNVVKDLSVELDRLSEESVNNDISSWTKGRSGEALSLLKKRFSHRPVQEKFVCLNCGFETHADEQAALNIARSWLFLRSQEYKKYQTNKTTGNTDKRAFVETWQSFYRKKLKEVWKPAV

SEQ ID NO: 33619 - protein, 978 aa, synthetic construct
  REGION 1..978: note = engineered CasX variant
QEIKRINKIRRRLVKDSNTKKAGKTGPMKTLLVPVMTPDLRERLENLRKKPENIPQPISNTSRANLNKLLTDYTEMKKAILHVYWEEFQKDPVGLMSRVAQPASKKIDQNKLKPEMDEKGNLTTAGFACSQCGQPLFVYKLEQVSEKGKAYTNYFGRCNVAEHEKLILLAQLKPEKDSDEAVTYSLGKFGQRALDFYSIHVTKESTHPVKPLAQIAGNRYASYPVGKALSDACMGTIASFLSKYQDIIIEHQKVVKGNQKRLESLRELAGKENLEYPSVTLPPQPHTKEGVDAYNEVIARVRMWVNLNLWQKLKLSRDDAKPLLRLKGFPSFPLVERQANEVDWWDMVCNVKKLINEKKEDGKVFWQNLAGYKRQEALRPYLSSEEDRKKGKKFARYQLGDLLLHLEKKHGEDWGKVYDEAWERIDKKVEGLSKHIKLEEERRSEDAQSKAALTDWLRAKASFVIEGLKEADKDEFCRCELKLQKWYGDLRGKPFAIEAENSILDISGFSKQYNCAFIWQKDGVKKLNLYLIINYFKGGKLRFKKIKPEAFEANRFYTVINKKSGEIVPMEVNFNFDDPNLIILPLAFGKRQGREFIWNDLLSLETGSLKLANGRVIEKTLYNRRTRQDEPALFVALTFERREVLDSSNIKPMNLIGVDRGENIPAVIALTDPEGCPLSRFKDSLGNPTHILRIRESYKEKQRTIQAKKEVEQRRAGGYSRKYASKAKNLADDMVRNTARDLLYYAVTQDAMLIFENLSRGFGRQGKRTFMAERQYTRMEDWLTAKLAYEGLPSKTYLSKTLAQYTSKTCSNCGFTITSADYDRVLEKLKKTATGWMTTINGKELKVEGQITYYNRYKRQNVVKDLSVELDRLSEESVNNDISSWTKGRSGEALSLLKKRFSHRPVQEKFVCLNCGFETHADEQAALNIARSWLFLRSQEYKKYQTNKTTGNTDKRAFVETWQSFYRKKLKEVWKPAV

SEQ ID NO: 33620 - protein, 978 aa, synthetic construct
  REGION 1..978: note = engineered CasX variant
QEIKRINKIRRRLVKDSNTKKAGKTGPMKTLLVPVMTPDLRERLENLRKKPENIPQPISNTSRANLNKLLTDYTEMKKAILHVYWEEFQKDPVGLMSRVAQPASKKIDQNKLKPEMDEKGNLTTAGFACSQCGQPLFVYKLEQVSEKGKAYTNYFGRCNVAEHEKLILLAQLKPEKDSDEAVTYSLGKFGQRALDFYSIHVTKESTHPVKPLAQIAGNRYASHPVGKALSDACMGTIASFLSKYQDIIIEHQKVVKGNQKRLESLRELAGKENLEYPSVTLPPQPHTKEGVDAYNEVIARVRMWVNLNLWQKLKLSRDDAKPLLRLKGFPSFPLVERQANEVDWWDMVCNVKKLINEKKEDGKVFWQNLAGYKRQEALRPYLSSEEDRKKGKKFARYQLGDLLLHLEKKHGEDWGKVYDEAWERIDKKVEGLSKHIKLEEERRSEDAQSKAALTDWLRAKASFVIEGLKEADKDEFCRCELKLQKWYGDLRGKPFAIEAENSILDISGFSKQYNCAFIWQKDGVKKLNLYLIINYFKGGKLRFKKIKPEAFEANRFYTVINKKSGEIVPMEVNFNFDDPNLIILPLAFGKRQGREFIWNDLLSLETGSLKLANGRVIEKTLYNRRTRQDEPALFVALTFERREVLDSSNIKPMNLIGVDRGENIPAVIALTDPEGCPLSRFKDSLGNPTHILRIRESYKEKQRTIQAKKEVEQRRAGGYSRKYASKAKNLADDMVRNTARDLLYYAVTQDAMLIFENLSRGFGRQGKRTFMAERQYTRMEDWLTAKLAYEGLPSKTYLSKTLAQYTSKTCSNCGFTITSADYDRVLEKLKKTATGWMTTINGKELKVEGQITYYNRYKRQNVVKDLSVELDRLSEESVNNDISSWTKGRSGEALSLLKKRFSHRPVQEKFVCLNCGFETHADEQAALNIARSWLFLRSQEYKKYQTNKTTGNTDKRAFVETWQSFYRKKLKEVWKPAV

SEQ ID NO: 33621 - protein, 978 aa, synthetic construct
  REGION 1..978: note = engineered CasX variant
QEIKRINKIRRRLVKDSNTKKAGKTGPMKTLLVPVMTPDLRERLENLRKKPENIPQPISNTSRANLNKLLTDYTEMKKAILHVYWEEFQKDPVGLMSRVAQPASKKIDQNKLKPEMDEKGNLTTAGFACSQCGQPLFVYKLEQVSEKGKAYTNYFGRCNVAEHEKLILLAQLKPEKDSDEAVTYSLGKFGQRALDFYSIHVTKESTHPVKPLAQIAGNRYASSPVGKALSDACMGTIASFLSKYQDIIIEHQKVVKGNQKRLESLRELAGKENLEYPSVTLPPQPHTKEGVDAYNEVIARVRMWVNLNLWQKLKLSRDDAKPLLRLKGFPSFPLVERQANEVDWWDMVCNVKKLINEKKEDGKVFWQNLAGYKRQEALRPYLSSEEDRKKGKKFARYQLGDLLLHLEKKHGEDWGKVYDEAWERIDKKVEGLSKHIKLEEERRSEDAQSKAALTDWLRAKASFVIEGLKEADKDEFCRCELKLQKWYGDLRGKPFAIEAENSILDISGFSKQYNCAFIWQKDGVKKLNLYLIINYFKGGKLRFKKIKPEAFEANRFYTVINKKSGEIVPMEVNFNFDDPNLIILPLAFGKRQGREFIWNDLLSLETGSLKLANGRVIEKTLYNRRTRQDEPALFVALTFERREVLDSSNIKPMNLIGVDRGENIPAVIALTDPEGCPLSRFKDSLGNPTHILRIRESYKEKQRTIQAKKEVEQRRAGGYSRKYASKAKNLADDMVRNTARDLLYYAVTQDAMLIFENLSRGFGRQGKRTFMAERQYTRMEDWLTAKLAYEGLPSKTYLSKTLAQYTSKTCSNCGFTITSADYDRVLEKLKKTATGWMTTINGKELKVEGQITYYNRYKRQNVVKDLSVELDRLSEESVNNDISSWTKGRSGEALSLLKKRFSHRPVQEKFVCLNCGFETHADEQAALNIARSWLFLRSQEYKKYQTNKTTGNTDKRAFVETWQSFYRKKLKEVWKPAV

SEQ ID NO: 33622 - protein, 978 aa, synthetic construct
  REGION 1..978: note = engineered CasX variant
QEIKRINKIRRRLVKDSNTKKAGKTGPMKTLLVPVMTPDLRERLENLRKKPENIPQPISNTSRANLNKLLTDYTEMKKAILHVYWEEFQKDPVGLMSRVAQPASKKIDQNKLKPEMDEKGNLTTAGFACSQCGQPLFVYKLEQVSEKGKAYTNYFGRCNVAEHEKLILLAQLKPEKDSDEAVTYSLGKFGQRALDFYSIHVTKESTHPVKPLAQIAGNRYASTPVGKALSDACMGTIASFLSKYQDIIIEHQKVVKGNQKRLESLRELAGKENLEYPSVTLPPQPHTKEGVDAYNEVIARVRMWVNLNLWQKLKLSRDDAKPLLRLKGFPSFPLVERQANEVDWWDMVCNVKKLINEKKEDGKVFWQNLAGYKRQEALRPYLSSEEDRKKGKKFARYQLGDLLLHLEKKHGEDWGKVYDEAWERIDKKVEGLSKHIKLEEERRSEDAQSKAALTDWLRAKASFVIEGLKEADKDEFCRCELKLQKWYGDLRGKPFAIEAENSILDISGFSKQYNCAFIWQKDGVKKLNLYLIINYFKGGKLRFKKIKPEAFEANRFYTVINKKSGEIVPMEVNFNFDDPNLIILPLAFGKRQGREFIWNDLLSLETGSLKLANGRVIEKTLYNRRTRQDEPALFVALTFERREVLDSSNIKPMNLIGVDRGENIPAVIALTDPEGCPLSRFKDSLGNPTHILRIRESYKEKQRTIQAKKEVEQRRAGGYSRKYASKAKNLADDMVRNTARDLLYYAVTQDAMLIFENLSRGFGRQGKRTFMAERQYTRMEDWLTAKLAYEGLPSKTYLSKTLAQYTSKTCSNCGFTITSADYDRVLEKLKKTATGWMTTINGKELKVEGQITYYNRYKRQNVVKDLSVELDRLSEESVNNDISSWTKGRSGEALSLLKKRFSHRPVQEKFVCLNCGFETHADEQAALNIARSWLFLRSQEYKKYQTNKTTGNTDKRAFVETWQSFYRKKLKEVWKPAV

SEQ ID NO: 33623 - protein, 978 aa, synthetic construct
  REGION 1..978: note = engineered CasX variant
QEIKRINKIRRRLVKDSNTKKAGKTGPMKTLLVPVMTPDLRERLENLRKKPENIPQPISNTSRANLNKLLTDYTEMKKAILHVYWEEFQKDPVGLMSRVAQPASKKIDQNKLKPEMDEKGNLTTAGFACSQCGQPLFVYKLEQVSEKGKAYTNYFGRCNVAEHEKLILLAQLKPEKDSDEAVTYSLGKFGQRALDFYSIHVTKESTHPVKPLAQIAGNRYASAPVGKALSDACMGTIASFLSKYQDIIIEHQKVVKGNQKRLESLRELAGKENLEYPSVTLPPQPHTKEGVDAYNEVIARVRMWVNLNLWQKLKLSRDDAKPLLRLKGFPSFPLVERQANEVDWWDMVCNVKKLINEKKEDGKVFWQNLAGYKRQEALRPYLSSEEDRKKGKKFARYQLGDLLLHLEKKHGEDWGKVYDEAWERIDKKVEGLSKHIKLEEERRSEDAQSKAALTDWLRAKASFVIEGLKEADKDEFCRCELKLQKWYGDLRGKPFAIEAENSILDISGFSKQYNCAFIWQKDGVKKLNLYLIINYFKGGKLRFKKIKPEAFEANRFYTVINKKSGEIVPMEVNFNFDDPNLIILPLAFGKRQGREFIWNDLLSLETGSLKLANGRVIEKTLYNRRTRQDEPALFVALTFERREVLDSSNIKPMNLIGVDRGENIPAVIALTDPEGCPLSRFKDSLGNPTHILRIRESYKEKQRTIQAKKEVEQRRAGGYSRKYASKAKNLADDMVRNTARDLLYYAVTQDAMLIFENLSRGFGRQGKRTFMAERQYTRMEDWLTAKLAYEGLPSKTYLSKTLAQYTSKTCSNCGFTITSADYDRVLEKLKKTATGWMTTINGKELKVEGQITYYNRYKRQNVVKDLSVELDRLSEESVNNDISSWTKGRSGEALSLLKKRFSHRPVQEKFVCLNCGFETHADEQAALNIARSWLFLRSQEYKKYQTNKTTGNTDKRAFVETWQSFYRKKLKEVWKPAV

SEQ ID NO: 33624 - protein, 978 aa, synthetic construct
  REGION 1..978: note = engineered CasX variant
QEIKRINKIRRRLVKDSNTKKAGKTGPMKTLLVPVMTPDLRERLENLRKKPENIPQPISNTSRANLNKLLTDYTEMKKAILHVYWEEFQKDPVGLMSRVAQPASKKIDQNKLKPEMDEKGNLTTAGFACSQCGQPLFVYKLEQVSEKGKAYTNYFGRCNVAEHEKLILLAQLKPEKDSDEAVTYSLGKFGQRALDFYSIHVTKESTHPVKPLAQIAGNRYASVPVGKALSDACMGTIASFLSKYQDIIIEHQKVVKGNQKRLESLRELAGKENLEYPSVTLPPQPHTKEGVDAYNEVIARVRMWVNLNLWQKLKLSRDDAKPLLRLKGFPSFPLVERQANEVDWWDMVCNVKKLINEKKEDGKVFWQNLAGYKRQEALRPYLSSEEDRKKGKKFARYQLGDLLLHLEKKHGEDWGKVYDEAWERIDKKVEGLSKHIKLEEERRSEDAQSKAALTDWLRAKASFVIEGLKEADKDEFCRCELKLQKWYGDLRGKPFAIEAENSILDISGFSKQYNCAFIWQKDGVKKLNLYLIINYFKGGKLRFKKIKPEAFEANRFYTVINKKSGEIVPMEVNFNFDDPNLIILPLAFGKRQGREFIWNDLLSLETGSLKLANGRVIEKTLYNRRTRQDEPALFVALTFERREVLDSSNIKPMNLIGVDRGENIPAVIALTDPEGCPLSRFKDSLGNPTHILRIRESYKEKQRTIQAKKEVEQRRAGGYSRKYASKAKNLADDMVRNTARDLLYYAVTQDAMLIFENLSRGFGRQGKRTFMAERQYTRMEDWLTAKLAYEGLPSKTYLSKTLAQYTSKTCSNCGFTITSADYDRVLEKLKKTATGWMTTINGKELKVEGQITYYNRYKRQNVVKDLSVELDRLSEESVNNDISSWTKGRSGEALSLLKKRFSHRPVQEKFVCLNCGFETHADEQAALNIARSWLFLRSQEYKKYQTNKTTGNTDKRAFVETWQSFYRKKLKEVWKPAV

SEQ ID NO: 33625 - protein, 978 aa, synthetic construct
  REGION 1..978: note = engineered CasX variant
QEIKRINKIRRRLVKDSNTKKAGKTGPMKTLLVPVMTPDLRERLENLRKKPENIPQPISNTSRANLNKLLTDYTEMKKAILHVYWEEFQKDPVGLMSRVAQPASKKIDQNKLKPEMDEKGNLTTAGFACSQCGQPLFVYKLEQVSEKGKAYTNYFGRCNVAEHEKLIKLAQLKPEKDSDEAVTYSLGKFGQRALDFYSIHVTKESTHPVKPLAQIAGNRYASGPVGKALSDACMGTIASFLSKYQDIIIEHQKVVKGNQKRLESLRELAGKENLEYPSVTLPPQPHTKEGVDAYNEVIARVRMWVNLNLWQKLKLSRDDAKPLLRLKGFPSFPLVERQANEVDWWDMVCNVKKLINEKKEDGKVFWQNLAGYKRQEALRPYLSSEEDRKKGKKFARYQLGDLLLHLEKKHGEDWGKVYDEAWERIDKKVEGLSKHIKLEEERRSEDAQSKAALTDWLRAKASFVIEGLKEADKDEFCRCELKLQKWYGDLRGKPFAIEAENSILDISGFSKQYNCAFIWQKDGVKKLNLYLIINYFKGGKLRFKKIKPEAFEANRFYTVINKKSGEIVPMEVNFNFDDPNLIILPLAFGKRQGREFIWNDLLSLETGSLKLANGRVIEKTLYNRRTRQDEPALFVALTFERREVLDSSNIKPMNLIGVDRGENIPAVIALTDPEGCPLSRFKDSLGNPTHILRIRESYKEKQRTIQAKKEVEQRRAGGYSRKYASKAKNLADDMVRNTARDLLYYAVTQDAMLIFENLSRGFGRQGKRTFMAERQYTRMEDWLTAKLAYEGLPSKTYLSKTLAQYTSKTCSNCGFTITSADYDRVLEKLKKTATGWMTTINGKELKVEGQITYYNRYKRQNVVKDLSVELDRLSEESVNNDISSWTKGRSGEALSLLKKRFSHRPVQEKFVCLNCGFETHADEQAALNIARSWLFLRSQEYKKYQTNKTTGNTDKRAFVETWQSFYRKKLKEVWKPAV

SEQ ID NO: 33626 - protein, 977 aa, synthetic construct
  REGION 1..977: note = engineered CasX variant
QEIKRINKIRRRLVKDSNTKKAGKTGPMKTLLVPVMTPDLRERLENLRKKPENIPQPISNTSRANLNKLLTDYTEMKKAILHVYWEEFQKDPVGLMSRVAQPASKKIDQNKLKPEMDEKGNLTTAGFACSQCGQPLFVYKLEQVSEKGKAYTNYFGRCNVAEHEKLILLAQLKPEKDSDEAVTYSLGKFGQRALDFYSIHVTKESTHPVKPLAQIAGNRYASPVGKALSDACMGTIASFLSKYQDIIIEHQKVVKGNQKRLESLRELAGKENLEYPSVTLPPQPHTKEGVDAYNEVIARVRMWVNLNLWQKLKLSRDDAKPLLRLKGFPSFPLVERQANEVDWWDMVCNVKKLINEKKEDGKVFWQNLAGYKRQEALRPYLSSEEDRKKGKKFARYQLGDLLLHLEKKHGEDWGKVYDEAWERIDKKVEGLSKHIKLEEERRSEDAQSKAALTDWLRAKASFVIEGLKEADKDEFCRCELKLQKWYGDLRGKPFAIEAENSILDISGFSKQYNCAFIWQKDGVKKLNLYLIINYFKGGKLRFKKIKPEAFEANRFYTVINKKSGEIVPMEVNFNFDDPNLIILPLAFGKRQGREFIWNDLLSLETGSLKLANGRVIEKTLYNRRTRQDEPALFVALTFERREVLDSSNIKPMNLIGVDRGENIPAVIALTDPEGCPLSRFKDSLGNPTHILRIRESYKEKQRTIQAKKEVEQRRAGGYSRKYASKAKNLADDMVRNTARDLLYYAVTQDAMLIFENLSRGFGRQGKRTFMAERQYTRMEDWLTAKLAYEGLPSKTYLSKTLAQYTSKTCSNCGFTITSADYDRVLEKLKKTATGWMTTINGKELKVEGQITYYNRYKRQNVVKDLSVELDRLSEESVNNDISSWTKGRSGEALSLLKKRFSHRPVQEKFVCLNCGFETHADEQAALNIARSWLFLRSQEYKKYQTNKTTGNTDKRAFVETWQSFYRKKLKEVWKPAV

SEQ ID NO: 33627 - protein, 978 aa, synthetic construct
  REGION 1..978: note = engineered CasX variant
QEIKRINKIRRRLVKDSNTKKAGKTGPMKTLLVPVMTPDLRERLENLRKKPENIPQPISNTSRANLNKLLTDYTEMKKAILHVYWEEFQKDPVGLMSRVAQPASKKIDQNKLKPEMDEKGNLTTAGFACSQCGQPLFVYKLEQVSEKGKAYTNYFGRCNVAEHEKLILLAQLKPEKDSDEAVTYSLGKFGQRALDFYSIHVTKESTHPVKPLAQIAGNRYASYPVGKALSDACMGTIASFLSKYQDIIIEHQKVVKGNQKRLESLRELAGKENLEYPSVTLPPQPHTKEGVDAYNEVIARVRMWVNLNLWQKLKLSRDDAKPLLRLKGFPSFPLVERQANEVDWWDMVCNVKKLINEKKEDGKVFWQNLAGYKRQEALRPYLSSEEDRKKGKKFARYQLGDLLLHLEKKHGEDWGKVYDEAWERIDKKVEGLSKHIKLEEERRSEDAQSKAALTDWLRAKASFVIEGLKEADKDEFCRCELKLQKWYGDLRGKPFAIEAENSILDISGFSKQYNCAFIWQKDGVKKLNLYLIINYFKGGKLRFKKIKPEAFEANRFYTVINKKSGEIVPMEVNFNFDDPNLIILPLAFGKRQGREFIWNDLLSLETGSLKLANGRVIEKTLYNRRTRQDEPALFVALTFERREVLDSSNIKPMNLIGVDRGENIPAVIALTDPEGCPLSRFKDSLGNPTHILRIGESYKEKQRTIQAKKEVEQRRAGGYSRKYASKAKNLADDMVRNTARDLLYYAVTQDAMLIFENLSRGFGRQGKRTFSAERQYTRMEDWLTAKLAYEGLPSKTYLSKTLAQYTSKTCSNCGFTITSADYDRVLEKLKKTATGWMTTINGKELKVEGQITYYNRYKRQNVVKDLSVELDRLSEESVNNDISSWTKGRSGEALSLLKKRFSHRPVQEKFVCLNCGFETHADEQAALNIARSWLFLRSQEYKKYQTNKTTGNTDKRAFVETWQSFYRKKLKEVWKPAV

SEQ ID NO: 33628 - protein, 978 aa, synthetic construct
  REGION 1..978: note = engineered CasX variant
QEIKRINKIRRRLVKDSNTKKAGKTGPMKTLLVPVMTPDLRERLENLRKKPENIPQPISNTSRANLNKLLTDYTEMKKAILHVYWEEFQKDPVGLMSRVAQPASKKIDQNKLKPEMDEKGNLTTAGFACSQCGQPLFVYKLEQVSEKGKAYTNYFGRCNVAEHEKLILLAQLKPEKDSDEAVTYSLGKFGQRALDFYSIHVTKESTHPVKPLAQIAGNRYASHPVGKALSDACMGTIASFLSKYQDIIIEHQKVVKGNQKRLESLRELAGKENLEYPSVTLPPQPHTKEGVDAYNEVIARVRMWVNLNLWQKLKLSRDDAKPLLRLKGFPSFPLVERQANEVDWWDMVCNVKKLINEKKEDGKVFWQNLAGYKRQEALRPYLSSEEDRKKGKKFARYQLGDLLLHLEKKHGEDWGKVYDEAWERIDKKVEGLSKHIKLEEERRSEDAQSKAALTDWLRAKASFVIEGLKEADKDEFCRCELKLQKWYGDLRGKPFAIEAENSILDISGFSKQYNCAFIWQKDGVKKLNLYLIINYFKGGKLRFKKIKPEAFEANRFYTVINKKSGEIVPMEVNFNFDDPNLIILPLAFGKRQGREFIWNDLLSLETGSLKLANGRVIEKTLYNRRTRQDEPALFVALTFERREVLDSSNIKPMNLIGVDRGENIPAVIALTDPEGCPLSRFKDSLGNPTHILRIGESYKEKQRTIQAKKEVEQRRAGGYSRKYASKAKNLADDMVRNTARDLLYYAVTQDAMLIFENLSRGFGRQGKRTFSAERQYTRMEDWLTAKLAYEGLPSKTYLSKTLAQYTSKTCSNCGFTITSADYDRVLEKLKKTATGWMTTINGKELKVEGQITYYNRYKRQNVVKDLSVELDRLSEESVNNDISSWTKGRSGEALSLLKKRFSHRPVQEKFVCLNCGFETHADEQAALNIARSWLFLRSQEYKKYQTNKTTGNTDKRAFVETWQSFYRKKLKEVWKPAV

SEQ ID NO: 33629 - protein, 978 aa, synthetic construct
  REGION 1..978: note = engineered CasX variant
QEIKRINKIRRRLVKDSNTKKAGKTGPMKTLLVPVMTPDLRERLENLRKKPENIPQPISNTSRANLNKLLTDYTEMKKAILHVYWEEFQKDPVGLMSRVAQPASKKIDQNKLKPEMDEKGNLTTAGFACSQCGQPLFVYKLEQVSEKGKAYTNYFGRCNVAEHEKLILLAQLKPEKDSDEAVTYSLGKFGQRALDFYSIHVTKESTHPVKPLAQIAGNRYASSPVGKALSDACMGTIASFLSKYQDIIIEHQKVVKGNQKRLESLRELAGKENLEYPSVTLPPQPHTKEGVDAYNEVIARVRMWVNLNLWQKLKLSRDDAKPLLRLKGFPSFPLVERQANEVDWWDMVCNVKKLINEKKEDGKVFWQNLAGYKRQEALRPYLSSEEDRKKGKKFARYQLGDLLLHLEKKHGEDWGKVYDEAWERIDKKVEGLSKHIKLEEERRSEDAQSKAALTDWLRAKASFVIEGLKEADKDEFCRCELKLQKWYGDLRGKPFAIEAENSILDISGFSKQYNCAFIWQKDGVKKLNLYLIINYFKGGKLRFKKIKPEAFEANRFYTVINKKSGEIVPMEVNFNFDDPNLIILPLAFGKRQGREFIWNDLLSLETGSLKLANGRVIEKTLYNRRTRQDEPALFVALTFERREVLDSSNIKPMNLIGVDRGENIPAVIALTDPEGCPLSRFKDSLGNPTHILRIGESYKEKQRTIQAKKEVEQRRAGGYSRKYASKAKNLADDMVRNTARDLLYYAVTQDAMLIFENLSRGFGRQGKRTFSAERQYTRMEDWLTAKLAYEGLPSKTYLSKTLAQYTSKTCSNCGFTITSADYDRVLEKLKKTATGWMTTINGKELKVEGQITYYNRYKRQNVVKDLSVELDRLSEESVNNDISSWTKGRSGEALSLLKKRFSHRPVQEKFVCLNCGFETHADEQAALNIARSWLFLRSQEYKKYQTNKTTGNTDKRAFVETWQSFYRKKLKEVWKPAV

SEQ ID NO: 33630 - protein, 978 aa, synthetic construct
  REGION 1..978: note = engineered CasX variant
QEIKRINKIRRRLVKDSNTKKAGKTGPMKTLLVPVMTPDLRERLENLRKKPENIPQPISNTSRANLNKLLTDYTEMKKAILHVYWEEFQKDPVGLMSRVAQPASKKIDQNKLKPEMDEKGNLTTAGFACSQCGQPLFVYKLEQVSEKGKAYTNYFGRCNVAEHEKLILLAQLKPEKDSDEAVTYSLGKFGQRALDFYSIHVTKESTHPVKPLAQIAGNRYASTPVGKALSDACMGTIASFLSKYQDIIIEHQKVVKGNQKRLESLRELAGKENLEYPSVTLPPQPHTKEGVDAYNEVIARVRMWVNLNLWQKLKLSRDDAKPLLRLKGFPSFPLVERQANEVDWWDMVCNVKKLINEKKEDGKVFWQNLAGYKRQEALRPYLSSEEDRKKGKKFARYQLGDLLLHLEKKHGEDWGKVYDEAWERIDKKVEGLSKHIKLEEERRSEDAQSKAALTDWLRAKASFVIEGLKEADKDEFCRCELKLQKWYGDLRGKPFAIEAENSILDISGFSKQYNCAFIWQKDGVKKLNLYLIINYFKGGKLRFKKIKPEAFEANRFYTVINKKSGEIVPMEVNFNFDDPNLIILPLAFGKRQGREFIWNDLLSLETGSLKLANGRVIEKTLYNRRTRQDEPALFVALTFERREVLDSSNIKPMNLIGVDRGENIPAVIALTDPEGCPLSRFKDSLGNPTHILRIGESYKEKQRTIQAKKEVEQRRAGGYSRKYASKAKNLADDMVRNTARDLLYYAVTQDAMLIFENLSRGFGRQGKRTFSAERQYTRMEDWLTAKLAYEGLPSKTYLSKTLAQYTSKTCSNCGFTITSADYDRVLEKLKKTATGWMTTINGKELKVEGQITYYNRYKRQNVVKDLSVELDRLSEESVNNDISSWTKGRSGEALSLLKKRFSHRPVQEKFVCLNCGFETHADEQAALNIARSWLFLRSQEYKKYQTNKTTGNTDKRAFVETWQSFYRKKLKEVWKPAV

SEQ ID NO: 33631 - protein, 978 aa, synthetic construct
  REGION 1..978: note = engineered CasX variant
QEIKRINKIRRRLVKDSNTKKAGKTGPMKTLLVPVMTPDLRERLENLRKKPENIPQPISNTSRANLNKLLTDYTEMKKAILHVYWEEFQKDPVGLMSRVAQPASKKIDQNKLKPEMDEKGNLTTAGFACSQCGQPLFVYKLEQVSEKGKAYTNYFGRCNVAEHEKLILLAQLKPEKDSDEAVTYSLGKFGQRALDFYSIHVTKESTHPVKPLAQIAGNRYASAPVGKALSDACMGTIASFLSKYQDIIIEHQKVVKGNQKRLESLRELAGKENLEYPSVTLPPQPHTKEGVDAYNEVIARVRMWVNLNLWQKLKLSRDDAKPLLRLKGFPSFPLVERQANEVDWWDMVCNVKKLINEKKEDGKVFWQNLAGYKRQEALRPYLSSEEDRKKGKKFARYQLGDLLLHLEKKHGEDWGKVYDEAWERIDKKVEGLSKHIKLEEERRSEDAQSKAALTDWLRAKASFVIEGLKEADKDEFCRCELKLQKWYGDLRGKPFAIEAENSILDISGFSKQYNCAFIWQKDGVKKLNLYLIINYFKGGKLRFKKIKPEAFEANRFYTVINKKSGEIVPMEVNFNFDDPNLIILPLAFGKRQGREFIWNDLLSLETGSLKLANGRVIEKTLYNRRTRQDEPALFVALTFERREVLDSSNIKPMNLIGVDRGENIPAVIALTDPEGCPLSRFKDSLGNPTHILRIGESYKEKQRTIQAKKEVEQRRAGGYSRKYASKAKNLADDMVRNTARDLLYYAVTQDAMLIFENLSRGFGRQGKRTFSAERQYTRMEDWLTAKLAYEGLPSKTYLSKTLAQYTSKTCSNCGFTITSADYDRVLEKLKKTATGWMTTINGKELKVEGQITYYNRYKRQNVVKDLSVELDRLSEESVNNDISSWTKGRSGEALSLLKKRFSHRPVQEKFVCLNCGFETHADEQAALNIARSWLFLRSQEYKKYQTNKTTGNTDKRAFVETWQSFYRKKLKEVWKPAV

SEQ ID NO: 33632 - protein, 978 aa, synthetic construct
  REGION 1..978: note = engineered CasX variant
QEIKRINKIRRRLVKDSNTKKAGKTGPMKTLLVPVMTPDLRERLENLRKKPENIPQPISNTSRANLNKLLTDYTEMKKAILHVYWEEFQKDPVGLMSRVAQPASKKIDQNKLKPEMDEKGNLTTAGFACSQCGQPLFVYKLEQVSEKGKAYTNYFGRCNVAEHEKLILLAQLKPEKDSDEAVTYSLGKFGQRALDFYSIHVTKESTHPVKPLAQIAGNRYASVPVGKALSDACMGTIASFLSKYQDIIIEHQKVVKGNQKRLESLRELAGKENLEYPSVTLPPQPHTKEGVDAYNEVIARVRMWVNLNLWQKLKLSRDDAKPLLRLKGFPSFPLVERQANEVDWWDMVCNVKKLINEKKEDGKVFWQNLAGYKRQEALRPYLSSEEDRKKGKKFARYQLGDLLLHLEKKHGEDWGKVYDEAWERIDKKVEGLSKHIKLEEERRSEDAQSKAALTDWLRAKASFVIEGLKEADKDEFCRCELKLQKWYGDLRGKPFAIEAENSILDISGFSKQYNCAFIWQKDGVKKLNLYLIINYFKGGKLRFKKIKPEAFEANRFYTVINKKSGEIVPMEVNFNFDDPNLIILPLAFGKRQGREFIWNDLLSLETGSLKLANGRVIEKTLYNRRTRQDEPALFVALTFERREVLDSSNIKPMNLIGVDRGENIPAVIALTDPEGCPLSRFKDSLGNPTHILRIGESYKEKQRTIQAKKEVEQRRAGGYSRKYASKAKNLADDMVRNTARDLLYYAVTQDAMLIFENLSRGFGRQGKRTFSAERQYTRMEDWLTAKLAYEGLPSKTYLSKTLAQYTSKTCSNCGFTITSADYDRVLEKLKKTATGWMTTINGKELKVEGQITYYNRYKRQNVVKDLSVELDRLSEESVNNDISSWTKGRSGEALSLLKKRFSHRPVQEKFVCLNCGFETHADEQAALNIARSWLFLRSQEYKKYQTNKTTGNTDKRAFVETWQSFYRKKLKEVWKPAV

SEQ ID NO: 33633 - protein, 978 aa, synthetic construct
  REGION 1..978: note = engineered CasX variant
QEIKRINKIRRRLVKDSNTKKAGKTGPMKTLLVPVMTPDLRERLENLRKKPENIPQPISNTSRANLNKLLTDYTEMKKAILHVYWEEFQKDPVGLMSRVAQPASKKIDQNKLKPEMDEKGNLTTAGFACSQCGQPLFVYKLEQVSEKGKAYTNYFGRCNVAEHEKLIKLAQLKPEKDSDEAVTYSLGKFGQRALDFYSIHVTKESTHPVKPLAQIAGNRYASGPVGKALSDACMGTIASFLSKYQDIIIEHQKVVKGNQKRLESLRELAGKENLEYPSVTLPPQPHTKEGVDAYNEVIARVRMWVNLNLWQKLKLSRDDAKPLLRLKGFPSFPLVERQANEVDWWDMVCNVKKLINEKKEDGKVFWQNLAGYKRQEALRPYLSSEEDRKKGKKFARYQLGDLLLHLEKKHGEDWGKVYDEAWERIDKKVEGLSKHIKLEEERRSEDAQSKAALTDWLRAKASFVIEGLKEADKDEFCRCELKLQKWYGDLRGKPFAIEAENSILDISGFSKQYNCAFIWQKDGVKKLNLYLIINYFKGGKLRFKKIKPEAFEANRFYTVINKKSGEIVPMEVNFNFDDPNLIILPLAFGKRQGREFIWNDLLSLETGSLKLANGRVIEKTLYNRRTRQDEPALFVALTFERREVLDSSNIKPMNLIGVDRGENIPAVIALTDPEGCPLSRFKDSLGNPTHILRIGESYKEKQRTIQAKKEVEQRRAGGYSRKYASKAKNLADDMVRNTARDLLYYAVTQDAMLIFENLSRGFGRQGKRTFSAERQYTRMEDWLTAKLAYEGLPSKTYLSKTLAQYTSKTCSNCGFTITSADYDRVLEKLKKTATGWMTTINGKELKVEGQITYYNRYKRQNVVKDLSVELDRLSEESVNNDISSWTKGRSGEALSLLKKRFSHRPVQEKFVCLNCGFETHADEQAALNIARSWLFLRSQEYKKYQTNKTTGNTDKRAFVETWQSFYRKKLKEVWKPAV

SEQ ID NO: 33634 - protein, 977 aa, synthetic construct
  REGION 1..977: note = engineered CasX variant
QEIKRINKIRRRLVKDSNTKKAGKTGPMKTLLVPVMTPDLRERLENLRKKPENIPQPISNTSRANLNKLLTDYTEMKKAILHVYWEEFQKDPVGLMSRVAQPASKKIDQNKLKPEMDEKGNLTTAGFACSQCGQPLFVYKLEQVSEKGKAYTNYFGRCNVAEHEKLILLAQLKPEKDSDEAVTYSLGKFGQRALDFYSIHVTKESTHPVKPLAQIAGNRYASPVGKALSDACMGTIASFLSKYQDIIIEHQKVVKGNQKRLESLRELAGKENLEYPSVTLPPQPHTKEGVDAYNEVIARVRMWVNLNLWQKLKLSRDDAKPLLRLKGFPSFPLVERQANEVDWWDMVCNVKKLINEKKEDGKVFWQNLAGYKRQEALRPYLSSEEDRKKGKKFARYQLGDLLLHLEKKHGEDWGKVYDEAWERIDKKVEGLSKHIKLEEERRSEDAQSKAALTDWLRAKASFVIEGLKEADKDEFCRCELKLQKWYGDLRGKPFAIEAENSILDISGFSKQYNCAFIWQKDGVKKLNLYLIINYFKGGKLRFKKIKPEAFEANRFYTVINKKSGEIVPMEVNFNFDDPNLIILPLAFGKRQGREFIWNDLLSLETGSLKLANGRVIEKTLYNRRTRQDEPALFVALTFERREVLDSSNIKPMNLIGVDRGENIPAVIALTDPEGCPLSRFKDSLGNPTHILRIGESYKEKQRTIQAKKEVEQRRAGGYSRKYASKAKNLADDMVRNTARDLLYYAVTQDAMLIFENLSRGFGRQGKRTFSAERQYTRMEDWLTAKLAYEGLPSKTYLSKTLAQYTSKTCSNCGFTITSADYDRVLEKLKKTATGWMTTINGKELKVEGQITYYNRYKRQNVVKDLSVELDRLSEESVNNDISSWTKGRSGEALSLLKKRFSHRPVQEKFVCLNCGFETHADEQAALNIARSWLFLRSQEYKKYQTNKTTGNTDKRAFVETWQSFYRKKLKEVWKPAV

SEQ ID NO: 33635 - protein, 978 aa, synthetic construct
  REGION 1..978: note = engineered CasX variant
QEIKRINKIRRRLVKDSNTKKAGKTGPMKTLLVPVMTPDLRERLENLRKKPENIPQPISNTSRANLNKLLTDYTEMKKAILHVYWEEFQKDPVGLMSRVAQPASKKIDQNKLKPEMDEKGNLTTAGFACSQCGQPLFVYKLEQVSEKGKAYTNYFGRCNVAEHEKLILLAQLKPEKDSDEAVTYSLGKFGQRALDFYSIHVTKESTHPVKPLAQIAGNRYASYPVGKALSDACMGTIASFLSKYQDIIIEHQKVVKGNQKRLESLRELAGKENLEYPSVTLPPQPHTKEGVDAYNEVIARVRMWVNLNLWQKLKLSRDDAKPLLRLKGFPSFPLVERQANEVDWWDMVCNVKKLINEKKEDGKVFWQNLAGYKRQEALRPYLSSEEDRKKGKKFARYQLGDLLLHLEKKHGEDWGKVYDEAWERIDKKVEGLSKHIKLEEERRSEDAQSKAALTDWLRAKASFVIEGLKEADKDEFCRCELKLQKWYGDLRGKPFAIEAENSILDISGFSKQYNCAFIWQKDGVKKLNLYLIINYFKGGKLRFKKIKPEAFEANRFYTVINKKSGEIVPMEVNFNFDDPNLIILPLAFGKRQGREFIWNDLLSLETGSLKLANGRVIEKTLYNRRTRQDEPALFVALTFERREVLDSSNIKPMNLIGVDRGENIPAVIALTDPEGCPLSRFKDSLGNPTHILRIGESYKEKQRTIQAKKEVEQRRAGGYSRKYASKAKNLADDMVRNTARDLLYYAVTQDAMLIFENLSRGFGRQGKRTFMAERQYTRMEDWLTAKLAYEGLPSKTYLSKTLAQYTSKTCSNCGFTITSADYDRVLEKLKKTATGWMTTINGKELKVEGQITYYNRYKRQNVVKDLSVELDRLSEESVNNDISSWDKGRSGEALSLLKKRFSHRPVQEKFVCLNCGFETHADEQAALNIARSWLFLRSQEYKKYQTNKTTGNTDKRAFVETWQSFYRKKLKEVWKPAV

SEQ ID NO: 33636 - protein, 978 aa, synthetic construct
  REGION 1..978: note = engineered CasX variant
QEIKRINKIRRRLVKDSNTKKAGKTGPMKTLLVPVMTPDLRERLENLRKKPENIPQPISNTSRANLNKLLTDYTEMKKAILHVYWEEFQKDPVGLMSRVAQPASKKIDQNKLKPEMDEKGNLTTAGFACSQCGQPLFVYKLEQVSEKGKAYTNYFGRCNVAEHEKLILLAQLKPEKDSDEAVTYSLGKFGQRALDFYSIHVTKESTHPVKPLAQIAGNRYASHPVGKALSDACMGTIASFLSKYQDIIIEHQKVVKGNQKRLESLRELAGKENLEYPSVTLPPQPHTKEGVDAYNEVIARVRMWVNLNLWQKLKLSRDDAKPLLRLKGFPSFPLVERQANEVDWWDMVCNVKKLINEKKEDGKVFWQNLAGYKRQEALRPYLSSEEDRKKGKKFARYQLGDLLLHLEKKHGEDWGKVYDEAWERIDKKVEGLSKHIKLEEERRSEDAQSKAALTDWLRAKASFVIEGLKEADKDEFCRCELKLQKWYGDLRGKPFAIEAENSILDISGFSKQYNCAFIWQKDGVKKLNLYLIINYFKGGKLRFKKIKPEAFEANRFYTVINKKSGEIVPMEVNFNFDDPNLIILPLAFGKRQGREFIWNDLLSLETGSLKLANGRVIEKTLYNRRTRQDEPALFVALTFERREVLDSSNIKPMNLIGVDRGENIPAVIALTDPEGCPLSRFKDSLGNPTHILRIGESYKEKQRTIQAKKEVEQRRAGGYSRKYASKAKNLADDMVRNTARDLLYYAVTQDAMLIFENLSRGFGRQGKRTFMAERQYTRMEDWLTAKLAYEGLPSKTYLSKTLAQYTSKTCSNCGFTITSADYDRVLEKLKKTATGWMTTINGKELKVEGQITYYNRYKRQNVVKDLSVELDRLSEESVNNDISSWDKGRSGEALSLLKKRFSHRPVQEKFVCLNCGFETHADEQAALNIARSWLFLRSQEYKKYQTNKTTGNTDKRAFVETWQSFYRKKLKEVWKPAV

SEQ ID NO: 33637 - protein, 978 aa, synthetic construct
  REGION 1..978: note = engineered CasX variant
QEIKRINKIRRRLVKDSNTKKAGKTGPMKTLLVPVMTPDLRERLENLRKKPENIPQPISNTSRANLNKLLTDYTEMKKAILHVYWEEFQKDPVGLMSRVAQPASKKIDQNKLKPEMDEKGNLTTAGFACSQCGQPLFVYKLEQVSEKGKAYTNYFGRCNVAEHEKLILLAQLKPEKDSDEAVTYSLGKFGQRALDFYSIHVTKESTHPVKPLAQIAGNRYASSPVGKALSDACMGTIASFLSKYQDIIIEHQKVVKGNQKRLESLRELAGKENLEYPSVTLPPQPHTKEGVDAYNEVIARVRMWVNLNLWQKLKLSRDDAKPLLRLKGFPSFPLVERQANEVDWWDMVCNVKKLINEKKEDGKVFWQNLAGYKRQEALRPYLSSEEDRKKGKKFARYQLGDLLLHLEKKHGEDWGKVYDEAWERIDKKVEGLSKHIKLEEERRSEDAQSKAALTDWLRAKASFVIEGLKEADKDEFCRCELKLQKWYGDLRGKPFAIEAENSILDISGFSKQYNCAFIWQKDGVKKLNLYLIINYFKGGKLRFKKIKPEAFEANRFYTVINKKSGEIVPMEVNFNFDDPNLIILPLAFGKRQGREFIWNDLLSLETGSLKLANGRVIEKTLYNRRTRQDEPALFVALTFERREVLDSSNIKPMNLIGVDRGENIPAVIALTDPEGCPLSRFKDSLGNPTHILRIGESYKEKQRTIQAKKEVEQRRAGGYSRKYASKAKNLADDMVRNTARDLLYYAVTQDAMLIFENLSRGFGRQGKRTFMAERQYTRMEDWLTAKLAYEGLPSKTYLSKTLAQYTSKTCSNCGFTITSADYDRVLEKLKKTATGWMTTINGKELKVEGQITYYNRYKRQNVVKDLSVELDRLSEESVNNDISSWDKGRSGEALSLLKKRFSHRPVQEKFVCLNCGFETHADEQAALNIARSWLFLRSQEYKKYQTNKTTGNTDKRAFVETWQSFYRKKLKEVWKPAV

SEQ ID NO: 33638 - protein, 978 aa, synthetic construct
  REGION 1..978: note = engineered CasX variant
QEIKRINKIRRRLVKDSNTKKAGKTGPMKTLLVPVMTPDLRERLENLRKKPENIPQPISNTSRANLNKLLTDYTEMKKAILHVYWEEFQKDPVGLMSRVAQPASKKIDQNKLKPEMDEKGNLTTAGFACSQCGQPLFVYKLEQVSEKGKAYTNYFGRCNVAEHEKLILLAQLKPEKDSDEAVTYSLGKFGQRALDFYSIHVTKESTHPVKPLAQIAGNRYASTPVGKALSDACMGTIASFLSKYQDIIIEHQKVVKGNQKRLESLRELAGKENLEYPSVTLPPQPHTKEGVDAYNEVIARVRMWVNLNLWQKLKLSRDDAKPLLRLKGFPSFPLVERQANEVDWWDMVCNVKKLINEKKEDGKVFWQNLAGYKRQEALRPYLSSEEDRKKGKKFARYQLGDLLLHLEKKHGEDWGKVYDEAWERIDKKVEGLSKHIKLEEERRSEDAQSKAALTDWLRAKASFVIEGLKEADKDEFCRCELKLQKWYGDLRGKPFAIEAENSILDISGFSKQYNCAFIWQKDGVKKLNLYLIINYFKGGKLRFKKIKPEAFEANRFYTVINKKSGEIVPMEVNFNFDDPNLIILPLAFGKRQGREFIWNDLLSLETGSLKLANGRVIEKTLYNRRTRQDEPALFVALTFERREVLDSSNIKPMNLIGVDRGENIPAVIALTDPEGCPLSRFKDSLGNPTHILRIGESYKEKQRTIQAKKEVEQRRAGGYSRKYASKAKNLADDMVRNTARDLLYYAVTQDAMLIFENLSRGFGRQGKRTFMAERQYTRMEDWLTAKLAYEGLPSKTYLSKTLAQYTSKTCSNCGFTITSADYDRVLEKLKKTATGWMTTINGKELKVEGQITYYNRYKRQNVVKDLSVELDRLSEESVNNDISSWDKGRSGEALSLLKKRFSHRPVQEKFVCLNCGFETHADEQAALNIARSWLFLRSQEYKKYQTNKTTGNTDKRAFVETWQSFYRKKLKEVWKPAV

SEQ ID NO: 33639 - protein, 978 aa, synthetic construct
  REGION 1..978: note = engineered CasX variant
QEIKRINKIRRRLVKDSNTKKAGKTGPMKTLLVPVMTPDLRERLENLRKKPENIPQPISNTSRANLNKLLTDYTEMKKAILHVYWEEFQKDPVGLMSRVAQPASKKIDQNKLKPEMDEKGNLTTAGFACSQCGQPLFVYKLEQVSEKGKAYTNYFGRCNVAEHEKLILLAQLKPEKDSDEAVTYSLGKFGQRALDFYSIHVTKESTHPVKPLAQIAGNRYASAPVGKALSDACMGTIASFLSKYQDIIIEHQKVVKGNQKRLESLRELAGKENLEYPSVTLPPQPHTKEGVDAYNEVIARVRMWVNLNLWQKLKLSRDDAKPLLRLKGFPSFPLVERQANEVDWWDMVCNVKKLINEKKEDGKVFWQNLAGYKRQEALRPYLSSEEDRKKGKKFARYQLGDLLLHLEKKHGEDWGKVYDEAWERIDKKVEGLSKHIKLEEERRSEDAQSKAALTDWLRAKASFVIEGLKEADKDEFCRCELKLQKWYGDLRGKPFAIEAENSILDISGFSKQYNCAFIWQKDGVKKLNLYLIINYFKGGKLRFKKIKPEAFEANRFYTVINKKSGEIVPMEVNFNFDDPNLIILPLAFGKRQGREFIWNDLLSLETGSLKLANGRVIEKTLYNRRTRQDEPALFVALTFERREVLDSSNIKPMNLIGVDRGENIPAVIALTDPEGCPLSRFKDSLGNPTHILRIGESYKEKQRTIQAKKEVEQRRAGGYSRKYASKAKNLADDMVRNTARDLLYYAVTQDAMLIFENLSRGFGRQGKRTFMAERQYTRMEDWLTAKLAYEGLPSKTYLSKTLAQYTSKTCSNCGFTITSADYDRVLEKLKKTATGWMTTINGKELKVEGQITYYNRYKRQNVVKDLSVELDRLSEESVNNDISSWDKGRSGEALSLLKKRFSHRPVQEKFVCLNCGFETHADEQAALNIARSWLFLRSQEYKKYQTNKTTGNTDKRAFVETWQSFYRKKLKEVWKPAV

SEQ ID NO: 33640 - protein, 978 aa, synthetic construct
  REGION 1..978: note = engineered CasX variant
QEIKRINKIRRRLVKDSNTKKAGKTGPMKTLLVPVMTPDLRERLENLRKKPENIPQPISNTSRANLNKLLTDYTEMKKAILHVYWEEFQKDPVGLMSRVAQPASKKIDQNKLKPEMDEKGNLTTAGFACSQCGQPLFVYKLEQVSEKGKAYTNYFGRCNVAEHEKLILLAQLKPEKDSDEAVTYSLGKFGQRALDFYSIHVTKESTHPVKPLAQIAGNRYASVPVGKALSDACMGTIASFLSKYQDIIIEHQKVVKGNQKRLESLRELAGKENLEYPSVTLPPQPHTKEGVDAYNEVIARVRMWVNLNLWQKLKLSRDDAKPLLRLKGFPSFPLVERQANEVDWWDMVCNVKKLINEKKEDGKVFWQNLAGYKRQEALRPYLSSEEDRKKGKKFARYQLGDLLLHLEKKHGEDWGKVYDEAWERIDKKVEGLSKHIKLEEERRSEDAQSKAALTDWLRAKASFVIEGLKEADKDEFCRCELKLQKWYGDLRGKPFAIEAENSILDISGFSKQYNCAFIWQKDGVKKLNLYLIINYFKGGKLRFKKIKPEAFEANRFYTVINKKSGEIVPMEVNFNFDDPNLIILPLAFGKRQGREFIWNDLLSLETGSLKLANGRVIEKTLYNRRTRQDEPALFVALTFERREVLDSSNIKPMNLIGVDRGENIPAVIALTDPEGCPLSRFKDSLGNPTHILRIGESYKEKQRTIQAKKEVEQRRAGGYSRKYASKAKNLADDMVRNTARDLLYYAVTQDAMLIFENLSRGFGRQGKRTFMAERQYTRMEDWLTAKLAYEGLPSKTYLSKTLAQYTSKTCSNCGFTITSADYDRVLEKLKKTATGWMTTINGKELKVEGQITYYNRYKRQNVVKDLSVELDRLSEESVNNDISSWDKGRSGEALSLLKKRFSHRPVQEKFVCLNCGFETHADEQAALNIARSWLFLRSQEYKKYQTNKTTGNTDKRAFVETWQSFYRKKLKEVWKPAV

SEQ ID NO: 33641 - protein, 978 aa, synthetic construct
  REGION 1..978: note = engineered CasX variant
QEIKRINKIRRRLVKDSNTKKAGKTGPMKTLLVPVMTPDLRERLENLRKKPENIPQPISNTSRANLNKLLTDYTEMKKAILHVYWEEFQKDPVGLMSRVAQPASKKIDQNKLKPEMDEKGNLTTAGFACSQCGQPLFVYKLEQVSEKGKAYTNYFGRCNVAEHEKLIKLAQLKPEKDSDEAVTYSLGKFGQRALDFYSIHVTKESTHPVKPLAQIAGNRYASGPVGKALSDACMGTIASFLSKYQDIIIEHQKVVKGNQKRLESLRELAGKENLEYPSVTLPPQPHTKEGVDAYNEVIARVRMWVNLNLWQKLKLSRDDAKPLLRLKGFPSFPLVERQANEVDWWDMVCNVKKLINEKKEDGKVFWQNLAGYKRQEALRPYLSSEEDRKKGKKFARYQLGDLLLHLEKKHGEDWGKVYDEAWERIDKKVEGLSKHIKLEEERRSEDAQSKAALTDWLRAKASFVIEGLKEADKDEFCRCELKLQKWYGDLRGKPFAIEAENSILDISGFSKQYNCAFIWQKDGVKKLNLYLIINYFKGGKLRFKKIKPEAFEANRFYTVINKKSGEIVPMEVNFNFDDPNLIILPLAFGKRQGREFIWNDLLSLETGSLKLANGRVIEKTLYNRRTRQDEPALFVALTFERREVLDSSNIKPMNLIGVDRGENIPAVIALTDPEGCPLSRFKDSLGNPTHILRIGESYKEKQRTIQAKKEVEQRRAGGYSRKYASKAKNLADDMVRNTARDLLYYAVTQDAMLIFENLSRGFGRQGKRTFMAERQYTRMEDWLTAKLAYEGLPSKTYLSKTLAQYTSKTCSNCGFTITSADYDRVLEKLKKTATGWMTTINGKELKVEGQITYYNRYKRQNVVKDLSVELDRLSEESVNNDISSWDKGRSGEALSLLKKRFSHRPVQEKFVCLNCGFETHADEQAALNIARSWLFLRSQEYKKYQTNKTTGNTDKRAFVETWQSFYRKKLKEVWKPAV

SEQ ID NO: 33642 - protein, 977 aa, synthetic construct
  REGION 1..977: note = engineered CasX variant
QEIKRINKIRRRLVKDSNTKKAGKTGPMKTLLVPVMTPDLRERLENLRKKPENIPQPISNTSRANLNKLLTDYTEMKKAILHVYWEEFQKDPVGLMSRVAQPASKKIDQNKLKPEMDEKGNLTTAGFACSQCGQPLFVYKLEQVSEKGKAYTNYFGRCNVAEHEKLILLAQLKPEKDSDEAVTYSLGKFGQRALDFYSIHVTKESTHPVKPLAQIAGNRYASPVGKALSDACMGTIASFLSKYQDIIIEHQKVVKGNQKRLESLRELAGKENLEYPSVTLPPQPHTKEGVDAYNEVIARVRMWVNLNLWQKLKLSRDDAKPLLRLKGFPSFPLVERQANEVDWWDMVCNVKKLINEKKEDGKVFWQNLAGYKRQEALRPYLSSEEDRKKGKKFARYQLGDLLLHLEKKHGEDWGKVYDEAWERIDKKVEGLSKHIKLEEERRSEDAQSKAALTDWLRAKASFVIEGLKEADKDEFCRCELKLQKWYGDLRGKPFAIEAENSILDISGFSKQYNCAFIWQKDGVKKLNLYLIINYFKGGKLRFKKIKPEAFEANRFYTVINKKSGEIVPMEVNFNFDDPNLIILPLAFGKRQGREFIWNDLLSLETGSLKLANGRVIEKTLYNRRTRQDEPALFVALTFERREVLDSSNIKPMNLIGVDRGENIPAVIALTDPEGCPLSRFKDSLGNPTHILRIGESYKEKQRTIQAKKEVEQRRAGGYSRKYASKAKNLADDMVRNTARDLLYYAVTQDAMLIFENLSRGFGRQGKRTFMAERQYTRMEDWLTAKLAYEGLPSKTYLSKTLAQYTSKTCSNCGFTITSADYDRVLEKLKKTATGWMTTINGKELKVEGQITYYNRYKRQNVVKDLSVELDRLSEESVNNDISSWDKGRSGEALSLLKKRFSHRPVQEKFVCLNCGFETHADEQAALNIARSWLFLRSQEYKKYQTNKTTGNTDKRAFVETWQSFYRKKLKEVWKPAV

SEQ ID NO: 33643 - protein, 978 aa, synthetic construct
  REGION 1..978: note = engineered CasX variant
QEIKRINKIRRRLVKDSNTKKAGKTGPMKTLLVPVMTPDLRERLENLRKKPENIPQPISNTSRANLNKLLTDYTEMKKAILHVYWEEFQVDPVGLMSRVAQPASKKIDQNKLKPEMDEKGNLTTAGFACSQCGQPLFVYKLEQVSEKGKAYTNYFGRCNVAEHEKLILLAQLKPEKDSDEAVTYSLGKFGQRALDFYSIHVTKESTHPVKPLAQIAGNRYASYPVGKALSDACMGTIASFLSKYQDIIIEHQKVVKGNQKRLESLRELAGKENLEYPSVTLPPQPHTKEGVDAYNEVIARVRMWVNLNLWQKLKLSRDDAKPLLRLKGFPSFPLVERQANEVDWWDMVCNVKKLINEKKEDGKVFWQNLAGYKRQEALRPYLSSEEDRKKGKKFARYQLGDLLLHLEKKHGEDWGKVYDEAWERIDKKVEGLSKHIKLEEERRSEDAQSKAALTDWLRAKASFVIEGLKEADKDEFCRCELKLQKWYGDLRGKPFAIEAENSILDISGFSKQYNCAFIWQKDGVKKLNLYLIINYFKGGKLRFKKIKPEAFEANRFYTVINKKSGEIVPMEVNFNFDDPNLIILPLAFGKRQGREFIWNDLLSLETGSLKLANGRVIEKTLYNRRTRQDEPALFVALTFERREVLDSSNIKPMNLIGVDRGENIPAVIALTDPEGCPLSRFKDSLGNPTHILRIGESYKEKQRTIQAKKEVEQRRAGGYSRKYASKAKNLADDMVRNTARDLLYYAVTQDAMLIFENLSRGFGRQGKRTFMAERQYTRMEDWLTAKLAYEGLPSKTYLSKTLAQYTSKTCSNCGFTITSADYDRVLEKLKKTATGWMTTINGKELKVEGQITYYNRYKRQNVVKDLSVELDRLSEESVNNDISSWTKGRSGEALSLLKKRFSHRPVQEKFVCLNCGFETHADEQAALNIARSWLFLRSQEYKKYQTNKTTGNTDKRAFVETWQSFYRKKLKEVWKPAV

SEQ ID NO: 33644 - protein, 978 aa, synthetic construct
  REGION 1..978: note = engineered CasX variant
QEIKRINKIRRRLVKDSNTKKAGKTGPMKTLLVPVMTPDLRERLENLRKKPENIPQPISNTSRANLNKLLTDYTEMKKAILHVYWEEFQVDPVGLMSRVAQPASKKIDQNKLKPEMDEKGNLTTAGFACSQCGQPLFVYKLEQVSEKGKAYTNYFGRCNVAEHEKLILLAQLKPEKDSDEAVTYSLGKFGQRALDFYSIHVTKESTHPVKPLAQIAGNRYASHPVGKALSDACMGTIASFLSKYQDIIIEHQKVVKGNQKRLESLRELAGKENLEYPSVTLPPQPHTKEGVDAYNEVIARVRMWVNLNLWQKLKLSRDDAKPLLRLKGFPSFPLVERQANEVDWWDMVCNVKKLINEKKEDGKVFWQNLAGYKRQEALRPYLSSEEDRKKGKKFARYQLGDLLLHLEKKHGEDWGKVYDEAWERIDKKVEGLSKHIKLEEERRSEDAQSKAALTDWLRAKASFVIEGLKEADKDEFCRCELKLQKWYGDLRGKPFAIEAENSILDISGFSKQYNCAFIWQKDGVKKLNLYLIINYFKGGKLRFKKIKPEAFEANRFYTVINKKSGEIVPMEVNFNFDDPNLIILPLAFGKRQGREFIWNDLLSLETGSLKLANGRVIEKTLYNRRTRQDEPALFVALTFERREVLDSSNIKPMNLIGVDRGENIPAVIALTDPEGCPLSRFKDSLGNPTHILRIGESYKEKQRTIQAKKEVEQRRAGGYSRKYASKAKNLADDMVRNTARDLLYYAVTQDAMLIFENLSRGFGRQGKRTFMAERQYTRMEDWLTAKLAYEGLPSKTYLSKTLAQYTSKTCSNCGFTITSADYDRVLEKLKKTATGWMTTINGKELKVEGQITYYNRYKRQNVVKDLSVELDRLSEESVNNDISSWTKGRSGEALSLLKKRFSHRPVQEKFVCLNCGFETHADEQAALNIARSWLFLRSQEYKKYQTNKTTGNTDKRAFVETWQSFYRKKLKEVWKPAV

SEQ ID NO: 33645 - protein, 978 aa, synthetic construct
  REGION 1..978: note = engineered CasX variant
QEIKRINKIRRRLVKDSNTKKAGKTGPMKTLLVPVMTPDLRERLENLRKKPENIPQPISNTSRANLNKLLTDYTEMKKAILHVYWEEFQVDPVGLMSRVAQPASKKIDQNKLKPEMDEKGNLTTAGFACSQCGQPLFVYKLEQVSEKGKAYTNYFGRCNVAEHEKLILLAQLKPEKDSDEAVTYSLGKFGQRALDFYSIHVTKESTHPVKPLAQIAGNRYASSPVGKALSDACMGTIASFLSKYQDIIIEHQKVVKGNQKRLESLRELAGKENLEYPSVTLPPQPHTKEGVDAYNEVIARVRMWVNLNLWQKLKLSRDDAKPLLRLKGFPSFPLVERQANEVDWWDMVCNVKKLINEKKEDGKVFWQNLAGYKRQEALRPYLSSEEDRKKGKKFARYQLGDLLLHLEKKHGEDWGKVYDEAWERIDKKVEGLSKHIKLEEERRSEDAQSKAALTDWLRAKASFVIEGLKEADKDEFCRCELKLQKWYGDLRGKPFAIEAENSILDISGFSKQYNCAFIWQKDGVKKLNLYLIINYFKGGKLRFKKIKPEAFEANRFYTVINKKSGEIVPMEVNFNFDDPNLIILPLAFGKRQGREFIWNDLLSLETGSLKLANGRVIEKTLYNRRTRQDEPALFVALTFERREVLDSSNIKPMNLIGVDRGENIPAVIALTDPEGCPLSRFKDSLGNPTHILRIGESYKEKQRTIQAKKEVEQRRAGGYSRKYASKAKNLADDMVRNTARDLLYYAVTQDAMLIFENLSRGFGRQGKRTFMAERQYTRMEDWLTAKLAYEGLPSKTYLSKTLAQYTSKTCSNCGFTITSADYDRVLEKLKKTATGWMTTINGKELKVEGQITYYNRYKRQNVVKDLSVELDRLSEESVNNDISSWTKGRSGEALSLLKKRFSHRPVQEKFVCLNCGFETHADEQAALNIARSWLFLRSQEYKKYQTNKTTGNTDKRAFVETWQSFYRKKLKEVWKPAV

SEQ ID NO: 33646 - protein, 978 aa, synthetic construct
  REGION 1..978: note = engineered CasX variant
QEIKRINKIRRRLVKDSNTKKAGKTGPMKTLLVPVMTPDLRERLENLRKKPENIPQPISNTSRANLNKLLTDYTEMKKAILHVYWEEFQVDPVGLMSRVAQPASKKIDQNKLKPEMDEKGNLTTAGFACSQCGQPLFVYKLEQVSEKGKAYTNYFGRCNVAEHEKLILLAQLKPEKDSDEAVTYSLGKFGQRALDFYSIHVTKESTHPVKPLAQIAGNRYASTPVGKALSDACMGTIASFLSKYQDIIIEHQKVVKGNQKRLESLRELAGKENLEYPSVTLPPQPHTKEGVDAYNEVIARVRMWVNLNLWQKLKLSRDDAKPLLRLKGFPSFPLVERQANEVDWWDMVCNVKKLINEKKEDGKVFWQNLAGYKRQEALRPYLSSEEDRKKGKKFARYQLGDLLLHLEKKHGEDWGKVYDEAWERIDKKVEGLSKHIKLEEERRSEDAQSKAALTDWLRAKASFVIEGLKEADKDEFCRCELKLQKWYGDLRGKPFAIEAENSILDISGFSKQYNCAFIWQKDGVKKLNLYLIINYFKGGKLRFKKIKPEAFEANRFYTVINKKSGEIVPMEVNFNFDDPNLIILPLAFGKRQGREFIWNDLLSLETGSLKLANGRVIEKTLYNRRTRQDEPALFVALTFERREVLDSSNIKPMNLIGVDRGENIPAVIALTDPEGCPLSRFKDSLGNPTHILRIGESYKEKQRTIQAKKEVEQRRAGGYSRKYASKAKNLADDMVRNTARDLLYYAVTQDAMLIFENLSRGFGRQGKRTFMAERQYTRMEDWLTAKLAYEGLPSKTYLSKTLAQYTSKTCSNCGFTITSADYDRVLEKLKKTATGWMTTINGKELKVEGQITYYNRYKRQNVVKDLSVELDRLSEESVNNDISSWTKGRSGEALSLLKKRFSHRPVQEKFVCLNCGFETHADEQAALNIARSWLFLRSQEYKKYQTNKTTGNTDKRAFVETWQSFYRKKLKEVWKPAV

SEQ ID NO: 33647 - protein, 978 aa, synthetic construct
  REGION 1..978: note = engineered CasX variant
QEIKRINKIRRRLVKDSNTKKAGKTGPMKTLLVPVMTPDLRERLENLRKKPENIPQPISNTSRANLNKLLTDYTEMKKAILHVYWEEFQVDPVGLMSRVAQPASKKIDQNKLKPEMDEKGNLTTAGFACSQCGQPLFVYKLEQVSEKGKAYTNYFGRCNVAEHEKLILLAQLKPEKDSDEAVTYSLGKFGQRALDFYSIHVTKESTHPVKPLAQIAGNRYASAPVGKALSDACMGTIASFLSKYQDIIIEHQKVVKGNQKRLESLRELAGKENLEYPSVTLPPQPHTKEGVDAYNEVIARVRMWVNLNLWQKLKLSRDDAKPLLRLKGFPSFPLVERQANEVDWWDMVCNVKKLINEKKEDGKVFWQNLAGYKRQEALRPYLSSEEDRKKGKKFARYQLGDLLLHLEKKHGEDWGKVYDEAWERIDKKVEGLSKHIKLEEERRSEDAQSKAALTDWLRAKASFVIEGLKEADKDEFCRCELKLQKWYGDLRGKPFAIEAENSILDISGFSKQYNCAFIWQKDGVKKLNLYLIINYFKGGKLRFKKIKPEAFEANRFYTVINKKSGEIVPMEVNFNFDDPNLIILPLAFGKRQGREFIWNDLLSLETGSLKLANGRVIEKTLYNRRTRQDEPALFVALTFERREVLDSSNIKPMNLIGVDRGENIPAVIALTDPEGCPLSRFKDSLGNPTHILRIGESYKEKQRTIQAKKEVEQRRAGGYSRKYASKAKNLADDMVRNTARDLLYYAVTQDAMLIFENLSRGFGRQGKRTFMAERQYTRMEDWLTAKLAYEGLPSKTYLSKTLAQYTSKTCSNCGFTITSADYDRVLEKLKKTATGWMTTINGKELKVEGQITYYNRYKRQNVVKDLSVELDRLSEESVNNDISSWTKGRSGEALSLLKKRFSHRPVQEKFVCLNCGFETHADEQAALNIARSWLFLRSQEYKKYQTNKTTGNTDKRAFVETWQSFYRKKLKEVWKPAV

SEQ ID NO: 33648 - protein, 978 aa, synthetic construct
  REGION 1..978: note = engineered CasX variant
QEIKRINKIRRRLVKDSNTKKAGKTGPMKTLLVPVMTPDLRERLENLRKKPENIPQPISNTSRANLNKLLTDYTEMKKAILHVYWEEFQVDPVGLMSRVAQPASKKIDQNKLKPEMDEKGNLTTAGFACSQCGQPLFVYKLEQVSEKGKAYTNYFGRCNVAEHEKLILLAQLKPEKDSDEAVTYSLGKFGQRALDFYSIHVTKESTHPVKPLAQIAGNRYASVPVGKALSDACMGTIASFLSKYQDIIIEHQKVVKGNQKRLESLRELAGKENLEYPSVTLPPQPHTKEGVDAYNEVIARVRMWVNLNLWQKLKLSRDDAKPLLRLKGFPSFPLVERQANEVDWWDMVCNVKKLINEKKEDGKVFWQNLAGYKRQEALRPYLSSEEDRKKGKKFARYQLGDLLLHLEKKHGEDWGKVYDEAWERIDKKVEGLSKHIKLEEERRSEDAQSKAALTDWLRAKASFVIEGLKEADKDEFCRCELKLQKWYGDLRGKPFAIEAENSILDISGFSKQYNCAFIWQKDGVKKLNLYLIINYFKGGKLRFKKIKPEAFEANRFYTVINKKSGEIVPMEVNFNFDDPNLIILPLAFGKRQGREFIWNDLLSLETGSLKLANGRVIEKTLYNRRTRQDEPALFVALTFERREVLDSSNIKPMNLIGVDRGENIPAVIALTDPEGCPLSRFKDSLGNPTHILRIGESYKEKQRTIQAKKEVEQRRAGGYSRKYASKAKNLADDMVRNTARDLLYYAVTQDAMLIFENLSRGFGRQGKRTFMAERQYTRMEDWLTAKLAYEGLPSKTYLSKTLAQYTSKTCSNCGFTITSADYDRVLEKLKKTATGWMTTINGKELKVEGQITYYNRYKRQNVVKDLSVELDRLSEESVNNDISSWTKGRSGEALSLLKKRFSHRPVQEKFVCLNCGFETHADEQAALNIARSWLFLRSQEYKKYQTNKTTGNTDKRAFVETWQSFYRKKLKEVWKPAV

SEQ ID NO: 33649 - protein, 978 aa, synthetic construct
  REGION 1..978: note = engineered CasX variant
QEIKRINKIRRRLVKDSNTKKAGKTGPMKTLLVPVMTPDLRERLENLRKKPENIPQPISNTSRANLNKLLTDYTEMKKAILHVYWEEFQVDPVGLMSRVAQPASKKIDQNKLKPEMDEKGNLTTAGFACSQCGQPLFVYKLEQVSEKGKAYTNYFGRCNVAEHEKLIKLAQLKPEKDSDEAVTYSLGKFGQRALDFYSIHVTKESTHPVKPLAQIAGNRYASGPVGKALSDACMGTIASFLSKYQDIIIEHQKVVKGNQKRLESLRELAGKENLEYPSVTLPPQPHTKEGVDAYNEVIARVRMWVNLNLWQKLKLSRDDAKPLLRLKGFPSFPLVERQANEVDWWDMVCNVKKLINEKKEDGKVFWQNLAGYKRQEALRPYLSSEEDRKKGKKFARYQLGDLLLHLEKKHGEDWGKVYDEAWERIDKKVEGLSKHIKLEEERRSEDAQSKAALTDWLRAKASFVIEGLKEADKDEFCRCELKLQKWYGDLRGKPFAIEAENSILDISGFSKQYNCAFIWQKDGVKKLNLYLIINYFKGGKLRFKKIKPEAFEANRFYTVINKKSGEIVPMEVNFNFDDPNLIILPLAFGKRQGREFIWNDLLSLETGSLKLANGRVIEKTLYNRRTRQDEPALFVALTFERREVLDSSNIKPMNLIGVDRGENIPAVIALTDPEGCPLSRFKDSLGNPTHILRIGESYKEKQRTIQAKKEVEQRRAGGYSRKYASKAKNLADDMVRNTARDLLYYAVTQDAMLIFENLSRGFGRQGKRTFMAERQYTRMEDWLTAKLAYEGLPSKTYLSKTLAQYTSKTCSNCGFTITSADYDRVLEKLKKTATGWMTTINGKELKVEGQITYYNRYKRQNVVKDLSVELDRLSEESVNNDISSWTKGRSGEALSLLKKRFSHRPVQEKFVCLNCGFETHADEQAALNIARSWLFLRSQEYKKYQTNKTTGNTDKRAFVETWQSFYRKKLKEVWKPAV

SEQ ID NO: 33650 - protein, 977 aa, synthetic construct
  REGION 1..977: note = engineered CasX variant
QEIKRINKIRRRLVKDSNTKKAGKTGPMKTLLVPVMTPDLRERLENLRKKPENIPQPISNTSRANLNKLLTDYTEMKKAILHVYWEEFQVDPVGLMSRVAQPASKKIDQNKLKPEMDEKGNLTTAGFACSQCGQPLFVYKLEQVSEKGKAYTNYFGRCNVAEHEKLILLAQLKPEKDSDEAVTYSLGKFGQRALDFYSIHVTKESTHPVKPLAQIAGNRYASPVGKALSDACMGTIASFLSKYQDIIIEHQKVVKGNQKRLESLRELAGKENLEYPSVTLPPQPHTKEGVDAYNEVIARVRMWVNLNLWQKLKLSRDDAKPLLRLKGFPSFPLVERQANEVDWWDMVCNVKKLINEKKEDGKVFWQNLAGYKRQEALRPYLSSEEDRKKGKKFARYQLGDLLLHLEKKHGEDWGKVYDEAWERIDKKVEGLSKHIKLEEERRSEDAQSKAALTDWLRAKASFVIEGLKEADKDEFCRCELKLQKWYGDLRGKPFAIEAENSILDISGFSKQYNCAFIWQKDGVKKLNLYLIINYFKGGKLRFKKIKPEAFEANRFYTVINKKSGEIVPMEVNFNFDDPNLIILPLAFGKRQGREFIWNDLLSLETGSLKLANGRVIEKTLYNRRTRQDEPALFVALTFERREVLDSSNIKPMNLIGVDRGENIPAVIALTDPEGCPLSRFKDSLGNPTHILRIGESYKEKQRTIQAKKEVEQRRAGGYSRKYASKAKNLADDMVRNTARDLLYYAVTQDAMLIFENLSRGFGRQGKRTFMAERQYTRMEDWLTAKLAYEGLPSKTYLSKTLAQYTSKTCSNCGFTITSADYDRVLEKLKKTATGWMTTINGKELKVEGQITYYNRYKRQNVVKDLSVELDRLSEESVNNDISSWTKGRSGEALSLLKKRFSHRPVQEKFVCLNCGFETHADEQAALNIARSWLFLRSQEYKKYQTNKTTGNTDKRAFVETWQSFYRKKLKEVWKPAV

SEQ ID NO: 33651 - protein, 978 aa, synthetic construct
  REGION 1..978: note = engineered CasX variant
QEIKRLNKIRRRLVKDSNTKKAGKTGPMKTLLVPVMTPDLRERLENLRKKPENIPQPISNTSRANLNKLLTDYTEMKKAILHVYWEEFQKDPVGLMSRVAQPASKKIDQNKLKPEMDEKGNLTTAGFACSQCGQPLFVYKLEQVSEKGKAYTNYFGRCNVAEHEKLILLAQLKPEKDSDEAVTYSLGKFGQRALDFYSIHVTKESTHPVKPLAQIAGNRYASYPVGKALSDACMGTIASFLSKYQDIIIEHQKVVKGNQKRLESLRELAGKENLEYPSVTLPPQPHTKEGVDAYNEVIARVRMWVNLNLWQKLKLSRDDAKPLLRLKGFPSFPLVERQANEVDWWDMVCNVKKLINEKKEDGKVFWQNLAGYKRQEALRPYLSSEEDRKKGKKFARYQLGDLLLHLEKKHGEDWGKVYDEAWERIDKKVEGLSKHIKLEEERRSEDAQSKAALTDWLRAKASFVIEGLKEADKDEFCRCELKLQKWYGDLRGKPFAIEAENSILDISGFSKQYNCAFIWQKDGVKKLNLYLIINYFKGGKLRFKKIKPEAFEANRFYTVINKKSGEIVPMEVNFNFDDPNLIILPLAFGKRQGREFIWNDLLSLETGSLKLANGRVIEKTLYNRRTRQDEPALFVALTFERREVLDSSNIKPMNLIGVDRGENIPAVIALTDPEGCPLSRFKDSLGNPTHILRIGESYKEKQRTIQAKKEVEQRRAGGYSRKYASKAKNLADDMVRNTARDLLYYAVTQDAMLIFENLSRGFGRQGKRTFMAERQYTRMEDWLTAKLAYEGLPSKTYLSKTLAQYTSKTCSNCGFTITSADYDRVLEKLKKTATGWMTTINGKELKVEGQITYYNRYKRQNVVKDLSVELDRLSEESVNNDISSWTKGRSGEALSLLKKRFSHRPVQEKFVCLNCGFETHADEQAALNIARSWLFLRSQEYKKYQTNKTTGNTDKRAFVETWQSFYRKKLKEVWKPAV

SEQ ID NO: 33652 - protein, 978 aa, synthetic construct
  REGION 1..978: note = engineered CasX variant
QEIKRLNKIRRRLVKDSNTKKAGKTGPMKTLLVPVMTPDLRERLENLRKKPENIPQPISNTSRANLNKLLTDYTEMKKAILHVYWEEFQKDPVGLMSRVAQPASKKIDQNKLKPEMDEKGNLTTAGFACSQCGQPLFVYKLEQVSEKGKAYTNYFGRCNVAEHEKLILLAQLKPEKDSDEAVTYSLGKFGQRALDFYSIHVTKESTHPVKPLAQIAGNRYASHPVGKALSDACMGTIASFLSKYQDIIIEHQKVVKGNQKRLESLRELAGKENLEYPSVTLPPQPHTKEGVDAYNEVIARVRMWVNLNLWQKLKLSRDDAKPLLRLKGFPSFPLVERQANEVDWWDMVCNVKKLINEKKEDGKVFWQNLAGYKRQEALRPYLSSEEDRKKGKKFARYQLGDLLLHLEKKHGEDWGKVYDEAWERIDKKVEGLSKHIKLEEERRSEDAQSKAALTDWLRAKASFVIEGLKEADKDEFCRCELKLQKWYGDLRGKPFAIEAENSILDISGFSKQYNCAFIWQKDGVKKLNLYLIINYFKGGKLRFKKIKPEAFEANRFYTVINKKSGEIVPMEVNFNFDDPNLIILPLAFGKRQGREFIWNDLLSLETGSLKLANGRVIEKTLYNRRTRQDEPALFVALTFERREVLDSSNIKPMNLIGVDRGENIPAVIALTDPEGCPLSRFKDSLGNPTHILRIGESYKEKQRTIQAKKEVEQRRAGGYSRKYASKAKNLADDMVRNTARDLLYYAVTQDAMLIFENLSRGFGRQGKRTFMAERQYTRMEDWLTAKLAYEGLPSKTYLSKTLAQYTSKTCSNCGFTITSADYDRVLEKLKKTATGWMTTINGKELKVEGQITYYNRYKRQNVVKDLSVELDRLSEESVNNDISSWTKGRSGEALSLLKKRFSHRPVQEKFVCLNCGFETHADEQAALNIARSWLFLRSQEYKKYQTNKTTGNTDKRAFVETWQSFYRKKLKEVWKPAV

SEQ ID NO: 33653 - protein, 978 aa, synthetic construct
  REGION 1..978: note = engineered CasX variant
QEIKRLNKIRRRLVKDSNTKKAGKTGPMKTLLVPVMTPDLRERLENLRKKPENIPQPISNTSRANLNKLLTDYTEMKKAILHVYWEEFQKDPVGLMSRVAQPASKKIDQNKLKPEMDEKGNLTTAGFACSQCGQPLFVYKLEQVSEKGKAYTNYFGRCNVAEHEKLILLAQLKPEKDSDEAVTYSLGKFGQRALDFYSIHVTKESTHPVKPLAQIAGNRYASSPVGKALSDACMGTIASFLSKYQDIIIEHQKVVKGNQKRLESLRELAGKENLEYPSVTLPPQPHTKEGVDAYNEVIARVRMWVNLNLWQKLKLSRDDAKPLLRLKGFPSFPLVERQANEVDWWDMVCNVKKLINEKKEDGKVFWQNLAGYKRQEALRPYLSSEEDRKKGKKFARYQLGDLLLHLEKKHGEDWGKVYDEAWERIDKKVEGLSKHIKLEEERRSEDAQSKAALTDWLRAKASFVIEGLKEADKDEFCRCELKLQKWYGDLRGKPFAIEAENSILDISGFSKQYNCAFIWQKDGVKKLNLYLIINYFKGGKLRFKKIKPEAFEANRFYTVINKKSGEIVPMEVNFNFDDPNLIILPLAFGKRQGREFIWNDLLSLETGSLKLANGRVIEKTLYNRRTRQDEPALFVALTFERREVLDSSNIKPMNLIGVDRGENIPAVIALTDPEGCPLSRFKDSLGNPTHILRIGESYKEKQRTIQAKKEVEQRRAGGYSRKYASKAKNLADDMVRNTARDLLYYAVTQDAMLIFENLSRGFGRQGKRTFMAERQYTRMEDWLTAKLAYEGLPSKTYLSKTLAQYTSKTCSNCGFTITSADYDRVLEKLKKTATGWMTTINGKELKVEGQITYYNRYKRQNVVKDLSVELDRLSEESVNNDISSWTKGRSGEALSLLKKRFSHRPVQEKFVCLNCGFETHADEQAALNIARSWLFLRSQEYKKYQTNKTTGNTDKRAFVETWQSFYRKKLKEVWKPAV

SEQ ID NO: 33654 - protein, 978 aa, synthetic construct
  REGION 1..978: note = engineered CasX variant
QEIKRLNKIRRRLVKDSNTKKAGKTGPMKTLLVPVMTPDLRERLENLRKKPENIPQPISNTSRANLNKLLTDYTEMKKAILHVYWEEFQKDPVGLMSRVAQPASKKIDQNKLKPEMDEKGNLTTAGFACSQCGQPLFVYKLEQVSEKGKAYTNYFGRCNVAEHEKLILLAQLKPEKDSDEAVTYSLGKFGQRALDFYSIHVTKESTHPVKPLAQIAGNRYASTPVGKALSDACMGTIASFLSKYQDIIIEHQKVVKGNQKRLESLRELAGKENLEYPSVTLPPQPHTKEGVDAYNEVIARVRMWVNLNLWQKLKLSRDDAKPLLRLKGFPSFPLVERQANEVDWWDMVCNVKKLINEKKEDGKVFWQNLAGYKRQEALRPYLSSEEDRKKGKKFARYQLGDLLLHLEKKHGEDWGKVYDEAWERIDKKVEGLSKHIKLEEERRSEDAQSKAALTDWLRAKASFVIEGLKEADKDEFCRCELKLQKWYGDLRGKPFAIEAENSILDISGFSKQYNCAFIWQKDGVKKLNLYLIINYFKGGKLRFKKIKPEAFEANRFYTVINKKSGEIVPMEVNFNFDDPNLIILPLAFGKRQGREFIWNDLLSLETGSLKLANGRVIEKTLYNRRTRQDEPALFVALTFERREVLDSSNIKPMNLIGVDRGENIPAVIALTDPEGCPLSRFKDSLGNPTHILRIGESYKEKQRTIQAKKEVEQRRAGGYSRKYASKAKNLADDMVRNTARDLLYYAVTQDAMLIFENLSRGFGRQGKRTFMAERQYTRMEDWLTAKLAYEGLPSKTYLSKTLAQYTSKTCSNCGFTITSADYDRVLEKLKKTATGWMTTINGKELKVEGQITYYNRYKRQNVVKDLSVELDRLSEESVNNDISSWTKGRSGEALSLLKKRFSHRPVQEKFVCLNCGFETHADEQAALNIARSWLFLRSQEYKKYQTNKTTGNTDKRAFVETWQSFYRKKLKEVWKPAV

SEQ ID NO: 33655 - protein, 978 aa, synthetic construct
  REGION 1..978: note = engineered CasX variant
QEIKRLNKIRRRLVKDSNTKKAGKTGPMKTLLVPVMTPDLRERLENLRKKPENIPQPISNTSRANLNKLLTDYTEMKKAILHVYWEEFQKDPVGLMSRVAQPASKKIDQNKLKPEMDEKGNLTTAGFACSQCGQPLFVYKLEQVSEKGKAYTNYFGRCNVAEHEKLILLAQLKPEKDSDEAVTYSLGKFGQRALDFYSIHVTKESTHPVKPLAQIAGNRYASAPVGKALSDACMGTIASFLSKYQDIIIEHQKVVKGNQKRLESLRELAGKENLEYPSVTLPPQPHTKEGVDAYNEVIARVRMWVNLNLWQKLKLSRDDAKPLLRLKGFPSFPLVERQANEVDWWDMVCNVKKLINEKKEDGKVFWQNLAGYKRQEALRPYLSSEEDRKKGKKFARYQLGDLLLHLEKKHGEDWGKVYDEAWERIDKKVEGLSKHIKLEEERRSEDAQSKAALTDWLRAKASFVIEGLKEADKDEFCRCELKLQKWYGDLRGKPFAIEAENSILDISGFSKQYNCAFIWQKDGVKKLNLYLIINYFKGGKLRFKKIKPEAFEANRFYTVINKKSGEIVPMEVNFNFDDPNLIILPLAFGKRQGREFIWNDLLSLETGSLKLANGRVIEKTLYNRRTRQDEPALFVALTFERREVLDSSNIKPMNLIGVDRGENIPAVIALTDPEGCPLSRFKDSLGNPTHILRIGESYKEKQRTIQAKKEVEQRRAGGYSRKYASKAKNLADDMVRNTARDLLYYAVTQDAMLIFENLSRGFGRQGKRTFMAERQYTRMEDWLTAKLAYEGLPSKTYLSKTLAQYTSKTCSNCGFTITSADYDRVLEKLKKTATGWMTTINGKELKVEGQITYYNRYKRQNVVKDLSVELDRLSEESVNNDISSWTKGRSGEALSLLKKRFSHRPVQEKFVCLNCGFETHADEQAALNIARSWLFLRSQEYKKYQTNKTTGNTDKRAFVETWQSFYRKKLKEVWKPAV

SEQ ID NO: 33656 - protein, 978 aa, synthetic construct
  REGION 1..978: note = engineered CasX variant
QEIKRLNKIRRRLVKDSNTKKAGKTGPMKTLLVPVMTPDLRERLENLRKKPENIPQPISNTSRANLNKLLTDYTEMKKAILHVYWEEFQKDPVGLMSRVAQPASKKIDQNKLKPEMDEKGNLTTAGFACSQCGQPLFVYKLEQVSEKGKAYTNYFGRCNVAEHEKLILLAQLKPEKDSDEAVTYSLGKFGQRALDFYSIHVTKESTHPVKPLAQIAGNRYASVPVGKALSDACMGTIASFLSKYQDIIIEHQKVVKGNQKRLESLRELAGKENLEYPSVTLPPQPHTKEGVDAYNEVIARVRMWVNLNLWQKLKLSRDDAKPLLRLKGFPSFPLVERQANEVDWWDMVCNVKKLINEKKEDGKVFWQNLAGYKRQEALRPYLSSEEDRKKGKKFARYQLGDLLLHLEKKHGEDWGKVYDEAWERIDKKVEGLSKHIKLEEERRSEDAQSKAALTDWLRAKASFVIEGLKEADKDEFCRCELKLQKWYGDLRGKPFAIEAENSILDISGFSKQYNCAFIWQKDGVKKLNLYLIINYFKGGKLRFKKIKPEAFEANRFYTVINKKSGEIVPMEVNFNFDDPNLIILPLAFGKRQGREFIWNDLLSLETGSLKLANGRVIEKTLYNRRTRQDEPALFVALTFERREVLDSSNIKPMNLIGVDRGENIPAVIALTDPEGCPLSRFKDSLGNPTHILRIGESYKEKQRTIQAKKEVEQRRAGGYSRKYASKAKNLADDMVRNTARDLLYYAVTQDAMLIFENLSRGFGRQGKRTFMAERQYTRMEDWLTAKLAYEGLPSKTYLSKTLAQYTSKTCSNCGFTITSADYDRVLEKLKKTATGWMTTINGKELKVEGQITYYNRYKRQNVVKDLSVELDRLSEESVNNDISSWTKGRSGEALSLLKKRFSHRPVQEKFVCLNCGFETHADEQAALNIARSWLFLRSQEYKKYQTNKTTGNTDKRAFVETWQSFYRKKLKEVWKPAV

SEQ ID NO: 33657 - protein, 978 aa, synthetic construct
  REGION 1..978: note = engineered CasX variant
QEIKRLNKIRRRLVKDSNTKKAGKTGPMKTLLVPVMTPDLRERLENLRKKPENIPQPISNTSRANLNKLLTDYTEMKKAILHVYWEEFQKDPVGLMSRVAQPASKKIDQNKLKPEMDEKGNLTTAGFACSQCGQPLFVYKLEQVSEKGKAYTNYFGRCNVAEHEKLIKLAQLKPEKDSDEAVTYSLGKFGQRALDFYSIHVTKESTHPVKPLAQIAGNRYASGPVGKALSDACMGTIASFLSKYQDIIIEHQKVVKGNQKRLESLRELAGKENLEYPSVTLPPQPHTKEGVDAYNEVIARVRMWVNLNLWQKLKLSRDDAKPLLRLKGFPSFPLVERQANEVDWWDMVCNVKKLINEKKEDGKVFWQNLAGYKRQEALRPYLSSEEDRKKGKKFARYQLGDLLLHLEKKHGEDWGKVYDEAWERIDKKVEGLSKHIKLEEERRSEDAQSKAALTDWLRAKASFVIEGLKEADKDEFCRCELKLQKWYGDLRGKPFAIEAENSILDISGFSKQYNCAFIWQKDGVKKLNLYLIINYFKGGKLRFKKIKPEAFEANRFYTVINKKSGEIVPMEVNFNFDDPNLIILPLAFGKRQGREFIWNDLLSLETGSLKLANGRVIEKTLYNRRTRQDEPALFVALTFERREVLDSSNIKPMNLIGVDRGENIPAVIALTDPEGCPLSRFKDSLGNPTHILRIGESYKEKQRTIQAKKEVEQRRAGGYSRKYASKAKNLADDMVRNTARDLLYYAVTQDAMLIFENLSRGFGRQGKRTFMAERQYTRMEDWLTAKLAYEGLPSKTYLSKTLAQYTSKTCSNCGFTITSADYDRVLEKLKKTATGWMTTINGKELKVEGQITYYNRYKRQNVVKDLSVELDRLSEESVNNDISSWTKGRSGEALSLLKKRFSHRPVQEKFVCLNCGFETHADEQAALNIARSWLFLRSQEYKKYQTNKTTGNTDKRAFVETWQSFYRKKLKEVWKPAV

SEQ ID NO: 33658 - protein, 977 aa, synthetic construct
  REGION 1..977: note = engineered CasX variant
QEIKRLNKIRRRLVKDSNTKKAGKTGPMKTLLVPVMTPDLRERLENLRKKPENIPQPISNTSRANLNKLLTDYTEMKKAILHVYWEEFQKDPVGLMSRVAQPASKKIDQNKLKPEMDEKGNLTTAGFACSQCGQPLFVYKLEQVSEKGKAYTNYFGRCNVAEHEKLILLAQLKPEKDSDEAVTYSLGKFGQRALDFYSIHVTKESTHPVKPLAQIAGNRYASPVGKALSDACMGTIASFLSKYQDIIIEHQKVVKGNQKRLESLRELAGKENLEYPSVTLPPQPHTKEGVDAYNEVIARVRMWVNLNLWQKLKLSRDDAKPLLRLKGFPSFPLVERQANEVDWWDMVCNVKKLINEKKEDGKVFWQNLAGYKRQEALRPYLSSEEDRKKGKKFARYQLGDLLLHLEKKHGEDWGKVYDEAWERIDKKVEGLSKHIKLEEERRSEDAQSKAALTDWLRAKASFVIEGLKEADKDEFCRCELKLQKWYGDLRGKPFAIEAENSILDISGFSKQYNCAFIWQKDGVKKLNLYLIINYFKGGKLRFKKIKPEAFEANRFYTVINKKSGEIVPMEVNFNFDDPNLIILPLAFGKRQGREFIWNDLLSLETGSLKLANGRVIEKTLYNRRTRQDEPALFVALTFERREVLDSSNIKPMNLIGVDRGENIPAVIALTDPEGCPLSRFKDSLGNPTHILRIGESYKEKQRTIQAKKEVEQRRAGGYSRKYASKAKNLADDMVRNTARDLLYYAVTQDAMLIFENLSRGFGRQGKRTFMAERQYTRMEDWLTAKLAYEGLPSKTYLSKTLAQYTSKTCSNCGFTITSADYDRVLEKLKKTATGWMTTINGKELKVEGQITYYNRYKRQNVVKDLSVELDRLSEESVNNDISSWTKGRSGEALSLLKKRFSHRPVQEKFVCLNCGFETHADEQAALNIARSWLFLRSQEYKKYQTNKTTGNTDKRAFVETWQSFYRKKLKEVWKPAV

SEQ ID NO: 33659 - protein, 978 aa, synthetic construct
  REGION 1..978: note = engineered CasX variant
QEIKRINKIRRRLVKDSNTKKAGKTGPMKTLLVPVMTPDLRERLENLRKKPENIPQPISNTSRANLNKLLTDYTEMKKAILHVYWEEFQKDPVGLMSRVAQPASKKIDQNKLKPEMDEKGNLTTAGFACSQCGQPLFVYKLEQVSEKGKAYTNYVGRCNVAEHEKLILLAQLKPEKDSDEAVTYSLGKFGQRALDFYSIHVTKESTHPVKPLAQIAGNRYASYPVGKALSDACMGTIASFLSKYQDIIIEHQKVVKGNQKRLESLRELAGKENLEYPSVTLPPQPHTKEGVDAYNEVIARVRMWVNLNLWQKLKLSRDDAKPLLRLKGFPSFPLVERQANEVDWWDMVCNVKKLINEKKEDGKVFWQNLAGYKRQEALRPYLSSEEDRKKGKKFARYQLGDLLLHLEKKHGEDWGKVYDEAWERIDKKVEGLSKHIKLEEERRSEDAQSKAALTDWLRAKASFVIEGLKEADKDEFCRCELKLQKWYGDLRGKPFAIEAENSILDISGFSKQYNCAFIWQKDGVKKLNLYLIINYFKGGKLRFKKIKPEAFEANRFYTVINKKSGEIVPMEVNFNFDDPNLIILPLAFGKRQGREFIWNDLLSLETGSLKLANGRVIEKTLYNRRTRQDEPALFVALTFERREVLDSSNIKPMNLIGVDRGENIPAVIALTDPEGCPLSRFKDSLGNPTHILRIGESYKEKQRTIQAKKEVEQRRAGGYSRKYASKAKNLADDMVRNTARDLLYYAVTQDAMLIFENLSRGFGRQGKRTFMAERQYTRMEDWLTAKLAYEGLPSKTYLSKTLAQYTSKTCSNCGFTITSADYDRVLEKLKKTATGWMTTINGKELKVEGQITYYNRYKRQNVVKDLSVELDRLSEESVNNDISSWTKGRSGEALSLLKKRFSHRPVQEKFVCLNCGFETHADEQAALNIARSWLFLRSQEYKKYQTNKTTGNTDKRAFVETWQSFYRKKLKEVWKPAV

SEQ ID NO: 33660 - protein, 978 aa, synthetic construct
  REGION 1..978: note = engineered CasX variant
QEIKRINKIRRRLVKDSNTKKAGKTGPMKTLLVPVMTPDLRERLENLRKKPENIPQPISNTSRANLNKLLTDYTEMKKAILHVYWEEFQKDPVGLMSRVAQPASKKIDQNKLKPEMDEKGNLTTAGFACSQCGQPLFVYKLEQVSEKGKAYTNYVGRCNVAEHEKLILLAQLKPEKDSDEAVTYSLGKFGQRALDFYSIHVTKESTHPVKPLAQIAGNRYASHPVGKALSDACMGTIASFLSKYQDIIIEHQKVVKGNQKRLESLRELAGKENLEYPSVTLPPQPHTKEGVDAYNEVIARVRMWVNLNLWQKLKLSRDDAKPLLRLKGFPSFPLVERQANEVDWWDMVCNVKKLINEKKEDGKVFWQNLAGYKRQEALRPYLSSEEDRKKGKKFARYQLGDLLLHLEKKHGEDWGKVYDEAWERIDKKVEGLSKHIKLEEERRSEDAQSKAALTDWLRAKASFVIEGLKEADKDEFCRCELKLQKWYGDLRGKPFAIEAENSILDISGFSKQYNCAFIWQKDGVKKLNLYLIINYFKGGKLRFKKIKPEAFEANRFYTVINKKSGEIVPMEVNFNFDDPNLIILPLAFGKRQGREFIWNDLLSLETGSLKLANGRVIEKTLYNRRTRQDEPALFVALTFERREVLDSSNIKPMNLIGVDRGENIPAVIALTDPEGCPLSRFKDSLGNPTHILRIGESYKEKQRTIQAKKEVEQRRAGGYSRKYASKAKNLADDMVRNTARDLLYYAVTQDAMLIFENLSRGFGRQGKRTFMAERQYTRMEDWLTAKLAYEGLPSKTYLSKTLAQYTSKTCSNCGFTITSADYDRVLEKLKKTATGWMTTINGKELKVEGQITYYNRYKRQNVVKDLSVELDRLSEESVNNDISSWTKGRSGEALSLLKKRFSHRPVQEKFVCLNCGFETHADEQAALNIARSWLFLRSQEYKKYQTNKTTGNTDKRAFVETWQSFYRKKLKEVWKPAV

SEQ ID NO: 33661 - protein, 978 aa, synthetic construct
  REGION 1..978: note = engineered CasX variant
QEIKRINKIRRRLVKDSNTKKAGKTGPMKTLLVPVMTPDLRERLENLRKKPENIPQPISNTSRANLNKLLTDYTEMKKAILHVYWEEFQKDPVGLMSRVAQPASKKIDQNKLKPEMDEKGNLTTAGFACSQCGQPLFVYKLEQVSEKGKAYTNYVGRCNVAEHEKLILLAQLKPEKDSDEAVTYSLGKFGQRALDFYSIHVTKESTHPVKPLAQIAGNRYASSPVGKALSDACMGTIASFLSKYQDIIIEHQKVVKGNQKRLESLRELAGKENLEYPSVTLPPQPHTKEGVDAYNEVIARVRMWVNLNLWQKLKLSRDDAKPLLRLKGFPSFPLVERQANEVDWWDMVCNVKKLINEKKEDGKVFWQNLAGYKRQEALRPYLSSEEDRKKGKKFARYQLGDLLLHLEKKHGEDWGKVYDEAWERIDKKVEGLSKHIKLEEERRSEDAQSKAALTDWLRAKASFVIEGLKEADKDEFCRCELKLQKWYGDLRGKPFAIEAENSILDISGFSKQYNCAFIWQKDGVKKLNLYLIINYFKGGKLRFKKIKPEAFEANRFYTVINKKSGEIVPMEVNFNFDDPNLIILPLAFGKRQGREFIWNDLLSLETGSLKLANGRVIEKTLYNRRTRQDEPALFVALTFERREVLDSSNIKPMNLIGVDRGENIPAVIALTDPEGCPLSRFKDSLGNPTHILRIGESYKEKQRTIQAKKEVEQRRAGGYSRKYASKAKNLADDMVRNTARDLLYYAVTQDAMLIFENLSRGFGRQGKRTFMAERQYTRMEDWLTAKLAYEGLPSKTYLSKTLAQYTSKTCSNCGFTITSADYDRVLEKLKKTATGWMTTINGKELKVEGQITYYNRYKRQNVVKDLSVELDRLSEESVNNDISSWTKGRSGEALSLLKKRFSHRPVQEKFVCLNCGFETHADEQAALNIARSWLFLRSQEYKKYQTNKTTGNTDKRAFVETWQSFYRKKLKEVWKPAV

SEQ ID NO: 33662 - protein, 978 aa, synthetic construct
  REGION 1..978: note = engineered CasX variant
QEIKRINKIRRRLVKDSNTKKAGKTGPMKTLLVPVMTPDLRERLENLRKKPENIPQPISNTSRANLNKLLTDYTEMKKAILHVYWEEFQKDPVGLMSRVAQPASKKIDQNKLKPEMDEKGNLTTAGFACSQCGQPLFVYKLEQVSEKGKAYTNYVGRCNVAEHEKLILLAQLKPEKDSDEAVTYSLGKFGQRALDFYSIHVTKESTHPVKPLAQIAGNRYASTPVGKALSDACMGTIASFLSKYQDIIIEHQKVVKGNQKRLESLRELAGKENLEYPSVTLPPQPHTKEGVDAYNEVIARVRMWVNLNLWQKLKLSRDDAKPLLRLKGFPSFPLVERQANEVDWWDMVCNVKKLINEKKEDGKVFWQNLAGYKRQEALRPYLSSEEDRKKGKKFARYQLGDLLLHLEKKHGEDWGKVYDEAWERIDKKVEGLSKHIKLEEERRSEDAQSKAALTDWLRAKASFVIEGLKEADKDEFCRCELKLQKWYGDLRGKPFAIEAENSILDISGFSKQYNCAFIWQKDGVKKLNLYLIINYFKGGKLRFKKIKPEAFEANRFYTVINKKSGEIVPMEVNFNFDDPNLIILPLAFGKRQGREFIWNDLLSLETGSLKLANGRVIEKTLYNRRTRQDEPALFVALTFERREVLDSSNIKPMNLIGVDRGENIPAVIALTDPEGCPLSRFKDSLGNPTHILRIGESYKEKQRTIQAKKEVEQRRAGGYSRKYASKAKNLADDMVRNTARDLLYYAVTQDAMLIFENLSRGFGRQGKRTFMAERQYTRMEDWLTAKLAYEGLPSKTYLSKTLAQYTSKTCSNCGFTITSADYDRVLEKLKKTATGWMTTINGKELKVEGQITYYNRYKRQNVVKDLSVELDRLSEESVNNDISSWTKGRSGEALSLLKKRFSHRPVQEKFVCLNCGFETHADEQAALNIARSWLFLRSQEYKKYQTNKTTGNTDKRAFVETWQSFYRKKLKEVWKPAV

SEQ ID NO: 33663 - protein, 978 aa, synthetic construct
  REGION 1..978: note = engineered CasX variant
QEIKRINKIRRRLVKDSNTKKAGKTGPMKTLLVPVMTPDLRERLENLRKKPENIPQPISNTSRANLNKLLTDYTEMKKAILHVYWEEFQKDPVGLMSRVAQPASKKIDQNKLKPEMDEKGNLTTAGFACSQCGQPLFVYKLEQVSEKGKAYTNYVGRCNVAEHEKLILLAQLKPEKDSDEAVTYSLGKFGQRALDFYSIHVTKESTHPVKPLAQIAGNRYASAPVGKALSDACMGTIASFLSKYQDIIIEHQKVVKGNQKRLESLRELAGKENLEYPSVTLPPQPHTKEGVDAYNEVIARVRMWVNLNLWQKLKLSRDDAKPLLRLKGFPSFPLVERQANEVDWWDMVCNVKKLINEKKEDGKVFWQNLAGYKRQEALRPYLSSEEDRKKGKKFARYQLGDLLLHLEKKHGEDWGKVYDEAWERIDKKVEGLSKHIKLEEERRSEDAQSKAALTDWLRAKASFVIEGLKEADKDEFCRCELKLQKWYGDLRGKPFAIEAENSILDISGFSKQYNCAFIWQKDGVKKLNLYLIINYFKGGKLRFKKIKPEAFEANRFYTVINKKSGEIVPMEVNFNFDDPNLIILPLAFGKRQGREFIWNDLLSLETGSLKLANGRVIEKTLYNRRTRQDEPALFVALTFERREVLDSSNIKPMNLIGVDRGENIPAVIALTDPEGCPLSRFKDSLGNPTHILRIGESYKEKQRTIQAKKEVEQRRAGGYSRKYASKAKNLADDMVRNTARDLLYYAVTQDAMLIFENLSRGFGRQGKRTFMAERQYTRMEDWLTAKLAYEGLPSKTYLSKTLAQYTSKTCSNCGFTITSADYDRVLEKLKKTATGWMTTINGKELKVEGQITYYNRYKRQNVVKDLSVELDRLSEESVNNDISSWTKGRSGEALSLLKKRFSHRPVQEKFVCLNCGFETHADEQAALNIARSWLFLRSQEYKKYQTNKTTGNTDKRAFVETWQSFYRKKLKEVWKPAV

SEQ ID NO: 33664 - protein, 978 aa, synthetic construct
  REGION 1..978: note = engineered CasX variant
QEIKRINKIRRRLVKDSNTKKAGKTGPMKTLLVPVMTPDLRERLENLRKKPENIPQPISNTSRANLNKLLTDYTEMKKAILHVYWEEFQKDPVGLMSRVAQPASKKIDQNKLKPEMDEKGNLTTAGFACSQCGQPLFVYKLEQVSEKGKAYTNYVGRCNVAEHEKLILLAQLKPEKDSDEAVTYSLGKFGQRALDFYSIHVTKESTHPVKPLAQIAGNRYASVPVGKALSDACMGTIASFLSKYQDIIIEHQKVVKGNQKRLESLRELAGKENLEYPSVTLPPQPHTKEGVDAYNEVIARVRMWVNLNLWQKLKLSRDDAKPLLRLKGFPSFPLVERQANEVDWWDMVCNVKKLINEKKEDGKVFWQNLAGYKRQEALRPYLSSEEDRKKGKKFARYQLGDLLLHLEKKHGEDWGKVYDEAWERIDKKVEGLSKHIKLEEERRSEDAQSKAALTDWLRAKASFVIEGLKEADKDEFCRCELKLQKWYGDLRGKPFAIEAENSILDISGFSKQYNCAFIWQKDGVKKLNLYLIINYFKGGKLRFKKIKPEAFEANRFYTVINKKSGEIVPMEVNFNFDDPNLIILPLAFGKRQGREFIWNDLLSLETGSLKLANGRVIEKTLYNRRTRQDEPALFVALTFERREVLDSSNIKPMNLIGVDRGENIPAVIALTDPEGCPLSRFKDSLGNPTHILRIGESYKEKQRTIQAKKEVEQRRAGGYSRKYASKAKNLADDMVRNTARDLLYYAVTQDAMLIFENLSRGFGRQGKRTFMAERQYTRMEDWLTAKLAYEGLPSKTYLSKTLAQYTSKTCSNCGFTITSADYDRVLEKLKKTATGWMTTINGKELKVEGQITYYNRYKRQNVVKDLSVELDRLSEESVNNDISSWTKGRSGEALSLLKKRFSHRPVQEKFVCLNCGFETHADEQAALNIARSWLFLRSQEYKKYQTNKTTGNTDKRAFVETWQSFYRKKLKEVWKPAV

SEQ ID NO: 33665 - protein, 978 aa, synthetic construct
  REGION 1..978: note = engineered CasX variant
QEIKRINKIRRRLVKDSNTKKAGKTGPMKTLLVPVMTPDLRERLENLRKKPENIPQPISNTSRANLNKLLTDYTEMKKAILHVYWEEFQKDPVGLMSRVAQPASKKIDQNKLKPEMDEKGNLTTAGFACSQCGQPLFVYKLEQVSEKGKAYTNYVGRCNVAEHEKLIKLAQLKPEKDSDEAVTYSLGKFGQRALDFYSIHVTKESTHPVKPLAQIAGNRYASGPVGKALSDACMGTIASFLSKYQDIIIEHQKVVKGNQKRLESLRELAGKENLEYPSVTLPPQPHTKEGVDAYNEVIARVRMWVNLNLWQKLKLSRDDAKPLLRLKGFPSFPLVERQANEVDWWDMVCNVKKLINEKKEDGKVFWQNLAGYKRQEALRPYLSSEEDRKKGKKFARYQLGDLLLHLEKKHGEDWGKVYDEAWERIDKKVEGLSKHIKLEEERRSEDAQSKAALTDWLRAKASFVIEGLKEADKDEFCRCELKLQKWYGDLRGKPFAIEAENSILDISGFSKQYNCAFIWQKDGVKKLNLYLIINYFKGGKLRFKKIKPEAFEANRFYTVINKKSGEIVPMEVNFNFDDPNLIILPLAFGKRQGREFIWNDLLSLETGSLKLANGRVIEKTLYNRRTRQDEPALFVALTFERREVLDSSNIKPMNLIGVDRGENIPAVIALTDPEGCPLSRFKDSLGNPTHILRIGESYKEKQRTIQAKKEVEQRRAGGYSRKYASKAKNLADDMVRNTARDLLYYAVTQDAMLIFENLSRGFGRQGKRTFMAERQYTRMEDWLTAKLAYEGLPSKTYLSKTLAQYTSKTCSNCGFTITSADYDRVLEKLKKTATGWMTTINGKELKVEGQITYYNRYKRQNVVKDLSVELDRLSEESVNNDISSWTKGRSGEALSLLKKRFSHRPVQEKFVCLNCGFETHADEQAALNIARSWLFLRSQEYKKYQTNKTTGNTDKRAFVETWQSFYRKKLKEVWKPAV

SEQ ID NO: 33666 - protein, 977 aa, synthetic construct
  REGION 1..977: note = engineered CasX variant
QEIKRINKIRRRLVKDSNTKKAGKTGPMKTLLVPVMTPDLRERLENLRKKPENIPQPISNTSRANLNKLLTDYTEMKKAILHVYWEEFQKDPVGLMSRVAQPASKKIDQNKLKPEMDEKGNLTTAGFACSQCGQPLFVYKLEQVSEKGKAYTNYVGRCNVAEHEKLILLAQLKPEKDSDEAVTYSLGKFGQRALDFYSIHVTKESTHPVKPLAQIAGNRYASPVGKALSDACMGTIASFLSKYQDIIIEHQKVVKGNQKRLESLRELAGKENLEYPSVTLPPQPHTKEGVDAYNEVIARVRMWVNLNLWQKLKLSRDDAKPLLRLKGFPSFPLVERQANEVDWWDMVCNVKKLINEKKEDGKVFWQNLAGYKRQEALRPYLSSEEDRKKGKKFARYQLGDLLLHLEKKHGEDWGKVYDEAWERIDKKVEGLSKHIKLEEERRSEDAQSKAALTDWLRAKASFVIEGLKEADKDEFCRCELKLQKWYGDLRGKPFAIEAENSILDISGFSKQYNCAFIWQKDGVKKLNLYLIINYFKGGKLRFKKIKPEAFEANRFYTVINKKSGEIVPMEVNFNFDDPNLIILPLAFGKRQGREFIWNDLLSLETGSLKLANGRVIEKTLYNRRTRQDEPALFVALTFERREVLDSSNIKPMNLIGVDRGENIPAVIALTDPEGCPLSRFKDSLGNPTHILRIGESYKEKQRTIQAKKEVEQRRAGGYSRKYASKAKNLADDMVRNTARDLLYYAVTQDAMLIFENLSRGFGRQGKRTFMAERQYTRMEDWLTAKLAYEGLPSKTYLSKTLAQYTSKTCSNCGFTITSADYDRVLEKLKKTATGWMTTINGKELKVEGQITYYNRYKRQNVVKDLSVELDRLSEESVNNDISSWTKGRSGEALSLLKKRFSHRPVQEKFVCLNCGFETHADEQAALNIARSWLFLRSQEYKKYQTNKTTGNTDKRAFVETWQSFYRKKLKEVWKPAV

SEQ ID NO: 33667 - protein, 978 aa, synthetic construct
  REGION 1..978: note = engineered CasX variant
QEIKRINKIRRRLVKDSNTKKAGKTGPMKTLLVPVMTPDLRERLENLRKKPENIPQPISNTSRANLNKLLTDYTEMKKAILHVYWEEFQKDPVGLMSRVAQPASKKIDQNKLKPEMDEKGNLTTAGFACSQCGQPLFVYKLEQVSEKGKAYTNYFGRCNVAEHEKLILLAQLKPEKDSDEAVTYSLGKFGQRALDFYSIHVTKESTHPVKPLAQIAGNRYASYPVGKALSDACMGTIASFLSKYQDIIIEHQKVVKGNQKRLESLRELAGKENLEYPSVTLPPQPHTKEGVDAYNEVIARVRMWVNLNLWQKLKLSRDDAKPLLRLKGFPSFPLVERQANEVDWWDMVCNVKKLINEKKEDGKVFWQNLAGYKRQEALRPYLSSEEDRKKGKKFARYQLGDLLLHLEKKHGEDWGKVYDEAWERIDKKVEGLSKHIKLEEERRSEDAQSKAALTDWLRAKASFVIEGLKEADKDEFCRCELKLQKWYGDLRGKPFAIEAENSILDISGFSKQYNCAFIWQKDGVKKLNLYLIINYFKGGKLRFKKIKPEAFEANRFYTVINKKSGEIVPMEVNFNFDDPNLIILPLAFGKRQGREFIWNDLLSLETGSLKLANGRVIEKTLYNRRTRQDEPALFVALTFERREVLDSSNIKPMNLIGVDRGENIPAVIALTDPEGCPLSRFKDSLGNPTHILRIGESYKEKQRTIQAKKEVEQRRAGGYSRKYASKAKNLADDMVRNTARDLLYYAVTQDAMLIFENLSRGFGRQGKRTFMAERQYTRMEDWLTAKLAYEGLASKTYLSKTLAQYTSKTCSNCGFTITSADYDRVLEKLKKTATGWMTTINGKELKVEGQITYYNRYKRQNVVKDLSVELDRLSEESVNNDISSWTKGRSGEALSLLKKRFSHRPVQEKFVCLNCGFETHADEQAALNIARSWLFLRSQEYKKYQTNKTTGNTDKRAFVETWQSFYRKKLKEVWKPAV

SEQ ID NO: 33668 - protein, 978 aa, synthetic construct
  REGION 1..978: note = engineered CasX variant
QEIKRINKIRRRLVKDSNTKKAGKTGPMKTLLVPVMTPDLRERLENLRKKPENIPQPISNTSRANLNKLLTDYTEMKKAILHVYWEEFQKDPVGLMSRVAQPASKKIDQNKLKPEMDEKGNLTTAGFACSQCGQPLFVYKLEQVSEKGKAYTNYFGRCNVAEHEKLILLAQLKPEKDSDEAVTYSLGKFGQRALDFYSIHVTKESTHPVKPLAQIAGNRYASHPVGKALSDACMGTIASFLSKYQDIIIEHQKVVKGNQKRLESLRELAGKENLEYPSVTLPPQPHTKEGVDAYNEVIARVRMWVNLNLWQKLKLSRDDAKPLLRLKGFPSFPLVERQANEVDWWDMVCNVKKLINEKKEDGKVFWQNLAGYKRQEALRPYLSSEEDRKKGKKFARYQLGDLLLHLEKKHGEDWGKVYDEAWERIDKKVEGLSKHIKLEEERRSEDAQSKAALTDWLRAKASFVIEGLKEADKDEFCRCELKLQKWYGDLRGKPFAIEAENSILDISGFSKQYNCAFIWQKDGVKKLNLYLIINYFKGGKLRFKKIKPEAFEANRFYTVINKKSGEIVPMEVNFNFDDPNLIILPLAFGKRQGREFIWNDLLSLETGSLKLANGRVIEKTLYNRRTRQDEPALFVALTFERREVLDSSNIKPMNLIGVDRGENIPAVIALTDPEGCPLSRFKDSLGNPTHILRIGESYKEKQRTIQAKKEVEQRRAGGYSRKYASKAKNLADDMVRNTARDLLYYAVTQDAMLIFENLSRGFGRQGKRTFMAERQYTRMEDWLTAKLAYEGLASKTYLSKTLAQYTSKTCSNCGFTITSADYDRVLEKLKKTATGWMTTINGKELKVEGQITYYNRYKRQNVVKDLSVELDRLSEESVNNDISSWTKGRSGEALSLLKKRFSHRPVQEKFVCLNCGFETHADEQAALNIARSWLFLRSQEYKKYQTNKTTGNTDKRAFVETWQSFYRKKLKEVWKPAV

SEQ ID NO: 33669 - protein, 978 aa, synthetic construct
  REGION 1..978: note = engineered CasX variant
QEIKRINKIRRRLVKDSNTKKAGKTGPMKTLLVPVMTPDLRERLENLRKKPENIPQPISNTSRANLNKLLTDYTEMKKAILHVYWEEFQKDPVGLMSRVAQPASKKIDQNKLKPEMDEKGNLTTAGFACSQCGQPLFVYKLEQVSEKGKAYTNYFGRCNVAEHEKLILLAQLKPEKDSDEAVTYSLGKFGQRALDFYSIHVTKESTHPVKPLAQIAGNRYASSPVGKALSDACMGTIASFLSKYQDIIIEHQKVVKGNQKRLESLRELAGKENLEYPSVTLPPQPHTKEGVDAYNEVIARVRMWVNLNLWQKLKLSRDDAKPLLRLKGFPSFPLVERQANEVDWWDMVCNVKKLINEKKEDGKVFWQNLAGYKRQEALRPYLSSEEDRKKGKKFARYQLGDLLLHLEKKHGEDWGKVYDEAWERIDKKVEGLSKHIKLEEERRSEDAQSKAALTDWLRAKASFVIEGLKEADKDEFCRCELKLQKWYGDLRGKPFAIEAENSILDISGFSKQYNCAFIWQKDGVKKLNLYLIINYFKGGKLRFKKIKPEAFEANRFYTVINKKSGEIVPMEVNFNFDDPNLIILPLAFGKRQGREFIWNDLLSLETGSLKLANGRVIEKTLYNRRTRQDEPALFVALTFERREVLDSSNIKPMNLIGVDRGENIPAVIALTDPEGCPLSRFKDSLGNPTHILRIGESYKEKQRTIQAKKEVEQRRAGGYSRKYASKAKNLADDMVRNTARDLLYYAVTQDAMLIFENLSRGFGRQGKRTFMAERQYTRMEDWLTAKLAYEGLASKTYLSKTLAQYTSKTCSNCGFTITSADYDRVLEKLKKTATGWMTTINGKELKVEGQITYYNRYKRQNVVKDLSVELDRLSEESVNNDISSWTKGRSGEALSLLKKRFSHRPVQEKFVCLNCGFETHADEQAALNIARSWLFLRSQEYKKYQTNKTTGNTDKRAFVETWQSFYRKKLKEVWKPAV

SEQ ID NO: 33670 - protein, 978 aa, synthetic construct
  REGION 1..978: note = engineered CasX variant
QEIKRINKIRRRLVKDSNTKKAGKTGPMKTLLVPVMTPDLRERLENLRKKPENIPQPISNTSRANLNKLLTDYTEMKKAILHVYWEEFQKDPVGLMSRVAQPASKKIDQNKLKPEMDEKGNLTTAGFACSQCGQPLFVYKLEQVSEKGKAYTNYFGRCNVAEHEKLILLAQLKPEKDSDEAVTYSLGKFGQRALDFYSIHVTKESTHPVKPLAQIAGNRYASTPVGKALSDACMGTIASFLSKYQDIIIEHQKVVKGNQKRLESLRELAGKENLEYPSVTLPPQPHTKEGVDAYNEVIARVRMWVNLNLWQKLKLSRDDAKPLLRLKGFPSFPLVERQANEVDWWDMVCNVKKLINEKKEDGKVFWQNLAGYKRQEALRPYLSSEEDRKKGKKFARYQLGDLLLHLEKKHGEDWGKVYDEAWERIDKKVEGLSKHIKLEEERRSEDAQSKAALTDWLRAKASFVIEGLKEADKDEFCRCELKLQKWYGDLRGKPFAIEAENSILDISGFSKQYNCAFIWQKDGVKKLNLYLIINYFKGGKLRFKKIKPEAFEANRFYTVINKKSGEIVPMEVNFNFDDPNLIILPLAFGKRQGREFIWNDLLSLETGSLKLANGRVIEKTLYNRRTRQDEPALFVALTFERREVLDSSNIKPMNLIGVDRGENIPAVIALTDPEGCPLSRFKDSLGNPTHILRIGESYKEKQRTIQAKKEVEQRRAGGYSRKYASKAKNLADDMVRNTARDLLYYAVTQDAMLIFENLSRGFGRQGKRTFMAERQYTRMEDWLTAKLAYEGLASKTYLSKTLAQYTSKTCSNCGFTITSADYDRVLEKLKKTATGWMTTINGKELKVEGQITYYNRYKRQNVVKDLSVELDRLSEESVNNDISSWTKGRSGEALSLLKKRFSHRPVQEKFVCLNCGFETHADEQAALNIARSWLFLRSQEYKKYQTNKTTGNTDKRAFVETWQSFYRKKLKEVWKPAV

SEQ ID NO: 33671 - protein, 978 aa, synthetic construct
  REGION 1..978: note = engineered CasX variant
QEIKRINKIRRRLVKDSNTKKAGKTGPMKTLLVPVMTPDLRERLENLRKKPENIPQPISNTSRANLNKLLTDYTEMKKAILHVYWEEFQKDPVGLMSRVAQPASKKIDQNKLKPEMDEKGNLTTAGFACSQCGQPLFVYKLEQVSEKGKAYTNYFGRCNVAEHEKLILLAQLKPEKDSDEAVTYSLGKFGQRALDFYSIHVTKESTHPVKPLAQIAGNRYASAPVGKALSDACMGTIASFLSKYQDIIIEHQKVVKGNQKRLESLRELAGKENLEYPSVTLPPQPHTKEGVDAYNEVIARVRMWVNLNLWQKLKLSRDDAKPLLRLKGFPSFPLVERQANEVDWWDMVCNVKKLINEKKEDGKVFWQNLAGYKRQEALRPYLSSEEDRKKGKKFARYQLGDLLLHLEKKHGEDWGKVYDEAWERIDKKVEGLSKHIKLEEERRSEDAQSKAALTDWLRAKASFVIEGLKEADKDEFCRCELKLQKWYGDLRGKPFAIEAENSILDISGFSKQYNCAFIWQKDGVKKLNLYLIINYFKGGKLRFKKIKPEAFEANRFYTVINKKSGEIVPMEVNFNFDDPNLIILPLAFGKRQGREFIWNDLLSLETGSLKLANGRVIEKTLYNRRTRQDEPALFVALTFERREVLDSSNIKPMNLIGVDRGENIPAVIALTDPEGCPLSRFKDSLGNPTHILRIGESYKEKQRTIQAKKEVEQRRAGGYSRKYASKAKNLADDMVRNTARDLLYYAVTQDAMLIFENLSRGFGRQGKRTFMAERQYTRMEDWLTAKLAYEGLASKTYLSKTLAQYTSKTCSNCGFTITSADYDRVLEKLKKTATGWMTTINGKELKVEGQITYYNRYKRQNVVKDLSVELDRLSEESVNNDISSWTKGRSGEALSLLKKRFSHRPVQEKFVCLNCGFETHADEQAALNIARSWLFLRSQEYKKYQTNKTTGNTDKRAFVETWQSFYRKKLKEVWKPAV

SEQ ID NO: 33672 - protein, 978 aa, synthetic construct
  REGION 1..978: note = engineered CasX variant
QEIKRINKIRRRLVKDSNTKKAGKTGPMKTLLVPVMTPDLRERLENLRKKPENIPQPISNTSRANLNKLLTDYTEMKKAILHVYWEEFQKDPVGLMSRVAQPASKKIDQNKLKPEMDEKGNLTTAGFACSQCGQPLFVYKLEQVSEKGKAYTNYFGRCNVAEHEKLILLAQLKPEKDSDEAVTYSLGKFGQRALDFYSIHVTKESTHPVKPLAQIAGNRYASVPVGKALSDACMGTIASFLSKYQDIIIEHQKVVKGNQKRLESLRELAGKENLEYPSVTLPPQPHTKEGVDAYNEVIARVRMWVNLNLWQKLKLSRDDAKPLLRLKGFPSFPLVERQANEVDWWDMVCNVKKLINEKKEDGKVFWQNLAGYKRQEALRPYLSSEEDRKKGKKFARYQLGDLLLHLEKKHGEDWGKVYDEAWERIDKKVEGLSKHIKLEEERRSEDAQSKAALTDWLRAKASFVIEGLKEADKDEFCRCELKLQKWYGDLRGKPFAIEAENSILDISGFSKQYNCAFIWQKDGVKKLNLYLIINYFKGGKLRFKKIKPEAFEANRFYTVINKKSGEIVPMEVNFNFDDPNLIILPLAFGKRQGREFIWNDLLSLETGSLKLANGRVIEKTLYNRRTRQDEPALFVALTFERREVLDSSNIKPMNLIGVDRGENIPAVIALTDPEGCPLSRFKDSLGNPTHILRIGESYKEKQRTIQAKKEVEQRRAGGYSRKYASKAKNLADDMVRNTARDLLYYAVTQDAMLIFENLSRGFGRQGKRTFMAERQYTRMEDWLTAKLAYEGLASKTYLSKTLAQYTSKTCSNCGFTITSADYDRVLEKLKKTATGWMTTINGKELKVEGQITYYNRYKRQNVVKDLSVELDRLSEESVNNDISSWTKGRSGEALSLLKKRFSHRPVQEKFVCLNCGFETHADEQAALNIARSWLFLRSQEYKKYQTNKTTGNTDKRAFVETWQSFYRKKLKEVWKPAV

SEQ ID NO: 33673 - protein, 978 aa, synthetic construct
  REGION 1..978: note = engineered CasX variant
QEIKRINKIRRRLVKDSNTKKAGKTGPMKTLLVPVMTPDLRERLENLRKKPENIPQPISNTSRANLNKLLTDYTEMKKAILHVYWEEFQKDPVGLMSRVAQPASKKIDQNKLKPEMDEKGNLTTAGFACSQCGQPLFVYKLEQVSEKGKAYTNYFGRCNVAEHEKLIKLAQLKPEKDSDEAVTYSLGKFGQRALDFYSIHVTKESTHPVKPLAQIAGNRYASGPVGKALSDACMGTIASFLSKYQDIIIEHQKVVKGNQKRLESLRELAGKENLEYPSVTLPPQPHTKEGVDAYNEVIARVRMWVNLNLWQKLKLSRDDAKPLLRLKGFPSFPLVERQANEVDWWDMVCNVKKLINEKKEDGKVFWQNLAGYKRQEALRPYLSSEEDRKKGKKFARYQLGDLLLHLEKKHGEDWGKVYDEAWERIDKKVEGLSKHIKLEEERRSEDAQSKAALTDWLRAKASFVIEGLKEADKDEFCRCELKLQKWYGDLRGKPFAIEAENSILDISGFSKQYNCAFIWQKDGVKKLNLYLIINYFKGGKLRFKKIKPEAFEANRFYTVINKKSGEIVPMEVNFNFDDPNLIILPLAFGKRQGREFIWNDLLSLETGSLKLANGRVIEKTLYNRRTRQDEPALFVALTFERREVLDSSNIKPMNLIGVDRGENIPAVIALTDPEGCPLSRFKDSLGNPTHILRIGESYKEKQRTIQAKKEVEQRRAGGYSRKYASKAKNLADDMVRNTARDLLYYAVTQDAMLIFENLSRGFGRQGKRTFMAERQYTRMEDWLTAKLAYEGLASKTYLSKTLAQYTSKTCSNCGFTITSADYDRVLEKLKKTATGWMTTINGKELKVEGQITYYNRYKRQNVVKDLSVELDRLSEESVNNDISSWTKGRSGEALSLLKKRFSHRPVQEKFVCLNCGFETHADEQAALNIARSWLFLRSQEYKKYQTNKTTGNTDKRAFVETWQSFYRKKLKEVWKPAV

SEQ ID NO: 33674 - protein, 977 aa, synthetic construct
  REGION 1..977: note = engineered CasX variant
QEIKRINKIRRRLVKDSNTKKAGKTGPMKTLLVPVMTPDLRERLENLRKKPENIPQPISNTSRANLNKLLTDYTEMKKAILHVYWEEFQKDPVGLMSRVAQPASKKIDQNKLKPEMDEKGNLTTAGFACSQCGQPLFVYKLEQVSEKGKAYTNYFGRCNVAEHEKLILLAQLKPEKDSDEAVTYSLGKFGQRALDFYSIHVTKESTHPVKPLAQIAGNRYASPVGKALSDACMGTIASFLSKYQDIIIEHQKVVKGNQKRLESLRELAGKENLEYPSVTLPPQPHTKEGVDAYNEVIARVRMWVNLNLWQKLKLSRDDAKPLLRLKGFPSFPLVERQANEVDWWDMVCNVKKLINEKKEDGKVFWQNLAGYKRQEALRPYLSSEEDRKKGKKFARYQLGDLLLHLEKKHGEDWGKVYDEAWERIDKKVEGLSKHIKLEEERRSEDAQSKAALTDWLRAKASFVIEGLKEADKDEFCRCELKLQKWYGDLRGKPFAIEAENSILDISGFSKQYNCAFIWQKDGVKKLNLYLIINYFKGGKLRFKKIKPEAFEANRFYTVINKKSGEIVPMEVNFNFDDPNLIILPLAFGKRQGREFIWNDLLSLETGSLKLANGRVIEKTLYNRRTRQDEPALFVALTFERREVLDSSNIKPMNLIGVDRGENIPAVIALTDPEGCPLSRFKDSLGNPTHILRIGESYKEKQRTIQAKKEVEQRRAGGYSRKYASKAKNLADDMVRNTARDLLYYAVTQDAMLIFENLSRGFGRQGKRTFMAERQYTRMEDWLTAKLAYEGLASKTYLSKTLAQYTSKTCSNCGFTITSADYDRVLEKLKKTATGWMTTINGKELKVEGQITYYNRYKRQNVVKDLSVELDRLSEESVNNDISSWTKGRSGEALSLLKKRFSHRPVQEKFVCLNCGFETHADEQAALNIARSWLFLRSQEYKKYQTNKTTGNTDKRAFVETWQSFYRKKLKEVWKPAV

SEQ ID NO: 33675 - protein, 978 aa, synthetic construct
  REGION 1..978: note = engineered CasX variant
QEIKRINKIRRRLVKDSNTKKAGKTGPMKTLLVPVMTPDLRERLENLRKKPENIPQPISNTSRANLNKLLTDYTEMKKAILHVYWEEFQKDPVGLMSRVAQPASKKIDQNKLKPEMDEKGNLTTAGFACSQCGQPLFVYKLEQVSEKGKAYTNYFGRCNVAEHEKLILLAQLKPEKDSDEAVTYSLGKFGQRALDFYSIHVTKESTHPVKPLAQIAGNRYASYPVGKALSDACMGTIASFLSKYQDIIIEHQKVVKGNQKRLESLRELAGKENLEYPSVTLPPQPHTKEGVDAYNEVIARVRMWVNLNLWQKLKLSRDDAKPLLRLKGFPSFPLVERQANEVDWWDMVCNVKKLINEKKEDGKVFWQNLAGYKRQEALRPYLSSEEDRKKGKKFARYQLGDLLLHLEKKHGEDWGKVYDEAWERIDKKVEGLSKHIKLEEERRSEDAQSKAALTDWLRAKASFVIEGLKEADKDEFCRCELKLQKWYGDLRGKPFAIEAENSILDISGFSKQYNCAFIWQKDGVKKLNLYLIINYFKGGKLRFKKIKPEAFEANRFYTVINKKSGEIVPMEVNFNFDDPNLIILPLAFGKRQGREFIWNDLLSLETGSLKLANGRVIEKTLYNRRTRQDEPALFVALTFERREVLDSSNIKPMNLIGVDRGENIPAVIALTDPEGCPLSRFKDSLGNPTHILRIGESYKEKQRTIQAKKEVEQRRAGGYSRKYASKAKNLADDMVRNTARDLLYYAVTQDAMLIFENLSRGFGRQGKRTFMAERQYTRMEDWLTAKLAYEGLPSKVYLSKTLAQYTSKTCSNCGFTITSADYDRVLEKLKKTATGWMTTINGKELKVEGQITYYNRYKRQNVVKDLSVELDRLSEESVNNDISSWTKGRSGEALSLLKKRFSHRPVQEKFVCLNCGFETHADEQAALNIARSWLFLRSQEYKKYQTNKTTGNTDKRAFVETWQSFYRKKLKEVWKPAV

SEQ ID NO: 33676 - protein, 978 aa, synthetic construct
  REGION 1..978: note = engineered CasX variant
QEIKRINKIRRRLVKDSNTKKAGKTGPMKTLLVPVMTPDLRERLENLRKKPENIPQPISNTSRANLNKLLTDYTEMKKAILHVYWEEFQKDPVGLMSRVAQPASKKIDQNKLKPEMDEKGNLTTAGFACSQCGQPLFVYKLEQVSEKGKAYTNYFGRCNVAEHEKLILLAQLKPEKDSDEAVTYSLGKFGQRALDFYSIHVTKESTHPVKPLAQIAGNRYASHPVGKALSDACMGTIASFLSKYQDIIIEHQKVVKGNQKRLESLRELAGKENLEYPSVTLPPQPHTKEGVDAYNEVIARVRMWVNLNLWQKLKLSRDDAKPLLRLKGFPSFPLVERQANEVDWWDMVCNVKKLINEKKEDGKVFWQNLAGYKRQEALRPYLSSEEDRKKGKKFARYQLGDLLLHLEKKHGEDWGKVYDEAWERIDKKVEGLSKHIKLEEERRSEDAQSKAALTDWLRAKASFVIEGLKEADKDEFCRCELKLQKWYGDLRGKPFAIEAENSILDISGFSKQYNCAFIWQKDGVKKLNLYLIINYFKGGKLRFKKIKPEAFEANRFYTVINKKSGEIVPMEVNFNFDDPNLIILPLAFGKRQGREFIWNDLLSLETGSLKLANGRVIEKTLYNRRTRQDEPALFVALTFERREVLDSSNIKPMNLIGVDRGENIPAVIALTDPEGCPLSRFKDSLGNPTHILRIGESYKEKQRTIQAKKEVEQRRAGGYSRKYASKAKNLADDMVRNTARDLLYYAVTQDAMLIFENLSRGFGRQGKRTFMAERQYTRMEDWLTAKLAYEGLPSKVYLSKTLAQYTSKTCSNCGFTITSADYDRVLEKLKKTATGWMTTINGKELKVEGQITYYNRYKRQNVVKDLSVELDRLSEESVNNDISSWTKGRSGEALSLLKKRFSHRPVQEKFVCLNCGFETHADEQAALNIARSWLFLRSQEYKKYQTNKTTGNTDKRAFVETWQSFYRKKLKEVWKPAV

SEQ ID NO: 33677 - protein, 978 aa, synthetic construct
  REGION 1..978: note = engineered CasX variant
QEIKRINKIRRRLVKDSNTKKAGKTGPMKTLLVPVMTPDLRERLENLRKKPENIPQPISNTSRANLNKLLTDYTEMKKAILHVYWEEFQKDPVGLMSRVAQPASKKIDQNKLKPEMDEKGNLTTAGFACSQCGQPLFVYKLEQVSEKGKAYTNYFGRCNVAEHEKLILLAQLKPEKDSDEAVTYSLGKFGQRALDFYSIHVTKESTHPVKPLAQIAGNRYASSPVGKALSDACMGTIASFLSKYQDIIIEHQKVVKGNQKRLESLRELAGKENLEYPSVTLPPQPHTKEGVDAYNEVIARVRMWVNLNLWQKLKLSRDDAKPLLRLKGFPSFPLVERQANEVDWWDMVCNVKKLINEKKEDGKVFWQNLAGYKRQEALRPYLSSEEDRKKGKKFARYQLGDLLLHLEKKHGEDWGKVYDEAWERIDKKVEGLSKHIKLEEERRSEDAQSKAALTDWLRAKASFVIEGLKEADKDEFCRCELKLQKWYGDLRGKPFAIEAENSILDISGFSKQYNCAFIWQKDGVKKLNLYLIINYFKGGKLRFKKIKPEAFEANRFYTVINKKSGEIVPMEVNFNFDDPNLIILPLAFGKRQGREFIWNDLLSLETGSLKLANGRVIEKTLYNRRTRQDEPALFVALTFERREVLDSSNIKPMNLIGVDRGENIPAVIALTDPEGCPLSRFKDSLGNPTHILRIGESYKEKQRTIQAKKEVEQRRAGGYSRKYASKAKNLADDMVRNTARDLLYYAVTQDAMLIFENLSRGFGRQGKRTFMAERQYTRMEDWLTAKLAYEGLPSKVYLSKTLAQYTSKTCSNCGFTITSADYDRVLEKLKKTATGWMTTINGKELKVEGQITYYNRYKRQNVVKDLSVELDRLSEESVNNDISSWTKGRSGEALSLLKKRFSHRPVQEKFVCLNCGFETHADEQAALNIARSWLFLRSQEYKKYQTNKTTGNTDKRAFVETWQSFYRKKLKEVWKPAV

SEQ ID NO: 33678 - protein, 978 aa, synthetic construct
  REGION 1..978: note = engineered CasX variant
QEIKRINKIRRRLVKDSNTKKAGKTGPMKTLLVPVMTPDLRERLENLRKKPENIPQPISNTSRANLNKLLTDYTEMKKAILHVYWEEFQKDPVGLMSRVAQPASKKIDQNKLKPEMDEKGNLTTAGFACSQCGQPLFVYKLEQVSEKGKAYTNYFGRCNVAEHEKLILLAQLKPEKDSDEAVTYSLGKFGQRALDFYSIHVTKESTHPVKPLAQIAGNRYASTPVGKALSDACMGTIASFLSKYQDIIIEHQKVVKGNQKRLESLRELAGKENLEYPSVTLPPQPHTKEGVDAYNEVIARVRMWVNLNLWQKLKLSRDDAKPLLRLKGFPSFPLVERQANEVDWWDMVCNVKKLINEKKEDGKVFWQNLAGYKRQEALRPYLSSEEDRKKGKKFARYQLGDLLLHLEKKHGEDWGKVYDEAWERIDKKVEGLSKHIKLEEERRSEDAQSKAALTDWLRAKASFVIEGLKEADKDEFCRCELKLQKWYGDLRGKPFAIEAENSILDISGFSKQYNCAFIWQKDGVKKLNLYLIINYFKGGKLRFKKIKPEAFEANRFYTVINKKSGEIVPMEVNFNFDDPNLIILPLAFGKRQGREFIWNDLLSLETGSLKLANGRVIEKTLYNRRTRQDEPALFVALTFERREVLDSSNIKPMNLIGVDRGENIPAVIALTDPEGCPLSRFKDSLGNPTHILRIGESYKEKQRTIQAKKEVEQRRAGGYSRKYASKAKNLADDMVRNTARDLLYYAVTQDAMLIFENLSRGFGRQGKRTFMAERQYTRMEDWLTAKLAYEGLPSKVYLSKTLAQYTSKTCSNCGFTITSADYDRVLEKLKKTATGWMTTINGKELKVEGQITYYNRYKRQNVVKDLSVELDRLSEESVNNDISSWTKGRSGEALSLLKKRFSHRPVQEKFVCLNCGFETHADEQAALNIARSWLFLRSQEYKKYQTNKTTGNTDKRAFVETWQSFYRKKLKEVWKPAV

SEQ ID NO: 33679 - protein, 978 aa, synthetic construct
  REGION 1..978: note = engineered CasX variant
QEIKRINKIRRRLVKDSNTKKAGKTGPMKTLLVPVMTPDLRERLENLRKKPENIPQPISNTSRANLNKLLTDYTEMKKAILHVYWEEFQKDPVGLMSRVAQPASKKIDQNKLKPEMDEKGNLTTAGFACSQCGQPLFVYKLEQVSEKGKAYTNYFGRCNVAEHEKLILLAQLKPEKDSDEAVTYSLGKFGQRALDFYSIHVTKESTHPVKPLAQIAGNRYASAPVGKALSDACMGTIASFLSKYQDIIIEHQKVVKGNQKRLESLRELAGKENLEYPSVTLPPQPHTKEGVDAYNEVIARVRMWVNLNLWQKLKLSRDDAKPLLRLKGFPSFPLVERQANEVDWWDMVCNVKKLINEKKEDGKVFWQNLAGYKRQEALRPYLSSEEDRKKGKKFARYQLGDLLLHLEKKHGEDWGKVYDEAWERIDKKVEGLSKHIKLEEERRSEDAQSKAALTDWLRAKASFVIEGLKEADKDEFCRCELKLQKWYGDLRGKPFAIEAENSILDISGFSKQYNCAFIWQKDGVKKLNLYLIINYFKGGKLRFKKIKPEAFEANRFYTVINKKSGEIVPMEVNFNFDDPNLIILPLAFGKRQGREFIWNDLLSLETGSLKLANGRVIEKTLYNRRTRQDEPALFVALTFERREVLDSSNIKPMNLIGVDRGENIPAVIALTDPEGCPLSRFKDSLGNPTHILRIGESYKEKQRTIQAKKEVEQRRAGGYSRKYASKAKNLADDMVRNTARDLLYYAVTQDAMLIFENLSRGFGRQGKRTFMAERQYTRMEDWLTAKLAYEGLPSKVYLSKTLAQYTSKTCSNCGFTITSADYDRVLEKLKKTATGWMTTINGKELKVEGQITYYNRYKRQNVVKDLSVELDRLSEESVNNDISSWTKGRSGEALSLLKKRFSHRPVQEKFVCLNCGFETHADEQAALNIARSWLFLRSQEYKKYQTNKTTGNTDKRAFVETWQSFYRKKLKEVWKPAV

SEQ ID NO: 33680 - protein, 978 aa, synthetic construct
  REGION 1..978: note = engineered CasX variant
QEIKRINKIRRRLVKDSNTKKAGKTGPMKTLLVPVMTPDLRERLENLRKKPENIPQPISNTSRANLNKLLTDYTEMKKAILHVYWEEFQKDPVGLMSRVAQPASKKIDQNKLKPEMDEKGNLTTAGFACSQCGQPLFVYKLEQVSEKGKAYTNYFGRCNVAEHEKLILLAQLKPEKDSDEAVTYSLGKFGQRALDFYSIHVTKESTHPVKPLAQIAGNRYASVPVGKALSDACMGTIASFLSKYQDIIIEHQKVVKGNQKRLESLRELAGKENLEYPSVTLPPQPHTKEGVDAYNEVIARVRMWVNLNLWQKLKLSRDDAKPLLRLKGFPSFPLVERQANEVDWWDMVCNVKKLINEKKEDGKVFWQNLAGYKRQEALRPYLSSEEDRKKGKKFARYQLGDLLLHLEKKHGEDWGKVYDEAWERIDKKVEGLSKHIKLEEERRSEDAQSKAALTDWLRAKASFVIEGLKEADKDEFCRCELKLQKWYGDLRGKPFAIEAENSILDISGFSKQYNCAFIWQKDGVKKLNLYLIINYFKGGKLRFKKIKPEAFEANRFYTVINKKSGEIVPMEVNFNFDDPNLIILPLAFGKRQGREFIWNDLLSLETGSLKLANGRVIEKTLYNRRTRQDEPALFVALTFERREVLDSSNIKPMNLIGVDRGENIPAVIALTDPEGCPLSRFKDSLGNPTHILRIGESYKEKQRTIQAKKEVEQRRAGGYSRKYASKAKNLADDMVRNTARDLLYYAVTQDAMLIFENLSRGFGRQGKRTFMAERQYTRMEDWLTAKLAYEGLPSKVYLSKTLAQYTSKTCSNCGFTITSADYDRVLEKLKKTATGWMTTINGKELKVEGQITYYNRYKRQNVVKDLSVELDRLSEESVNNDISSWTKGRSGEALSLLKKRFSHRPVQEKFVCLNCGFETHADEQAALNIARSWLFLRSQEYKKYQTNKTTGNTDKRAFVETWQSFYRKKLKEVWKPAV

SEQ ID NO: 33681 - protein, 978 aa, synthetic construct
  REGION 1..978: note = engineered CasX variant
QEIKRINKIRRRLVKDSNTKKAGKTGPMKTLLVPVMTPDLRERLENLRKKPENIPQPISNTSRANLNKLLTDYTEMKKAILHVYWEEFQKDPVGLMSRVAQPASKKIDQNKLKPEMDEKGNLTTAGFACSQCGQPLFVYKLEQVSEKGKAYTNYFGRCNVAEHEKLIKLAQLKPEKDSDEAVTYSLGKFGQRALDFYSIHVTKESTHPVKPLAQIAGNRYASGPVGKALSDACMGTIASFLSKYQDIIIEHQKVVKGNQKRLESLRELAGKENLEYPSVTLPPQPHTKEGVDAYNEVIARVRMWVNLNLWQKLKLSRDDAKPLLRLKGFPSFPLVERQANEVDWWDMVCNVKKLINEKKEDGKVFWQNLAGYKRQEALRPYLSSEEDRKKGKKFARYQLGDLLLHLEKKHGEDWGKVYDEAWERIDKKVEGLSKHIKLEEERRSEDAQSKAALTDWLRAKASFVIEGLKEADKDEFCRCELKLQKWYGDLRGKPFAIEAENSILDISGFSKQYNCAFIWQKDGVKKLNLYLIINYFKGGKLRFKKIKPEAFEANRFYTVINKKSGEIVPMEVNFNFDDPNLIILPLAFGKRQGREFIWNDLLSLETGSLKLANGRVIEKTLYNRRTRQDEPALFVALTFERREVLDSSNIKPMNLIGVDRGENIPAVIALTDPEGCPLSRFKDSLGNPTHILRIGESYKEKQRTIQAKKEVEQRRAGGYSRKYASKAKNLADDMVRNTARDLLYYAVTQDAMLIFENLSRGFGRQGKRTFMAERQYTRMEDWLTAKLAYEGLPSKVYLSKTLAQYTSKTCSNCGFTITSADYDRVLEKLKKTATGWMTTINGKELKVEGQITYYNRYKRQNVVKDLSVELDRLSEESVNNDISSWTKGRSGEALSLLKKRFSHRPVQEKFVCLNCGFETHADEQAALNIARSWLFLRSQEYKKYQTNKTTGNTDKRAFVETWQSFYRKKLKEVWKPAV

SEQ ID NO: 33682 - protein, 977 aa, synthetic construct
  REGION 1..977: note = engineered CasX variant
QEIKRINKIRRRLVKDSNTKKAGKTGPMKTLLVPVMTPDLRERLENLRKKPENIPQPISNTSRANLNKLLTDYTEMKKAILHVYWEEFQKDPVGLMSRVAQPASKKIDQNKLKPEMDEKGNLTTAGFACSQCGQPLFVYKLEQVSEKGKAYTNYFGRCNVAEHEKLILLAQLKPEKDSDEAVTYSLGKFGQRALDFYSIHVTKESTHPVKPLAQIAGNRYASPVGKALSDACMGTIASFLSKYQDIIIEHQKVVKGNQKRLESLRELAGKENLEYPSVTLPPQPHTKEGVDAYNEVIARVRMWVNLNLWQKLKLSRDDAKPLLRLKGFPSFPLVERQANEVDWWDMVCNVKKLINEKKEDGKVFWQNLAGYKRQEALRPYLSSEEDRKKGKKFARYQLGDLLLHLEKKHGEDWGKVYDEAWERIDKKVEGLSKHIKLEEERRSEDAQSKAALTDWLRAKASFVIEGLKEADKDEFCRCELKLQKWYGDLRGKPFAIEAENSILDISGFSKQYNCAFIWQKDGVKKLNLYLIINYFKGGKLRFKKIKPEAFEANRFYTVINKKSGEIVPMEVNFNFDDPNLIILPLAFGKRQGREFIWNDLLSLETGSLKLANGRVIEKTLYNRRTRQDEPALFVALTFERREVLDSSNIKPMNLIGVDRGENIPAVIALTDPEGCPLSRFKDSLGNPTHILRIGESYKEKQRTIQAKKEVEQRRAGGYSRKYASKAKNLADDMVRNTARDLLYYAVTQDAMLIFENLSRGFGRQGKRTFMAERQYTRMEDWLTAKLAYEGLPSKVYLSKTLAQYTSKTCSNCGFTITSADYDRVLEKLKKTATGWMTTINGKELKVEGQITYYNRYKRQNVVKDLSVELDRLSEESVNNDISSWTKGRSGEALSLLKKRFSHRPVQEKFVCLNCGFETHADEQAALNIARSWLFLRSQEYKKYQTNKTTGNTDKRAFVETWQSFYRKKLKEVWKPAV

SEQ ID NO: 33683 - protein, 979 aa, synthetic construct
  REGION 1..979: note = engineered CasX variant
QEIKRINKIRRRLVKDSNTKKAGKTGPMKTLLVPVMTPDLRERLENLRKKPENIPQPISNTSRANLNKLLTDYTEMKKAILHVYWEEFQKDPVGLMSRVAQPASKKIDQNKLKPEMDEKGNLTTAGFACSQCGQPLFVYKLEQVSEKGKAYTNYFGRCNVAEHEKLILLAQLKPEKDSDEAVTYSLGKFGQRALDFYSIHVTKESTHPVKPLAQIAGNRYASYPVGKALSDACMGTIASFLSKYQDIIIEHQKVVKGNQKRLESLRELAGKENLEYPSVTLPPQPHTKEGVDAYNEVIARVRMWVNLNLWQKLKLSRDDAKPLLRLKGFPSFPLVERQANEVDWWDMVCNVKKLINEKKEDGKVFWQNLAGYKRQEALRPYLSSEEDRKKGKKFARYQLGDLLLHLEKKHGEDWGKVYDEAWERIDKKVEGLSKHIKLEEERRSEDAQSKAALTDWLRAKASFVIEGLKEADKDEFCRCELKLQKWYGDLRGKPFAIEAENSILDISGFSKQYNCAFIWQKDGVKKLNLYLIINYFKGGKLRFKKIKPEAFEANRFYTVINKKSGEIVPMEVNFNFDDPNLIILPLAFGKRQGREFIWNDLLSLETGSLKLANGRVIEKTLYNRRTRQDEPALFVALTFERREVLDSSNIKPMNLIGVDRGENIPAVIALTDPEGCPLSRFKDSLGNPTHILRIGESYKEKQRTIQAKKEVEQRRAGGYSRKYASKAKNLADDMVRNTARDLLYYAVTQDAMLIFENLSRGFGRQGKRTFMAERQYTRMEDWLTAKLAYEGPLPSKTYLSKTLAQYTSKTCSNCGFTITSADYDRVLEKLKKTATGWMTTINGKELKVEGQITYYNRYKRQNVVKDLSVELDRLSEESVNNDISSWTKGRSGEALSLLKKRFSHRPVQEKFVCLNCGFETHADEQAALNIARSWLFLRSQEYKKYQTNKTTGNTDKRAFVETWQSFYRKKLKEVWKPAV

SEQ ID NO: 33684 - protein, 979 aa, synthetic construct
  REGION 1..979: note = engineered CasX variant
QEIKRINKIRRRLVKDSNTKKAGKTGPMKTLLVPVMTPDLRERLENLRKKPENIPQPISNTSRANLNKLLTDYTEMKKAILHVYWEEFQKDPVGLMSRVAQPASKKIDQNKLKPEMDEKGNLTTAGFACSQCGQPLFVYKLEQVSEKGKAYTNYFGRCNVAEHEKLILLAQLKPEKDSDEAVTYSLGKFGQRALDFYSIHVTKESTHPVKPLAQIAGNRYASHPVGKALSDACMGTIASFLSKYQDIIIEHQKVVKGNQKRLESLRELAGKENLEYPSVTLPPQPHTKEGVDAYNEVIARVRMWVNLNLWQKLKLSRDDAKPLLRLKGFPSFPLVERQANEVDWWDMVCNVKKLINEKKEDGKVFWQNLAGYKRQEALRPYLSSEEDRKKGKKFARYQLGDLLLHLEKKHGEDWGKVYDEAWERIDKKVEGLSKHIKLEEERRSEDAQSKAALTDWLRAKASFVIEGLKEADKDEFCRCELKLQKWYGDLRGKPFAIEAENSILDISGFSKQYNCAFIWQKDGVKKLNLYLIINYFKGGKLRFKKIKPEAFEANRFYTVINKKSGEIVPMEVNFNFDDPNLIILPLAFGKRQGREFIWNDLLSLETGSLKLANGRVIEKTLYNRRTRQDEPALFVALTFERREVLDSSNIKPMNLIGVDRGENIPAVIALTDPEGCPLSRFKDSLGNPTHILRIGESYKEKQRTIQAKKEVEQRRAGGYSRKYASKAKNLADDMVRNTARDLLYYAVTQDAMLIFENLSRGFGRQGKRTFMAERQYTRMEDWLTAKLAYEGPLPSKTYLSKTLAQYTSKTCSNCGFTITSADYDRVLEKLKKTATGWMTTINGKELKVEGQITYYNRYKRQNVVKDLSVELDRLSEESVNNDISSWTKGRSGEALSLLKKRFSHRPVQEKFVCLNCGFETHADEQAALNIARSWLFLRSQEYKKYQTNKTTGNTDKRAFVETWQSFYRKKLKEVWKPAV

SEQ ID NO: 33685 - protein, 979 aa, synthetic construct
  REGION 1..979: note = engineered CasX variant
QEIKRINKIRRRLVKDSNTKKAGKTGPMKTLLVPVMTPDLRERLENLRKKPENIPQPISNTSRANLNKLLTDYTEMKKAILHVYWEEFQKDPVGLMSRVAQPASKKIDQNKLKPEMDEKGNLTTAGFACSQCGQPLFVYKLEQVSEKGKAYTNYFGRCNVAEHEKLILLAQLKPEKDSDEAVTYSLGKFGQRALDFYSIHVTKESTHPVKPLAQIAGNRYASSPVGKALSDACMGTIASFLSKYQDIIIEHQKVVKGNQKRLESLRELAGKENLEYPSVTLPPQPHTKEGVDAYNEVIARVRMWVNLNLWQKLKLSRDDAKPLLRLKGFPSFPLVERQANEVDWWDMVCNVKKLINEKKEDGKVFWQNLAGYKRQEALRPYLSSEEDRKKGKKFARYQLGDLLLHLEKKHGEDWGKVYDEAWERIDKKVEGLSKHIKLEEERRSEDAQSKAALTDWLRAKASFVIEGLKEADKDEFCRCELKLQKWYGDLRGKPFAIEAENSILDISGFSKQYNCAFIWQKDGVKKLNLYLIINYFKGGKLRFKKIKPEAFEANRFYTVINKKSGEIVPMEVNFNFDDPNLIILPLAFGKRQGREFIWNDLLSLETGSLKLANGRVIEKTLYNRRTRQDEPALFVALTFERREVLDSSNIKPMNLIGVDRGENIPAVIALTDPEGCPLSRFKDSLGNPTHILRIGESYKEKQRTIQAKKEVEQRRAGGYSRKYASKAKNLADDMVRNTARDLLYYAVTQDAMLIFENLSRGFGRQGKRTFMAERQYTRMEDWLTAKLAYEGPLPSKTYLSKTLAQYTSKTCSNCGFTITSADYDRVLEKLKKTATGWMTTINGKELKVEGQITYYNRYKRQNVVKDLSVELDRLSEESVNNDISSWTKGRSGEALSLLKKRFSHRPVQEKFVCLNCGFETHADEQAALNIARSWLFLRSQEYKKYQTNKTTGNTDKRAFVETWQSFYRKKLKEVWKPAV

SEQ ID NO: 33686 - protein, 979 aa, synthetic construct
  REGION 1..979: note = engineered CasX variant
QEIKRINKIRRRLVKDSNTKKAGKTGPMKTLLVPVMTPDLRERLENLRKKPENIPQPISNTSRANLNKLLTDYTEMKKAILHVYWEEFQKDPVGLMSRVAQPASKKIDQNKLKPEMDEKGNLTTAGFACSQCGQPLFVYKLEQVSEKGKAYTNYFGRCNVAEHEKLILLAQLKPEKDSDEAVTYSLGKFGQRALDFYSIHVTKESTHPVKPLAQIAGNRYASTPVGKALSDACMGTIASFLSKYQDIIIEHQKVVKGNQKRLESLRELAGKENLEYPSVTLPPQPHTKEGVDAYNEVIARVRMWVNLNLWQKLKLSRDDAKPLLRLKGFPSFPLVERQANEVDWWDMVCNVKKLINEKKEDGKVFWQNLAGYKRQEALRPYLSSEEDRKKGKKFARYQLGDLLLHLEKKHGEDWGKVYDEAWERIDKKVEGLSKHIKLEEERRSEDAQSKAALTDWLRAKASFVIEGLKEADKDEFCRCELKLQKWYGDLRGKPFAIEAENSILDISGFSKQYNCAFIWQKDGVKKLNLYLIINYFKGGKLRFKKIKPEAFEANRFYTVINKKSGEIVPMEVNFNFDDPNLIILPLAFGKRQGREFIWNDLLSLETGSLKLANGRVIEKTLYNRRTRQDEPALFVALTFERREVLDSSNIKPMNLIGVDRGENIPAVIALTDPEGCPLSRFKDSLGNPTHILRIGESYKEKQRTIQAKKEVEQRRAGGYSRKYASKAKNLADDMVRNTARDLLYYAVTQDAMLIFENLSRGFGRQGKRTFMAERQYTRMEDWLTAKLAYEGPLPSKTYLSKTLAQYTSKTCSNCGFTITSADYDRVLEKLKKTATGWMTTINGKELKVEGQITYYNRYKRQNVVKDLSVELDRLSEESVNNDISSWTKGRSGEALSLLKKRFSHRPVQEKFVCLNCGFETHADEQAALNIARSWLFLRSQEYKKYQTNKTTGNTDKRAFVETWQSFYRKKLKEVWKPAV

SEQ ID NO: 33687 - protein, 979 aa, synthetic construct
  REGION 1..979: note = engineered CasX variant
QEIKRINKIRRRLVKDSNTKKAGKTGPMKTLLVPVMTPDLRERLENLRKKPENIPQPISNTSRANLNKLLTDYTEMKKAILHVYWEEFQKDPVGLMSRVAQPASKKIDQNKLKPEMDEKGNLTTAGFACSQCGQPLFVYKLEQVSEKGKAYTNYFGRCNVAEHEKLILLAQLKPEKDSDEAVTYSLGKFGQRALDFYSIHVTKESTHPVKPLAQIAGNRYASAPVGKALSDACMGTIASFLSKYQDIIIEHQKVVKGNQKRLESLRELAGKENLEYPSVTLPPQPHTKEGVDAYNEVIARVRMWVNLNLWQKLKLSRDDAKPLLRLKGFPSFPLVERQANEVDWWDMVCNVKKLINEKKEDGKVFWQNLAGYKRQEALRPYLSSEEDRKKGKKFARYQLGDLLLHLEKKHGEDWGKVYDEAWERIDKKVEGLSKHIKLEEERRSEDAQSKAALTDWLRAKASFVIEGLKEADKDEFCRCELKLQKWYGDLRGKPFAIEAENSILDISGFSKQYNCAFIWQKDGVKKLNLYLIINYFKGGKLRFKKIKPEAFEANRFYTVINKKSGEIVPMEVNFNFDDPNLIILPLAFGKRQGREFIWNDLLSLETGSLKLANGRVIEKTLYNRRTRQDEPALFVALTFERREVLDSSNIKPMNLIGVDRGENIPAVIALTDPEGCPLSRFKDSLGNPTHILRIGESYKEKQRTIQAKKEVEQRRAGGYSRKYASKAKNLADDMVRNTARDLLYYAVTQDAMLIFENLSRGFGRQGKRTFMAERQYTRMEDWLTAKLAYEGPLPSKTYLSKTLAQYTSKTCSNCGFTITSADYDRVLEKLKKTATGWMTTINGKELKVEGQITYYNRYKRQNVVKDLSVELDRLSEESVNNDISSWTKGRSGEALSLLKKRFSHRPVQEKFVCLNCGFETHADEQAALNIARSWLFLRSQEYKKYQTNKTTGNTDKRAFVETWQSFYRKKLKEVWKPAV

SEQ ID NO: 33688 - protein, 979 aa, synthetic construct
  REGION 1..979: note = engineered CasX variant
QEIKRINKIRRRLVKDSNTKKAGKTGPMKTLLVPVMTPDLRERLENLRKKPENIPQPISNTSRANLNKLLTDYTEMKKAILHVYWEEFQKDPVGLMSRVAQPASKKIDQNKLKPEMDEKGNLTTAGFACSQCGQPLFVYKLEQVSEKGKAYTNYFGRCNVAEHEKLILLAQLKPEKDSDEAVTYSLGKFGQRALDFYSIHVTKESTHPVKPLAQIAGNRYASVPVGKALSDACMGTIASFLSKYQDIIIEHQKVVKGNQKRLESLRELAGKENLEYPSVTLPPQPHTKEGVDAYNEVIARVRMWVNLNLWQKLKLSRDDAKPLLRLKGFPSFPLVERQANEVDWWDMVCNVKKLINEKKEDGKVFWQNLAGYKRQEALRPYLSSEEDRKKGKKFARYQLGDLLLHLEKKHGEDWGKVYDEAWERIDKKVEGLSKHIKLEEERRSEDAQSKAALTDWLRAKASFVIEGLKEADKDEFCRCELKLQKWYGDLRGKPFAIEAENSILDISGFSKQYNCAFIWQKDGVKKLNLYLIINYFKGGKLRFKKIKPEAFEANRFYTVINKKSGEIVPMEVNFNFDDPNLIILPLAFGKRQGREFIWNDLLSLETGSLKLANGRVIEKTLYNRRTRQDEPALFVALTFERREVLDSSNIKPMNLIGVDRGENIPAVIALTDPEGCPLSRFKDSLGNPTHILRIGESYKEKQRTIQAKKEVEQRRAGGYSRKYASKAKNLADDMVRNTARDLLYYAVTQDAMLIFENLSRGFGRQGKRTFMAERQYTRMEDWLTAKLAYEGPLPSKTYLSKTLAQYTSKTCSNCGFTITSADYDRVLEKLKKTATGWMTTINGKELKVEGQITYYNRYKRQNVVKDLSVELDRLSEESVNNDISSWTKGRSGEALSLLKKRFSHRPVQEKFVCLNCGFETHADEQAALNIARSWLFLRSQEYKKYQTNKTTGNTDKRAFVETWQSFYRKKLKEVWKPAV

SEQ ID NO: 33689 - protein, 979 aa, synthetic construct
  REGION 1..979: note = engineered CasX variant
QEIKRINKIRRRLVKDSNTKKAGKTGPMKTLLVPVMTPDLRERLENLRKKPENIPQPISNTSRANLNKLLTDYTEMKKAILHVYWEEFQKDPVGLMSRVAQPASKKIDQNKLKPEMDEKGNLTTAGFACSQCGQPLFVYKLEQVSEKGKAYTNYFGRCNVAEHEKLIKLAQLKPEKDSDEAVTYSLGKFGQRALDFYSIHVTKESTHPVKPLAQIAGNRYASGPVGKALSDACMGTIASFLSKYQDIIIEHQKVVKGNQKRLESLRELAGKENLEYPSVTLPPQPHTKEGVDAYNEVIARVRMWVNLNLWQKLKLSRDDAKPLLRLKGFPSFPLVERQANEVDWWDMVCNVKKLINEKKEDGKVFWQNLAGYKRQEALRPYLSSEEDRKKGKKFARYQLGDLLLHLEKKHGEDWGKVYDEAWERIDKKVEGLSKHIKLEEERRSEDAQSKAALTDWLRAKASFVIEGLKEADKDEFCRCELKLQKWYGDLRGKPFAIEAENSILDISGFSKQYNCAFIWQKDGVKKLNLYLIINYFKGGKLRFKKIKPEAFEANRFYTVINKKSGEIVPMEVNFNFDDPNLIILPLAFGKRQGREFIWNDLLSLETGSLKLANGRVIEKTLYNRRTRQDEPALFVALTFERREVLDSSNIKPMNLIGVDRGENIPAVIALTDPEGCPLSRFKDSLGNPTHILRIGESYKEKQRTIQAKKEVEQRRAGGYSRKYASKAKNLADDMVRNTARDLLYYAVTQDAMLIFENLSRGFGRQGKRTFMAERQYTRMEDWLTAKLAYEGPLPSKTYLSKTLAQYTSKTCSNCGFTITSADYDRVLEKLKKTATGWMTTINGKELKVEGQITYYNRYKRQNVVKDLSVELDRLSEESVNNDISSWTKGRSGEALSLLKKRFSHRPVQEKFVCLNCGFETHADEQAALNIARSWLFLRSQEYKKYQTNKTTGNTDKRAFVETWQSFYRKKLKEVWKPAV

SEQ ID NO: 33690 - protein, 978 aa, synthetic construct
  REGION 1..978: note = engineered CasX variant
QEIKRINKIRRRLVKDSNTKKAGKTGPMKTLLVPVMTPDLRERLENLRKKPENIPQPISNTSRANLNKLLTDYTEMKKAILHVYWEEFQKDPVGLMSRVAQPASKKIDQNKLKPEMDEKGNLTTAGFACSQCGQPLFVYKLEQVSEKGKAYTNYFGRCNVAEHEKLILLAQLKPEKDSDEAVTYSLGKFGQRALDFYSIHVTKESTHPVKPLAQIAGNRYASPVGKALSDACMGTIASFLSKYQDIIIEHQKVVKGNQKRLESLRELAGKENLEYPSVTLPPQPHTKEGVDAYNEVIARVRMWVNLNLWQKLKLSRDDAKPLLRLKGFPSFPLVERQANEVDWWDMVCNVKKLINEKKEDGKVFWQNLAGYKRQEALRPYLSSEEDRKKGKKFARYQLGDLLLHLEKKHGEDWGKVYDEAWERIDKKVEGLSKHIKLEEERRSEDAQSKAALTDWLRAKASFVIEGLKEADKDEFCRCELKLQKWYGDLRGKPFAIEAENSILDISGFSKQYNCAFIWQKDGVKKLNLYLIINYFKGGKLRFKKIKPEAFEANRFYTVINKKSGEIVPMEVNFNFDDPNLIILPLAFGKRQGREFIWNDLLSLETGSLKLANGRVIEKTLYNRRTRQDEPALFVALTFERREVLDSSNIKPMNLIGVDRGENIPAVIALTDPEGCPLSRFKDSLGNPTHILRIGESYKEKQRTIQAKKEVEQRRAGGYSRKYASKAKNLADDMVRNTARDLLYYAVTQDAMLIFENLSRGFGRQGKRTFMAERQYTRMEDWLTAKLAYEGPLPSKTYLSKTLAQYTSKTCSNCGFTITSADYDRVLEKLKKTATGWMTTINGKELKVEGQITYYNRYKRQNVVKDLSVELDRLSEESVNNDISSWTKGRSGEALSLLKKRFSHRPVQEKFVCLNCGFETHADEQAALNIARSWLFLRSQEYKKYQTNKTTGNTDKRAFVETWQSFYRKKLKEVWKPAV

SEQ ID NO: 33691 - protein, 979 aa, synthetic construct
  REGION 1..979: note = engineered CasX variant
QEIKRINKIRRRLVKDSNTKKAGKTGPMKTLLVPVMTPDLRERLENLRKKPENIPQPISNTSRANLNKLLTDYTEMKKAILHVYWEEFQKDPVGLMSRVAQPASKKIDQNKLKPEMDEKGNLTTAGFACSQCGQPLFVYKLEQVSEKGKAYTNYFGRCNVAEHEKLILLAQLKPEKDSDEAVTYSLGKFGQRALDFYSIHVTKESTHPVKPLAQIAGNRYASYPVGKALSDACMGTIASFLSKYQDIIIEHQKVVKGNQKRLESLRELAGKENLEYPSVTLPPQPHTKEGVDAYNEVIARVRMWVNLNLWQKLKLSRDDAKPLLRLKGFPSFPLVERQANEVDWWDMVCNVKKLINEKKEDGKVFWQNLAGYKRQEALRPYLSSEEDVRKKGKKFARYQLGDLLLHLEKKHGEDWGKVYDEAWERIDKKVEGLSKHIKLEEERRSEDAQSKAALTDWLRAKASFVIEGLKEADKDEFCRCELKLQKWYGDLRGKPFAIEAENSILDISGFSKQYNCAFIWQKDGVKKLNLYLIINYFKGGKLRFKKIKPEAFEANRFYTVINKKSGEIVPMEVNFNFDDPNLIILPLAFGKRQGREFIWNDLLSLETGSLKLANGRVIEKTLYNRRTRQDEPALFVALTFERREVLDSSNIKPMNLIGVDRGENIPAVIALTDPEGCPLSRFKDSLGNPTHILRIGESYKEKQRTIQAKKEVEQRRAGGYSRKYASKAKNLADDMVRNTARDLLYYAVTQDAMLIFENLSRGFGRQGKRTFMAERQYTRMEDWLTAKLAYEGLPSKTYLSKTLAQYTSKTCSNCGFTITSADYDRVLEKLKKTATGWMTTINGKELKVEGQITYYNRYKRQNVVKDLSVELDRLSEESVNNDISSWTKGRSGEALSLLKKRFSHRPVQEKFVCLNCGFETHADEQAALNIARSWLFLRSQEYKKYQTNKTTGNTDKRAFVETWQSFYRKKLKEVWKPAV

SEQ ID NO: 33692 - protein, 979 aa, synthetic construct
  REGION 1..979: note = engineered CasX variant
QEIKRINKIRRRLVKDSNTKKAGKTGPMKTLLVPVMTPDLRERLENLRKKPENIPQPISNTSRANLNKLLTDYTEMKKAILHVYWEEFQKDPVGLMSRVAQPASKKIDQNKLKPEMDEKGNLTTAGFACSQCGQPLFVYKLEQVSEKGKAYTNYFGRCNVAEHEKLILLAQLKPEKDSDEAVTYSLGKFGQRALDFYSIHVTKESTHPVKPLAQIAGNRYASHPVGKALSDACMGTIASFLSKYQDIIIEHQKVVKGNQKRLESLRELAGKENLEYPSVTLPPQPHTKEGVDAYNEVIARVRMWVNLNLWQKLKLSRDDAKPLLRLKGFPSFPLVERQANEVDWWDMVCNVKKLINEKKEDGKVFWQNLAGYKRQEALRPYLSSEEDVRKKGKKFARYQLGDLLLHLEKKHGEDWGKVYDEAWERIDKKVEGLSKHIKLEEERRSEDAQSKAALTDWLRAKASFVIEGLKEADKDEFCRCELKLQKWYGDLRGKPFAIEAENSILDISGFSKQYNCAFIWQKDGVKKLNLYLIINYFKGGKLRFKKIKPEAFEANRFYTVINKKSGEIVPMEVNFNFDDPNLIILPLAFGKRQGREFIWNDLLSLETGSLKLANGRVIEKTLYNRRTRQDEPALFVALTFERREVLDSSNIKPMNLIGVDRGENIPAVIALTDPEGCPLSRFKDSLGNPTHILRIGESYKEKQRTIQAKKEVEQRRAGGYSRKYASKAKNLADDMVRNTARDLLYYAVTQDAMLIFENLSRGFGRQGKRTFMAERQYTRMEDWLTAKLAYEGLPSKTYLSKTLAQYTSKTCSNCGFTITSADYDRVLEKLKKTATGWMTTINGKELKVEGQITYYNRYKRQNVVKDLSVELDRLSEESVNNDISSWTKGRSGEALSLLKKRFSHRPVQEKFVCLNCGFETHADEQAALNIARSWLFLRSQEYKKYQTNKTTGNTDKRAFVETWQSFYRKKLKEVWKPAV

SEQ ID NO: 33693 - protein, 979 aa, synthetic construct
  REGION 1..979: note = engineered CasX variant
QEIKRINKIRRRLVKDSNTKKAGKTGPMKTLLVPVMTPDLRERLENLRKKPENIPQPISNTSRANLNKLLTDYTEMKKAILHVYWEEFQKDPVGLMSRVAQPASKKIDQNKLKPEMDEKGNLTTAGFACSQCGQPLFVYKLEQVSEKGKAYTNYFGRCNVAEHEKLILLAQLKPEKDSDEAVTYSLGKFGQRALDFYSIHVTKESTHPVKPLAQIAGNRYASSPVGKALSDACMGTIASFLSKYQDIIIEHQKVVKGNQKRLESLRELAGKENLEYPSVTLPPQPHTKEGVDAYNEVIARVRMWVNLNLWQKLKLSRDDAKPLLRLKGFPSFPLVERQANEVDWWDMVCNVKKLINEKKEDGKVFWQNLAGYKRQEALRPYLSSEEDVRKKGKKFARYQLGDLLLHLEKKHGEDWGKVYDEAWERIDKKVEGLSKHIKLEEERRSEDAQSKAALTDWLRAKASFVIEGLKEADKDEFCRCELKLQKWYGDLRGKPFAIEAENSILDISGFSKQYNCAFIWQKDGVKKLNLYLIINYFKGGKLRFKKIKPEAFEANRFYTVINKKSGEIVPMEVNFNFDDPNLIILPLAFGKRQGREFIWNDLLSLETGSLKLANGRVIEKTLYNRRTRQDEPALFVALTFERREVLDSSNIKPMNLIGVDRGENIPAVIALTDPEGCPLSRFKDSLGNPTHILRIGESYKEKQRTIQAKKEVEQRRAGGYSRKYASKAKNLADDMVRNTARDLLYYAVTQDAMLIFENLSRGFGRQGKRTFMAERQYTRMEDWLTAKLAYEGLPSKTYLSKTLAQYTSKTCSNCGFTITSADYDRVLEKLKKTATGWMTTINGKELKVEGQITYYNRYKRQNVVKDLSVELDRLSEESVNNDISSWTKGRSGEALSLLKKRFSHRPVQEKFVCLNCGFETHADEQAALNIARSWLFLRSQEYKKYQTNKTTGNTDKRAFVETWQSFYRKKLKEVWKPAV

SEQ ID NO: 33694 - protein, 979 aa, synthetic construct
  REGION 1..979: note = engineered CasX variant
QEIKRINKIRRRLVKDSNTKKAGKTGPMKTLLVPVMTPDLRERLENLRKKPENIPQPISNTSRANLNKLLTDYTEMKKAILHVYWEEFQKDPVGLMSRVAQPASKKIDQNKLKPEMDEKGNLTTAGFACSQCGQPLFVYKLEQVSEKGKAYTNYFGRCNVAEHEKLILLAQLKPEKDSDEAVTYSLGKFGQRALDFYSIHVTKESTHPVKPLAQIAGNRYASTPVGKALSDACMGTIASFLSKYQDIIIEHQKVVKGNQKRLESLRELAGKENLEYPSVTLPPQPHTKEGVDAYNEVIARVRMWVNLNLWQKLKLSRDDAKPLLRLKGFPSFPLVERQANEVDWWDMVCNVKKLINEKKEDGKVFWQNLAGYKRQEALRPYLSSEEDVRKKGKKFARYQLGDLLLHLEKKHGEDWGKVYDEAWERIDKKVEGLSKHIKLEEERRSEDAQSKAALTDWLRAKASFVIEGLKEADKDEFCRCELKLQKWYGDLRGKPFAIEAENSILDISGFSKQYNCAFIWQKDGVKKLNLYLIINYFKGGKLRFKKIKPEAFEANRFYTVINKKSGEIVPMEVNFNFDDPNLIILPLAFGKRQGREFIWNDLLSLETGSLKLANGRVIEKTLYNRRTRQDEPALFVALTFERREVLDSSNIKPMNLIGVDRGENIPAVIALTDPEGCPLSRFKDSLGNPTHILRIGESYKEKQRTIQAKKEVEQRRAGGYSRKYASKAKNLADDMVRNTARDLLYYAVTQDAMLIFENLSRGFGRQGKRTFMAERQYTRMEDWLTAKLAYEGLPSKTYLSKTLAQYTSKTCSNCGFTITSADYDRVLEKLKKTATGWMTTINGKELKVEGQITYYNRYKRQNVVKDLSVELDRLSEESVNNDISSWTKGRSGEALSLLKKRFSHRPVQEKFVCLNCGFETHADEQAALNIARSWLFLRSQEYKKYQTNKTTGNTDKRAFVETWQSFYRKKLKEVWKPAV

SEQ ID NO: 33695 - protein, 979 aa, synthetic construct
  REGION 1..979: note = engineered CasX variant
QEIKRINKIRRRLVKDSNTKKAGKTGPMKTLLVPVMTPDLRERLENLRKKPENIPQPISNTSRANLNKLLTDYTEMKKAILHVYWEEFQKDPVGLMSRVAQPASKKIDQNKLKPEMDEKGNLTTAGFACSQCGQPLFVYKLEQVSEKGKAYTNYFGRCNVAEHEKLILLAQLKPEKDSDEAVTYSLGKFGQRALDFYSIHVTKESTHPVKPLAQIAGNRYASAPVGKALSDACMGTIASFLSKYQDIIIEHQKVVKGNQKRLESLRELAGKENLEYPSVTLPPQPHTKEGVDAYNEVIARVRMWVNLNLWQKLKLSRDDAKPLLRLKGFPSFPLVERQANEVDWWDMVCNVKKLINEKKEDGKVFWQNLAGYKRQEALRPYLSSEEDVRKKGKKFARYQLGDLLLHLEKKHGEDWGKVYDEAWERIDKKVEGLSKHIKLEEERRSEDAQSKAALTDWLRAKASFVIEGLKEADKDEFCRCELKLQKWYGDLRGKPFAIEAENSILDISGFSKQYNCAFIWQKDGVKKLNLYLIINYFKGGKLRFKKIKPEAFEANRFYTVINKKSGEIVPMEVNFNFDDPNLIILPLAFGKRQGREFIWNDLLSLETGSLKLANGRVIEKTLYNRRTRQDEPALFVALTFERREVLDSSNIKPMNLIGVDRGENIPAVIALTDPEGCPLSRFKDSLGNPTHILRIGESYKEKQRTIQAKKEVEQRRAGGYSRKYASKAKNLADDMVRNTARDLLYYAVTQDAMLIFENLSRGFGRQGKRTFMAERQYTRMEDWLTAKLAYEGLPSKTYLSKTLAQYTSKTCSNCGFTITSADYDRVLEKLKKTATGWMTTINGKELKVEGQITYYNRYKRQNVVKDLSVELDRLSEESVNNDISSWTKGRSGEALSLLKKRFSHRPVQEKFVCLNCGFETHADEQAALNIARSWLFLRSQEYKKYQTNKTTGNTDKRAFVETWQSFYRKKLKEVWKPAV

SEQ ID NO: 33696 - protein, 979 aa, synthetic construct
  REGION 1..979: note = engineered CasX variant
QEIKRINKIRRRLVKDSNTKKAGKTGPMKTLLVPVMTPDLRERLENLRKKPENIPQPISNTSRANLNKLLTDYTEMKKAILHVYWEEFQKDPVGLMSRVAQPASKKIDQNKLKPEMDEKGNLTTAGFACSQCGQPLFVYKLEQVSEKGKAYTNYFGRCNVAEHEKLILLAQLKPEKDSDEAVTYSLGKFGQRALDFYSIHVTKESTHPVKPLAQIAGNRYASVPVGKALSDACMGTIASFLSKYQDIIIEHQKVVKGNQKRLESLRELAGKENLEYPSVTLPPQPHTKEGVDAYNEVIARVRMWVNLNLWQKLKLSRDDAKPLLRLKGFPSFPLVERQANEVDWWDMVCNVKKLINEKKEDGKVFWQNLAGYKRQEALRPYLSSEEDVRKKGKKFARYQLGDLLLHLEKKHGEDWGKVYDEAWERIDKKVEGLSKHIKLEEERRSEDAQSKAALTDWLRAKASFVIEGLKEADKDEFCRCELKLQKWYGDLRGKPFAIEAENSILDISGFSKQYNCAFIWQKDGVKKLNLYLIINYFKGGKLRFKKIKPEAFEANRFYTVINKKSGEIVPMEVNFNFDDPNLIILPLAFGKRQGREFIWNDLLSLETGSLKLANGRVIEKTLYNRRTRQDEPALFVALTFERREVLDSSNIKPMNLIGVDRGENIPAVIALTDPEGCPLSRFKDSLGNPTHILRIGESYKEKQRTIQAKKEVEQRRAGGYSRKYASKAKNLADDMVRNTARDLLYYAVTQDAMLIFENLSRGFGRQGKRTFMAERQYTRMEDWLTAKLAYEGLPSKTYLSKTLAQYTSKTCSNCGFTITSADYDRVLEKLKKTATGWMTTINGKELKVEGQITYYNRYKRQNVVKDLSVELDRLSEESVNNDISSWTKGRSGEALSLLKKRFSHRPVQEKFVCLNCGFETHADEQAALNIARSWLFLRSQEYKKYQTNKTTGNTDKRAFVETWQSFYRKKLKEVWKPAV

SEQ ID NO: 33697 - protein, 979 aa, synthetic construct
  REGION 1..979: note = engineered CasX variant
QEIKRINKIRRRLVKDSNTKKAGKTGPMKTLLVPVMTPDLRERLENLRKKPENIPQPISNTSRANLNKLLTDYTEMKKAILHVYWEEFQKDPVGLMSRVAQPASKKIDQNKLKPEMDEKGNLTTAGFACSQCGQPLFVYKLEQVSEKGKAYTNYFGRCNVAEHEKLIKLAQLKPEKDSDEAVTYSLGKFGQRALDFYSIHVTKESTHPVKPLAQIAGNRYASGPVGKALSDACMGTIASFLSKYQDIIIEHQKVVKGNQKRLESLRELAGKENLEYPSVTLPPQPHTKEGVDAYNEVIARVRMWVNLNLWQKLKLSRDDAKPLLRLKGFPSFPLVERQANEVDWWDMVCNVKKLINEKKEDGKVFWQNLAGYKRQEALRPYLSSEEDVRKKGKKFARYQLGDLLLHLEKKHGEDWGKVYDEAWERIDKKVEGLSKHIKLEEERRSEDAQSKAALTDWLRAKASFVIEGLKEADKDEFCRCELKLQKWYGDLRGKPFAIEAENSILDISGFSKQYNCAFIWQKDGVKKLNLYLIINYFKGGKLRFKKIKPEAFEANRFYTVINKKSGEIVPMEVNFNFDDPNLIILPLAFGKRQGREFIWNDLLSLETGSLKLANGRVIEKTLYNRRTRQDEPALFVALTFERREVLDSSNIKPMNLIGVDRGENIPAVIALTDPEGCPLSRFKDSLGNPTHILRIGESYKEKQRTIQAKKEVEQRRAGGYSRKYASKAKNLADDMVRNTARDLLYYAVTQDAMLIFENLSRGFGRQGKRTFMAERQYTRMEDWLTAKLAYEGLPSKTYLSKTLAQYTSKTCSNCGFTITSADYDRVLEKLKKTATGWMTTINGKELKVEGQITYYNRYKRQNVVKDLSVELDRLSEESVNNDISSWTKGRSGEALSLLKKRFSHRPVQEKFVCLNCGFETHADEQAALNIARSWLFLRSQEYKKYQTNKTTGNTDKRAFVETWQSFYRKKLKEVWKPAV

SEQ ID NO: 33698 - protein, 978 aa, synthetic construct
  REGION 1..978: note = engineered CasX variant
QEIKRINKIRRRLVKDSNTKKAGKTGPMKTLLVPVMTPDLRERLENLRKKPENIPQPISNTSRANLNKLLTDYTEMKKAILHVYWEEFQKDPVGLMSRVAQPASKKIDQNKLKPEMDEKGNLTTAGFACSQCGQPLFVYKLEQVSEKGKAYTNYFGRCNVAEHEKLILLAQLKPEKDSDEAVTYSLGKFGQRALDFYSIHVTKESTHPVKPLAQIAGNRYASPVGKALSDACMGTIASFLSKYQDIIIEHQKVVKGNQKRLESLRELAGKENLEYPSVTLPPQPHTKEGVDAYNEVIARVRMWVNLNLWQKLKLSRDDAKPLLRLKGFPSFPLVERQANEVDWWDMVCNVKKLINEKKEDGKVFWQNLAGYKRQEALRPYLSSEEDVRKKGKKFARYQLGDLLLHLEKKHGEDWGKVYDEAWERIDKKVEGLSKHIKLEEERRSEDAQSKAALTDWLRAKASFVIEGLKEADKDEFCRCELKLQKWYGDLRGKPFAIEAENSILDISGFSKQYNCAFIWQKDGVKKLNLYLIINYFKGGKLRFKKIKPEAFEANRFYTVINKKSGEIVPMEVNFNFDDPNLIILPLAFGKRQGREFIWNDLLSLETGSLKLANGRVIEKTLYNRRTRQDEPALFVALTFERREVLDSSNIKPMNLIGVDRGENIPAVIALTDPEGCPLSRFKDSLGNPTHILRIGESYKEKQRTIQAKKEVEQRRAGGYSRKYASKAKNLADDMVRNTARDLLYYAVTQDAMLIFENLSRGFGRQGKRTFMAERQYTRMEDWLTAKLAYEGLPSKTYLSKTLAQYTSKTCSNCGFTITSADYDRVLEKLKKTATGWMTTINGKELKVEGQITYYNRYKRQNVVKDLSVELDRLSEESVNNDISSWTKGRSGEALSLLKKRFSHRPVQEKFVCLNCGFETHADEQAALNIARSWLFLRSQEYKKYQTNKTTGNTDKRAFVETWQSFYRKKLKEVWKPAV

SEQ ID NO: 33699 - protein, 978 aa, synthetic construct
  REGION 1..978: note = engineered CasX variant
QEIKRINKIRRRLVKDSNTKKAGKTGPMKTLLVPVMTPDLRERLENLRKKPENIPQPISNTSRANLNKLLTDYTEMKKAILHVYWEEFQKDPVGLMSRVAQPASKKIDQNKLKPEMDEKGNLTTAGFACSQCGQPLFVYKLEQVSEKGKAYTNYFGRCNVAEHEKLILLAQLKPEKDSDEAVTYSLGKFGQRALDFYSIHVTKESTHPVKPLAQIAGNRYASYPVGKALSDACMGTIASFLSKYQDIIIEHQKVVKGNQKRLESLRELAGKENLEYPSVTLPPQPHTKEGVDAYNEVIARVRMWVNLNLWQKLKLSRDDAKPLLRLKGFPSFPLVERQANEVDWWDMVCNVKKLINEKKEDGKVFWQNLAGYKRQEALRPYLSSEEDRKKGKKFARYQLGDLLLHLEKKHGEDWGKVYDEAWERIDKKVEGLSKHIKLEEERRSEDAQSKAALTDWLRAKASFVIEGLKEADKDEFCRCELKLQKWYGDLRGKPFAIEAENSILDISGFSKQYNCAFIWQKDGVKKLNLYLIINYFKGGKLRFKKIKPEAFEANRFYTVINKKSGEIVPMEVNFNFDDPNLIILPLAFGKRQGREFIWNDLLSLETGSLKLANGRVIEKTLYNRRTRQDEPALFVALTFERREVLDSSNIKPMNLIGVDRGENIPAVIALTDPEGCPLSRFKDSLGNPTHILRIGESYKEKQRTIQAKKEVEQRRAGGYSRKYASKAKNLADDMVRNTARDLLYYAVTQDAMLIFENLSRGFGRQGKRTFMAERQYTRMEDWLTAKLAYEGLPSKTYLSKTLAQYTSKTCSNCGFTITSADYDRMLEKLKKTATGWMTTINGKELKVEGQITYYNRYKRQNVVKDLSVELDRLSEESVNNDISSWTKGRSGEALSLLKKRFSHRPVQEKFVCLNCGFETHADEQAALNIARSWLFLRSQEYKKYQTNKTTGNTDKRAFVETWQSFYRKKLKEVWKPAV

SEQ ID NO: 33700 - protein, 978 aa, synthetic construct
  REGION 1..978: note = engineered CasX variant
QEIKRINKIRRRLVKDSNTKKAGKTGPMKTLLVPVMTPDLRERLENLRKKPENIPQPISNTSRANLNKLLTDYTEMKKAILHVYWEEFQKDPVGLMSRVAQPASKKIDQNKLKPEMDEKGNLTTAGFACSQCGQPLFVYKLEQVSEKGKAYTNYFGRCNVAEHEKLILLAQLKPEKDSDEAVTYSLGKFGQRALDFYSIHVTKESTHPVKPLAQIAGNRYASHPVGKALSDACMGTIASFLSKYQDIIIEHQKVVKGNQKRLESLRELAGKENLEYPSVTLPPQPHTKEGVDAYNEVIARVRMWVNLNLWQKLKLSRDDAKPLLRLKGFPSFPLVERQANEVDWWDMVCNVKKLINEKKEDGKVFWQNLAGYKRQEALRPYLSSEEDRKKGKKFARYQLGDLLLHLEKKHGEDWGKVYDEAWERIDKKVEGLSKHIKLEEERRSEDAQSKAALTDWLRAKASFVIEGLKEADKDEFCRCELKLQKWYGDLRGKPFAIEAENSILDISGFSKQYNCAFIWQKDGVKKLNLYLIINYFKGGKLRFKKIKPEAFEANRFYTVINKKSGEIVPMEVNFNFDDPNLIILPLAFGKRQGREFIWNDLLSLETGSLKLANGRVIEKTLYNRRTRQDEPALFVALTFERREVLDSSNIKPMNLIGVDRGENIPAVIALTDPEGCPLSRFKDSLGNPTHILRIGESYKEKQRTIQAKKEVEQRRAGGYSRKYASKAKNLADDMVRNTARDLLYYAVTQDAMLIFENLSRGFGRQGKRTFMAERQYTRMEDWLTAKLAYEGLPSKTYLSKTLAQYTSKTCSNCGFTITSADYDRMLEKLKKTATGWMTTINGKELKVEGQITYYNRYKRQNVVKDLSVELDRLSEESVNNDISSWTKGRSGEALSLLKKRFSHRPVQEKFVCLNCGFETHADEQAALNIARSWLFLRSQEYKKYQTNKTTGNTDKRAFVETWQSFYRKKLKEVWKPAV

SEQ ID NO: 33701 - protein, 978 aa, synthetic construct
  REGION 1..978: note = engineered CasX variant
QEIKRINKIRRRLVKDSNTKKAGKTGPMKTLLVPVMTPDLRERLENLRKKPENIPQPISNTSRANLNKLLTDYTEMKKAILHVYWEEFQKDPVGLMSRVAQPASKKIDQNKLKPEMDEKGNLTTAGFACSQCGQPLFVYKLEQVSEKGKAYTNYFGRCNVAEHEKLILLAQLKPEKDSDEAVTYSLGKFGQRALDFYSIHVTKESTHPVKPLAQIAGNRYASSPVGKALSDACMGTIASFLSKYQDIIIEHQKVVKGNQKRLESLRELAGKENLEYPSVTLPPQPHTKEGVDAYNEVIARVRMWVNLNLWQKLKLSRDDAKPLLRLKGFPSFPLVERQANEVDWWDMVCNVKKLINEKKEDGKVFWQNLAGYKRQEALRPYLSSEEDRKKGKKFARYQLGDLLLHLEKKHGEDWGKVYDEAWERIDKKVEGLSKHIKLEEERRSEDAQSKAALTDWLRAKASFVIEGLKEADKDEFCRCELKLQKWYGDLRGKPFAIEAENSILDISGFSKQYNCAFIWQKDGVKKLNLYLIINYFKGGKLRFKKIKPEAFEANRFYTVINKKSGEIVPMEVNFNFDDPNLIILPLAFGKRQGREFIWNDLLSLETGSLKLANGRVIEKTLYNRRTRQDEPALFVALTFERREVLDSSNIKPMNLIGVDRGENIPAVIALTDPEGCPLSRFKDSLGNPTHILRIGESYKEKQRTIQAKKEVEQRRAGGYSRKYASKAKNLADDMVRNTARDLLYYAVTQDAMLIFENLSRGFGRQGKRTFMAERQYTRMEDWLTAKLAYEGLPSKTYLSKTLAQYTSKTCSNCGFTITSADYDRMLEKLKKTATGWMTTINGKELKVEGQITYYNRYKRQNVVKDLSVELDRLSEESVNNDISSWTKGRSGEALSLLKKRFSHRPVQEKFVCLNCGFETHADEQAALNIARSWLFLRSQEYKKYQTNKTTGNTDKRAFVETWQSFYRKKLKEVWKPAV

SEQ ID NO: 33702 - protein, 978 aa, synthetic construct
  REGION 1..978: note = engineered CasX variant
QEIKRINKIRRRLVKDSNTKKAGKTGPMKTLLVPVMTPDLRERLENLRKKPENIPQPISNTSRANLNKLLTDYTEMKKAILHVYWEEFQKDPVGLMSRVAQPASKKIDQNKLKPEMDEKGNLTTAGFACSQCGQPLFVYKLEQVSEKGKAYTNYFGRCNVAEHEKLILLAQLKPEKDSDEAVTYSLGKFGQRALDFYSIHVTKESTHPVKPLAQIAGNRYASTPVGKALSDACMGTIASFLSKYQDIIIEHQKVVKGNQKRLESLRELAGKENLEYPSVTLPPQPHTKEGVDAYNEVIARVRMWVNLNLWQKLKLSRDDAKPLLRLKGFPSFPLVERQANEVDWWDMVCNVKKLINEKKEDGKVFWQNLAGYKRQEALRPYLSSEEDRKKGKKFARYQLGDLLLHLEKKHGEDWGKVYDEAWERIDKKVEGLSKHIKLEEERRSEDAQSKAALTDWLRAKASFVIEGLKEADKDEFCRCELKLQKWYGDLRGKPFAIEAENSILDISGFSKQYNCAFIWQKDGVKKLNLYLIINYFKGGKLRFKKIKPEAFEANRFYTVINKKSGEIVPMEVNFNFDDPNLIILPLAFGKRQGREFIWNDLLSLETGSLKLANGRVIEKTLYNRRTRQDEPALFVALTFERREVLDSSNIKPMNLIGVDRGENIPAVIALTDPEGCPLSRFKDSLGNPTHILRIGESYKEKQRTIQAKKEVEQRRAGGYSRKYASKAKNLADDMVRNTARDLLYYAVTQDAMLIFENLSRGFGRQGKRTFMAERQYTRMEDWLTAKLAYEGLPSKTYLSKTLAQYTSKTCSNCGFTITSADYDRMLEKLKKTATGWMTTINGKELKVEGQITYYNRYKRQNVVKDLSVELDRLSEESVNNDISSWTKGRSGEALSLLKKRFSHRPVQEKFVCLNCGFETHADEQAALNIARSWLFLRSQEYKKYQTNKTTGNTDKRAFVETWQSFYRKKLKEVWKPAV

SEQ ID NO: 33703 - protein, 978 aa, synthetic construct
  REGION 1..978: note = engineered CasX variant
QEIKRINKIRRRLVKDSNTKKAGKTGPMKTLLVPVMTPDLRERLENLRKKPENIPQPISNTSRANLNKLLTDYTEMKKAILHVYWEEFQKDPVGLMSRVAQPASKKIDQNKLKPEMDEKGNLTTAGFACSQCGQPLFVYKLEQVSEKGKAYTNYFGRCNVAEHEKLILLAQLKPEKDSDEAVTYSLGKFGQRALDFYSIHVTKESTHPVKPLAQIAGNRYASAPVGKALSDACMGTIASFLSKYQDIIIEHQKVVKGNQKRLESLRELAGKENLEYPSVTLPPQPHTKEGVDAYNEVIARVRMWVNLNLWQKLKLSRDDAKPLLRLKGFPSFPLVERQANEVDWWDMVCNVKKLINEKKEDGKVFWQNLAGYKRQEALRPYLSSEEDRKKGKKFARYQLGDLLLHLEKKHGEDWGKVYDEAWERIDKKVEGLSKHIKLEEERRSEDAQSKAALTDWLRAKASFVIEGLKEADKDEFCRCELKLQKWYGDLRGKPFAIEAENSILDISGFSKQYNCAFIWQKDGVKKLNLYLIINYFKGGKLRFKKIKPEAFEANRFYTVINKKSGEIVPMEVNFNFDDPNLIILPLAFGKRQGREFIWNDLLSLETGSLKLANGRVIEKTLYNRRTRQDEPALFVALTFERREVLDSSNIKPMNLIGVDRGENIPAVIALTDPEGCPLSRFKDSLGNPTHILRIGESYKEKQRTIQAKKEVEQRRAGGYSRKYASKAKNLADDMVRNTARDLLYYAVTQDAMLIFENLSRGFGRQGKRTFMAERQYTRMEDWLTAKLAYEGLPSKTYLSKTLAQYTSKTCSNCGFTITSADYDRMLEKLKKTATGWMTTINGKELKVEGQITYYNRYKRQNVVKDLSVELDRLSEESVNNDISSWTKGRSGEALSLLKKRFSHRPVQEKFVCLNCGFETHADEQAALNIARSWLFLRSQEYKKYQTNKTTGNTDKRAFVETWQSFYRKKLKEVWKPAV

SEQ ID NO: 33704 - protein, 978 aa, synthetic construct
  REGION 1..978: note = engineered CasX variant
QEIKRINKIRRRLVKDSNTKKAGKTGPMKTLLVPVMTPDLRERLENLRKKPENIPQPISNTSRANLNKLLTDYTEMKKAILHVYWEEFQKDPVGLMSRVAQPASKKIDQNKLKPEMDEKGNLTTAGFACSQCGQPLFVYKLEQVSEKGKAYTNYFGRCNVAEHEKLILLAQLKPEKDSDEAVTYSLGKFGQRALDFYSIHVTKESTHPVKPLAQIAGNRYASVPVGKALSDACMGTIASFLSKYQDIIIEHQKVVKGNQKRLESLRELAGKENLEYPSVTLPPQPHTKEGVDAYNEVIARVRMWVNLNLWQKLKLSRDDAKPLLRLKGFPSFPLVERQANEVDWWDMVCNVKKLINEKKEDGKVFWQNLAGYKRQEALRPYLSSEEDRKKGKKFARYQLGDLLLHLEKKHGEDWGKVYDEAWERIDKKVEGLSKHIKLEEERRSEDAQSKAALTDWLRAKASFVIEGLKEADKDEFCRCELKLQKWYGDLRGKPFAIEAENSILDISGFSKQYNCAFIWQKDGVKKLNLYLIINYFKGGKLRFKKIKPEAFEANRFYTVINKKSGEIVPMEVNFNFDDPNLIILPLAFGKRQGREFIWNDLLSLETGSLKLANGRVIEKTLYNRRTRQDEPALFVALTFERREVLDSSNIKPMNLIGVDRGENIPAVIALTDPEGCPLSRFKDSLGNPTHILRIGESYKEKQRTIQAKKEVEQRRAGGYSRKYASKAKNLADDMVRNTARDLLYYAVTQDAMLIFENLSRGFGRQGKRTFMAERQYTRMEDWLTAKLAYEGLPSKTYLSKTLAQYTSKTCSNCGFTITSADYDRMLEKLKKTATGWMTTINGKELKVEGQITYYNRYKRQNVVKDLSVELDRLSEESVNNDISSWTKGRSGEALSLLKKRFSHRPVQEKFVCLNCGFETHADEQAALNIARSWLFLRSQEYKKYQTNKTTGNTDKRAFVETWQSFYRKKLKEVWKPAV

SEQ ID NO: 33705 - protein, 978 aa, synthetic construct
  REGION 1..978: note = engineered CasX variant
QEIKRINKIRRRLVKDSNTKKAGKTGPMKTLLVPVMTPDLRERLENLRKKPENIPQPISNTSRANLNKLLTDYTEMKKAILHVYWEEFQKDPVGLMSRVAQPASKKIDQNKLKPEMDEKGNLTTAGFACSQCGQPLFVYKLEQVSEKGKAYTNYFGRCNVAEHEKLIKLAQLKPEKDSDEAVTYSLGKFGQRALDFYSIHVTKESTHPVKPLAQIAGNRYASGPVGKALSDACMGTIASFLSKYQDIIIEHQKVVKGNQKRLESLRELAGKENLEYPSVTLPPQPHTKEGVDAYNEVIARVRMWVNLNLWQKLKLSRDDAKPLLRLKGFPSFPLVERQANEVDWWDMVCNVKKLINEKKEDGKVFWQNLAGYKRQEALRPYLSSEEDRKKGKKFARYQLGDLLLHLEKKHGEDWGKVYDEAWERIDKKVEGLSKHIKLEEERRSEDAQSKAALTDWLRAKASFVIEGLKEADKDEFCRCELKLQKWYGDLRGKPFAIEAENSILDISGFSKQYNCAFIWQKDGVKKLNLYLIINYFKGGKLRFKKIKPEAFEANRFYTVINKKSGEIVPMEVNFNFDDPNLIILPLAFGKRQGREFIWNDLLSLETGSLKLANGRVIEKTLYNRRTRQDEPALFVALTFERREVLDSSNIKPMNLIGVDRGENIPAVIALTDPEGCPLSRFKDSLGNPTHILRIGESYKEKQRTIQAKKEVEQRRAGGYSRKYASKAKNLADDMVRNTARDLLYYAVTQDAMLIFENLSRGFGRQGKRTFMAERQYTRMEDWLTAKLAYEGLPSKTYLSKTLAQYTSKTCSNCGFTITSADYDRMLEKLKKTATGWMTTINGKELKVEGQITYYNRYKRQNVVKDLSVELDRLSEESVNNDISSWTKGRSGEALSLLKKRFSHRPVQEKFVCLNCGFETHADEQAALNIARSWLFLRSQEYKKYQTNKTTGNTDKRAFVETWQSFYRKKLKEVWKPAV

SEQ ID NO: 33706 - protein, 977 aa, synthetic construct
  REGION 1..977: note = engineered CasX variant
QEIKRINKIRRRLVKDSNTKKAGKTGPMKTLLVPVMTPDLRERLENLRKKPENIPQPISNTSRANLNKLLTDYTEMKKAILHVYWEEFQKDPVGLMSRVAQPASKKIDQNKLKPEMDEKGNLTTAGFACSQCGQPLFVYKLEQVSEKGKAYTNYFGRCNVAEHEKLILLAQLKPEKDSDEAVTYSLGKFGQRALDFYSIHVTKESTHPVKPLAQIAGNRYASPVGKALSDACMGTIASFLSKYQDIIIEHQKVVKGNQKRLESLRELAGKENLEYPSVTLPPQPHTKEGVDAYNEVIARVRMWVNLNLWQKLKLSRDDAKPLLRLKGFPSFPLVERQANEVDWWDMVCNVKKLINEKKEDGKVFWQNLAGYKRQEALRPYLSSEEDRKKGKKFARYQLGDLLLHLEKKHGEDWGKVYDEAWERIDKKVEGLSKHIKLEEERRSEDAQSKAALTDWLRAKASFVIEGLKEADKDEFCRCELKLQKWYGDLRGKPFAIEAENSILDISGFSKQYNCAFIWQKDGVKKLNLYLIINYFKGGKLRFKKIKPEAFEANRFYTVINKKSGEIVPMEVNFNFDDPNLIILPLAFGKRQGREFIWNDLLSLETGSLKLANGRVIEKTLYNRRTRQDEPALFVALTFERREVLDSSNIKPMNLIGVDRGENIPAVIALTDPEGCPLSRFKDSLGNPTHILRIGESYKEKQRTIQAKKEVEQRRAGGYSRKYASKAKNLADDMVRNTARDLLYYAVTQDAMLIFENLSRGFGRQGKRTFMAERQYTRMEDWLTAKLAYEGLPSKTYLSKTLAQYTSKTCSNCGFTITSADYDRMLEKLKKTATGWMTTINGKELKVEGQITYYNRYKRQNVVKDLSVELDRLSEESVNNDISSWTKGRSGEALSLLKKRFSHRPVQEKFVCLNCGFETHADEQAALNIARSWLFLRSQEYKKYQTNKTTGNTDKRAFVETWQSFYRKKLKEVWKPAV

SEQ ID NO: 33707 - protein, 978 aa, synthetic construct
  REGION 1..978: note = engineered CasX variant
QEIKRINKIRRRLVKDSNTKKAGKTGPMKTLLVPVMTPDLRERLENLRKKPENIPQPISNTSRANLNKLLTDYTEMKKAILHVYWEEFQKDPVGLMSRVAQPASKKIDQNKLKPEMDEKGNLTTAGFACSQCGQPLFVYKLEQVSEKGKAYTNYFGRCNVAEHEKLILLAQLKPEKDSDEAVTYSLGKFGQRALDFYSIHVTKESTHPVKPLAQIAGNRYASYPVGKALSDACMGTIASFLSKYQDIIIEHQKVVKGNQKRLESLRELAGKENLEYPSVTLPPQPHTKEGVDAYNEVIARVRMWVNLNLWQKLKLSRDDAKPLLRLKGFPSFPLVERQANEVDWWDMVCNVKKLINEKKEDGKVFWQNLAGYKRQEALRPYLSSEEDRKKGKKFARYQLGDLLLHLEKKHGEDWGKVYDEAWERIDKKVEGLSKHIKLEEERRSEDAQSKAALTDWLRAKASFVIEGLKEADKDEFCRCELKLQKWYGDLRGKPFAIEAENSILDISGFSKQYNCAFIWQKDGVKKLNLYLIINYFKGGKLRFKKIKPEAFEANRFYTVINKKSGEIVPMEVNFNFDDPNLIILPLAFGKRQGREFIWNDLLSLETGSLKLANGRVIEKTLYNRRTRQDEPALFVALTFERREVLDSSNIKPMNLIGVDRGENIPAVIALTDPEGCPLSRFKDSLGNPTHILRIGESYKEKQRTIQAKKEVEQRRAGGYSRKYASKAKNLADDMVRNTARDLLYYAVTQDAMLIFENLSRGFGRQGKRTFMAERQYTRMEDWLTAKLAYEGLPSKTYLSKTLAQYTSKTCSNCGFTITSADYDRVLEKLKKTATGWMTTINGKELKVEGQITYYNRYKRQNVVKDLSVELDRLSEESVNNDISSWTKGRQGEALSLLKKRFSHRPVQEKFVCLNCGFETHADEQAALNIARSWLFLRSQEYKKYQTNKTTGNTDKRAFVETWQSFYRKKLKEVWKPAV

SEQ ID NO: 33708 - protein, 978 aa, synthetic construct
  REGION 1..978: note = engineered CasX variant
QEIKRINKIRRRLVKDSNTKKAGKTGPMKTLLVPVMTPDLRERLENLRKKPENIPQPISNTSRANLNKLLTDYTEMKKAILHVYWEEFQKDPVGLMSRVAQPASKKIDQNKLKPEMDEKGNLTTAGFACSQCGQPLFVYKLEQVSEKGKAYTNYFGRCNVAEHEKLILLAQLKPEKDSDEAVTYSLGKFGQRALDFYSIHVTKESTHPVKPLAQIAGNRYASHPVGKALSDACMGTIASFLSKYQDIIIEHQKVVKGNQKRLESLRELAGKENLEYPSVTLPPQPHTKEGVDAYNEVIARVRMWVNLNLWQKLKLSRDDAKPLLRLKGFPSFPLVERQANEVDWWDMVCNVKKLINEKKEDGKVFWQNLAGYKRQEALRPYLSSEEDRKKGKKFARYQLGDLLLHLEKKHGEDWGKVYDEAWERIDKKVEGLSKHIKLEEERRSEDAQSKAALTDWLRAKASFVIEGLKEADKDEFCRCELKLQKWYGDLRGKPFAIEAENSILDISGFSKQYNCAFIWQKDGVKKLNLYLIINYFKGGKLRFKKIKPEAFEANRFYTVINKKSGEIVPMEVNFNFDDPNLIILPLAFGKRQGREFIWNDLLSLETGSLKLANGRVIEKTLYNRRTRQDEPALFVALTFERREVLDSSNIKPMNLIGVDRGENIPAVIALTDPEGCPLSRFKDSLGNPTHILRIGESYKEKQRTIQAKKEVEQRRAGGYSRKYASKAKNLADDMVRNTARDLLYYAVTQDAMLIFENLSRGFGRQGKRTFMAERQYTRMEDWLTAKLAYEGLPSKTYLSKTLAQYTSKTCSNCGFTITSADYDRVLEKLKKTATGWMTTINGKELKVEGQITYYNRYKRQNVVKDLSVELDRLSEESVNNDISSWTKGRQGEALSLLKKRFSHRPVQEKFVCLNCGFETHADEQAALNIARSWLFLRSQEYKKYQTNKTTGNTDKRAFVETWQSFYRKKLKEVWKPAV

SEQ ID NO: 33709 - protein, 978 aa, synthetic construct
  REGION 1..978: note = engineered CasX variant
QEIKRINKIRRRLVKDSNTKKAGKTGPMKTLLVPVMTPDLRERLENLRKKPENIPQPISNTSRANLNKLLTDYTEMKKAILHVYWEEFQKDPVGLMSRVAQPASKKIDQNKLKPEMDEKGNLTTAGFACSQCGQPLFVYKLEQVSEKGKAYTNYFGRCNVAEHEKLILLAQLKPEKDSDEAVTYSLGKFGQRALDFYSIHVTKESTHPVKPLAQIAGNRYASSPVGKALSDACMGTIASFLSKYQDIIIEHQKVVKGNQKRLESLRELAGKENLEYPSVTLPPQPHTKEGVDAYNEVIARVRMWVNLNLWQKLKLSRDDAKPLLRLKGFPSFPLVERQANEVDWWDMVCNVKKLINEKKEDGKVFWQNLAGYKRQEALRPYLSSEEDRKKGKKFARYQLGDLLLHLEKKHGEDWGKVYDEAWERIDKKVEGLSKHIKLEEERRSEDAQSKAALTDWLRAKASFVIEGLKEADKDEFCRCELKLQKWYGDLRGKPFAIEAENSILDISGFSKQYNCAFIWQKDGVKKLNLYLIINYFKGGKLRFKKIKPEAFEANRFYTVINKKSGEIVPMEVNFNFDDPNLIILPLAFGKRQGREFIWNDLLSLETGSLKLANGRVIEKTLYNRRTRQDEPALFVALTFERREVLDSSNIKPMNLIGVDRGENIPAVIALTDPEGCPLSRFKDSLGNPTHILRIGESYKEKQRTIQAKKEVEQRRAGGYSRKYASKAKNLADDMVRNTARDLLYYAVTQDAMLIFENLSRGFGRQGKRTFMAERQYTRMEDWLTAKLAYEGLPSKTYLSKTLAQYTSKTCSNCGFTITSADYDRVLEKLKKTATGWMTTINGKELKVEGQITYYNRYKRQNVVKDLSVELDRLSEESVNNDISSWTKGRQGEALSLLKKRFSHRPVQEKFVCLNCGFETHADEQAALNIARSWLFLRSQEYKKYQTNKTTGNTDKRAFVETWQSFYRKKLKEVWKPAV

SEQ ID NO: 33710 - protein, 978 aa, synthetic construct
  REGION 1..978: note = engineered CasX variant
QEIKRINKIRRRLVKDSNTKKAGKTGPMKTLLVPVMTPDLRERLENLRKKPENIPQPISNTSRANLNKLLTDYTEMKKAILHVYWEEFQKDPVGLMSRVAQPASKKIDQNKLKPEMDEKGNLTTAGFACSQCGQPLFVYKLEQVSEKGKAYTNYFGRCNVAEHEKLILLAQLKPEKDSDEAVTYSLGKFGQRALDFYSIHVTKESTHPVKPLAQIAGNRYASTPVGKALSDACMGTIASFLSKYQDIIIEHQKVVKGNQKRLESLRELAGKENLEYPSVTLPPQPHTKEGVDAYNEVIARVRMWVNLNLWQKLKLSRDDAKPLLRLKGFPSFPLVERQANEVDWWDMVCNVKKLINEKKEDGKVFWQNLAGYKRQEALRPYLSSEEDRKKGKKFARYQLGDLLLHLEKKHGEDWGKVYDEAWERIDKKVEGLSKHIKLEEERRSEDAQSKAALTDWLRAKASFVIEGLKEADKDEFCRCELKLQKWYGDLRGKPFAIEAENSILDISGFSKQYNCAFIWQKDGVKKLNLYLIINYFKGGKLRFKKIKPEAFEANRFYTVINKKSGEIVPMEVNFNFDDPNLIILPLAFGKRQGREFIWNDLLSLETGSLKLANGRVIEKTLYNRRTRQDEPALFVALTFERREVLDSSNIKPMNLIGVDRGENIPAVIALTDPEGCPLSRFKDSLGNPTHILRIGESYKEKQRTIQAKKEVEQRRAGGYSRKYASKAKNLADDMVRNTARDLLYYAVTQDAMLIFENLSRGFGRQGKRTFMAERQYTRMEDWLTAKLAYEGLPSKTYLSKTLAQYTSKTCSNCGFTITSADYDRVLEKLKKTATGWMTTINGKELKVEGQITYYNRYKRQNVVKDLSVELDRLSEESVNNDISSWTKGRQGEALSLLKKRFSHRPVQEKFVCLNCGFETHADEQAALNIARSWLFLRSQEYKKYQTNKTTGNTDKRAFVETWQSFYRKKLKEVWKPAV

SEQ ID NO: 33711 - protein, 978 aa, synthetic construct
  REGION 1..978: note = engineered CasX variant
QEIKRINKIRRRLVKDSNTKKAGKTGPMKTLLVPVMTPDLRERLENLRKKPENIPQPISNTSRANLNKLLTDYTEMKKAILHVYWEEFQKDPVGLMSRVAQPASKKIDQNKLKPEMDEKGNLTTAGFACSQCGQPLFVYKLEQVSEKGKAYTNYFGRCNVAEHEKLILLAQLKPEKDSDEAVTYSLGKFGQRALDFYSIHVTKESTHPVKPLAQIAGNRYASAPVGKALSDACMGTIASFLSKYQDIIIEHQKVVKGNQKRLESLRELAGKENLEYPSVTLPPQPHTKEGVDAYNEVIARVRMWVNLNLWQKLKLSRDDAKPLLRLKGFPSFPLVERQANEVDWWDMVCNVKKLINEKKEDGKVFWQNLAGYKRQEALRPYLSSEEDRKKGKKFARYQLGDLLLHLEKKHGEDWGKVYDEAWERIDKKVEGLSKHIKLEEERRSEDAQSKAALTDWLRAKASFVIEGLKEADKDEFCRCELKLQKWYGDLRGKPFAIEAENSILDISGFSKQYNCAFIWQKDGVKKLNLYLIINYFKGGKLRFKKIKPEAFEANRFYTVINKKSGEIVPMEVNFNFDDPNLIILPLAFGKRQGREFIWNDLLSLETGSLKLANGRVIEKTLYNRRTRQDEPALFVALTFERREVLDSSNIKPMNLIGVDRGENIPAVIALTDPEGCPLSRFKDSLGNPTHILRIGESYKEKQRTIQAKKEVEQRRAGGYSRKYASKAKNLADDMVRNTARDLLYYAVTQDAMLIFENLSRGFGRQGKRTFMAERQYTRMEDWLTAKLAYEGLPSKTYLSKTLAQYTSKTCSNCGFTITSADYDRVLEKLKKTATGWMTTINGKELKVEGQITYYNRYKRQNVVKDLSVELDRLSEESVNNDISSWTKGRQGEALSLLKKRFSHRPVQEKFVCLNCGFETHADEQAALNIARSWLFLRSQEYKKYQTNKTTGNTDKRAFVETWQSFYRKKLKEVWKPAV

SEQ ID NO: 33712 - protein, 978 aa, synthetic construct
  REGION 1..978: note = engineered CasX variant
QEIKRINKIRRRLVKDSNTKKAGKTGPMKTLLVPVMTPDLRERLENLRKKPENIPQPISNTSRANLNKLLTDYTEMKKAILHVYWEEFQKDPVGLMSRVAQPASKKIDQNKLKPEMDEKGNLTTAGFACSQCGQPLFVYKLEQVSEKGKAYTNYFGRCNVAEHEKLILLAQLKPEKDSDEAVTYSLGKFGQRALDFYSIHVTKESTHPVKPLAQIAGNRYASVPVGKALSDACMGTIASFLSKYQDIIIEHQKVVKGNQKRLESLRELAGKENLEYPSVTLPPQPHTKEGVDAYNEVIARVRMWVNLNLWQKLKLSRDDAKPLLRLKGFPSFPLVERQANEVDWWDMVCNVKKLINEKKEDGKVFWQNLAGYKRQEALRPYLSSEEDRKKGKKFARYQLGDLLLHLEKKHGEDWGKVYDEAWERIDKKVEGLSKHIKLEEERRSEDAQSKAALTDWLRAKASFVIEGLKEADKDEFCRCELKLQKWYGDLRGKPFAIEAENSILDISGFSKQYNCAFIWQKDGVKKLNLYLIINYFKGGKLRFKKIKPEAFEANRFYTVINKKSGEIVPMEVNFNFDDPNLIILPLAFGKRQGREFIWNDLLSLETGSLKLANGRVIEKTLYNRRTRQDEPALFVALTFERREVLDSSNIKPMNLIGVDRGENIPAVIALTDPEGCPLSRFKDSLGNPTHILRIGESYKEKQRTIQAKKEVEQRRAGGYSRKYASKAKNLADDMVRNTARDLLYYAVTQDAMLIFENLSRGFGRQGKRTFMAERQYTRMEDWLTAKLAYEGLPSKTYLSKTLAQYTSKTCSNCGFTITSADYDRVLEKLKKTATGWMTTINGKELKVEGQITYYNRYKRQNVVKDLSVELDRLSEESVNNDISSWTKGRQGEALSLLKKRFSHRPVQEKFVCLNCGFETHADEQAALNIARSWLFLRSQEYKKYQTNKTTGNTDKRAFVETWQSFYRKKLKEVWKPAV

SEQ ID NO: 33713 - protein, 978 aa, synthetic construct
  REGION 1..978: note = engineered CasX variant
QEIKRINKIRRRLVKDSNTKKAGKTGPMKTLLVPVMTPDLRERLENLRKKPENIPQPISNTSRANLNKLLTDYTEMKKAILHVYWEEFQKDPVGLMSRVAQPASKKIDQNKLKPEMDEKGNLTTAGFACSQCGQPLFVYKLEQVSEKGKAYTNYFGRCNVAEHEKLIKLAQLKPEKDSDEAVTYSLGKFGQRALDFYSIHVTKESTHPVKPLAQIAGNRYASGPVGKALSDACMGTIASFLSKYQDIIIEHQKVVKGNQKRLESLRELAGKENLEYPSVTLPPQPHTKEGVDAYNEVIARVRMWVNLNLWQKLKLSRDDAKPLLRLKGFPSFPLVERQANEVDWWDMVCNVKKLINEKKEDGKVFWQNLAGYKRQEALRPYLSSEEDRKKGKKFARYQLGDLLLHLEKKHGEDWGKVYDEAWERIDKKVEGLSKHIKLEEERRSEDAQSKAALTDWLRAKASFVIEGLKEADKDEFCRCELKLQKWYGDLRGKPFAIEAENSILDISGFSKQYNCAFIWQKDGVKKLNLYLIINYFKGGKLRFKKIKPEAFEANRFYTVINKKSGEIVPMEVNFNFDDPNLIILPLAFGKRQGREFIWNDLLSLETGSLKLANGRVIEKTLYNRRTRQDEPALFVALTFERREVLDSSNIKPMNLIGVDRGENIPAVIALTDPEGCPLSRFKDSLGNPTHILRIGESYKEKQRTIQAKKEVEQRRAGGYSRKYASKAKNLADDMVRNTARDLLYYAVTQDAMLIFENLSRGFGRQGKRTFMAERQYTRMEDWLTAKLAYEGLPSKTYLSKTLAQYTSKTCSNCGFTITSADYDRVLEKLKKTATGWMTTINGKELKVEGQITYYNRYKRQNVVKDLSVELDRLSEESVNNDISSWTKGRQGEALSLLKKRFSHRPVQEKFVCLNCGFETHADEQAALNIARSWLFLRSQEYKKYQTNKTTGNTDKRAFVETWQSFYRKKLKEVWKPAV

SEQ ID NO: 33714 - protein, 977 aa, synthetic construct
  REGION 1..977: note = engineered CasX variant
QEIKRINKIRRRLVKDSNTKKAGKTGPMKTLLVPVMTPDLRERLENLRKKPENIPQPISNTSRANLNKLLTDYTEMKKAILHVYWEEFQKDPVGLMSRVAQPASKKIDQNKLKPEMDEKGNLTTAGFACSQCGQPLFVYKLEQVSEKGKAYTNYFGRCNVAEHEKLILLAQLKPEKDSDEAVTYSLGKFGQRALDFYSIHVTKESTHPVKPLAQIAGNRYASPVGKALSDACMGTIASFLSKYQDIIIEHQKVVKGNQKRLESLRELAGKENLEYPSVTLPPQPHTKEGVDAYNEVIARVRMWVNLNLWQKLKLSRDDAKPLLRLKGFPSFPLVERQANEVDWWDMVCNVKKLINEKKEDGKVFWQNLAGYKRQEALRPYLSSEEDRKKGKKFARYQLGDLLLHLEKKHGEDWGKVYDEAWERIDKKVEGLSKHIKLEEERRSEDAQSKAALTDWLRAKASFVIEGLKEADKDEFCRCELKLQKWYGDLRGKPFAIEAENSILDISGFSKQYNCAFIWQKDGVKKLNLYLIINYFKGGKLRFKKIKPEAFEANRFYTVINKKSGEIVPMEVNFNFDDPNLIILPLAFGKRQGREFIWNDLLSLETGSLKLANGRVIEKTLYNRRTRQDEPALFVALTFERREVLDSSNIKPMNLIGVDRGENIPAVIALTDPEGCPLSRFKDSLGNPTHILRIGESYKEKQRTIQAKKEVEQRRAGGYSRKYASKAKNLADDMVRNTARDLLYYAVTQDAMLIFENLSRGFGRQGKRTFMAERQYTRMEDWLTAKLAYEGLPSKTYLSKTLAQYTSKTCSNCGFTITSADYDRVLEKLKKTATGWMTTINGKELKVEGQITYYNRYKRQNVVKDLSVELDRLSEESVNNDISSWTKGRQGEALSLLKKRFSHRPVQEKFVCLNCGFETHADEQAALNIARSWLFLRSQEYKKYQTNKTTGNTDKRAFVETWQSFYRKKLKEVWKPAV

SEQ ID NO: 33715 - protein, 978 aa, synthetic construct
  REGION 1..978: note = engineered CasX variant
QEIKRINKIRRRLVKDSNTKKAGKTGPMKTLLVPVMTPDLRERLENLRKKPENIPQPISNTSRANLNKLLTDYTEMKKAILHVYWEEFQKDPVGLMSRVAQPASKKIDQNKLKPEMDEKGNLTTAGFACSQCGQPLFVYKLEQVSEKGKAYTNYFGRCNVAEHEKLILLAQLKPEKDSDEAVTYSLGKFGQRALDFYSIHVTKESTHPVKPLAQIAGNRYASYPVGKALSDACMGTIASFLSKYQDIIIEHQKVVKGNQKRLESLRELAGKENLEYPSVTLPPQPHTKEGVDAYNEVIARVRMWVNLNLWQKLKLSRDDAKPLLRLKGFPSFPLVERQANEVDWWDMVCNVKKLINEKKEDGKVFWQNLAGYKRQEALRPYLSSEEDRKKGKKFARYQLGDLLLHLEKKHGEDWGKVYDEAWERIDKKVEGLSKHIKLEEERRSEDAQSKAALTDWLRAKASFVIEGLKEADKDEFCRCELKLQKWYGDLRGKPFAIEAENSILDISGFSKQYNCAFIWQKDGVKKLNLYLIINYFKGGKLRFKKIKPEAFEANRFYTVINKKSGEIVPMEVNFNFDDPNLIILPLAFGKRQGREFIWNDLLSLETGSLKLANGRVIEKTLYNRRTRQDEPALFVALTFERREVLDSSNIKPMNLIGVDRGENIPAVIALTDPEGCPLSRFKDSLGNPTHILRIGESYKEKQRTIQAKKEVEQRRAGGYSRKYASKAKNLADDMVRNTARDLLYYAVTQDAMLIFENLSRGFGRQGKRTFMAERQYTRMEDWLTAKLAYEGLPSKTYLSKTLAQYTSKTCSNCGFTITSADYDRVLEKLKKTATGWMTTINGKELKVEGQITYYNRYKRQNVVKDLSVELDRLSEESVNNDISSWTKGRSGEALSLLKKRFSHRPVQEKFVCLNCEFETHADEQAALNIARSWLFLRSQEYKKYQTNKTTGNTDKRAFVETWQSFYRKKLKEVWKPAV

SEQ ID NO: 33716 - protein, 978 aa, synthetic construct
  REGION 1..978: note = engineered CasX variant
QEIKRINKIRRRLVKDSNTKKAGKTGPMKTLLVPVMTPDLRERLENLRKKPENIPQPISNTSRANLNKLLTDYTEMKKAILHVYWEEFQKDPVGLMSRVAQPASKKIDQNKLKPEMDEKGNLTTAGFACSQCGQPLFVYKLEQVSEKGKAYTNYFGRCNVAEHEKLILLAQLKPEKDSDEAVTYSLGKFGQRALDFYSIHVTKESTHPVKPLAQIAGNRYASHPVGKALSDACMGTIASFLSKYQDIIIEHQKVVKGNQKRLESLRELAGKENLEYPSVTLPPQPHTKEGVDAYNEVIARVRMWVNLNLWQKLKLSRDDAKPLLRLKGFPSFPLVERQANEVDWWDMVCNVKKLINEKKEDGKVFWQNLAGYKRQEALRPYLSSEEDRKKGKKFARYQLGDLLLHLEKKHGEDWGKVYDEAWERIDKKVEGLSKHIKLEEERRSEDAQSKAALTDWLRAKASFVIEGLKEADKDEFCRCELKLQKWYGDLRGKPFAIEAENSILDISGFSKQYNCAFIWQKDGVKKLNLYLIINYFKGGKLRFKKIKPEAFEANRFYTVINKKSGEIVPMEVNFNFDDPNLIILPLAFGKRQGREFIWNDLLSLETGSLKLANGRVIEKTLYNRRTRQDEPALFVALTFERREVLDSSNIKPMNLIGVDRGENIPAVIALTDPEGCPLSRFKDSLGNPTHILRIGESYKEKQRTIQAKKEVEQRRAGGYSRKYASKAKNLADDMVRNTARDLLYYAVTQDAMLIFENLSRGFGRQGKRTFMAERQYTRMEDWLTAKLAYEGLPSKTYLSKTLAQYTSKTCSNCGFTITSADYDRVLEKLKKTATGWMTTINGKELKVEGQITYYNRYKRQNVVKDLSVELDRLSEESVNNDISSWTKGRSGEALSLLKKRFSHRPVQEKFVCLNCEFETHADEQAALNIARSWLFLRSQEYKKYQTNKTTGNTDKRAFVETWQSFYRKKLKEVWKPAV

SEQ ID NO: 33717 - protein, 978 aa, synthetic construct
  REGION 1..978: note = engineered CasX variant
QEIKRINKIRRRLVKDSNTKKAGKTGPMKTLLVPVMTPDLRERLENLRKKPENIPQPISNTSRANLNKLLTDYTEMKKAILHVYWEEFQKDPVGLMSRVAQPASKKIDQNKLKPEMDEKGNLTTAGFACSQCGQPLFVYKLEQVSEKGKAYTNYFGRCNVAEHEKLILLAQLKPEKDSDEAVTYSLGKFGQRALDFYSIHVTKESTHPVKPLAQIAGNRYASSPVGKALSDACMGTIASFLSKYQDIIIEHQKVVKGNQKRLESLRELAGKENLEYPSVTLPPQPHTKEGVDAYNEVIARVRMWVNLNLWQKLKLSRDDAKPLLRLKGFPSFPLVERQANEVDWWDMVCNVKKLINEKKEDGKVFWQNLAGYKRQEALRPYLSSEEDRKKGKKFARYQLGDLLLHLEKKHGEDWGKVYDEAWERIDKKVEGLSKHIKLEEERRSEDAQSKAALTDWLRAKASFVIEGLKEADKDEFCRCELKLQKWYGDLRGKPFAIEAENSILDISGFSKQYNCAFIWQKDGVKKLNLYLIINYFKGGKLRFKKIKPEAFEANRFYTVINKKSGEIVPMEVNFNFDDPNLIILPLAFGKRQGREFIWNDLLSLETGSLKLANGRVIEKTLYNRRTRQDEPALFVALTFERREVLDSSNIKPMNLIGVDRGENIPAVIALTDPEGCPLSRFKDSLGNPTHILRIGESYKEKQRTIQAKKEVEQRRAGGYSRKYASKAKNLADDMVRNTARDLLYYAVTQDAMLIFENLSRGFGRQGKRTFMAERQYTRMEDWLTAKLAYEGLPSKTYLSKTLAQYTSKTCSNCGFTITSADYDRVLEKLKKTATGWMTTINGKELKVEGQITYYNRYKRQNVVKDLSVELDRLSEESVNNDISSWTKGRSGEALSLLKKRFSHRPVQEKFVCLNCEFETHADEQAALNIARSWLFLRSQEYKKYQTNKTTGNTDKRAFVETWQSFYRKKLKEVWKPAV

SEQ ID NO: 33718 - protein, 978 aa, synthetic construct
  REGION 1..978: note = engineered CasX variant
QEIKRINKIRRRLVKDSNTKKAGKTGPMKTLLVPVMTPDLRERLENLRKKPENIPQPISNTSRANLNKLLTDYTEMKKAILHVYWEEFQKDPVGLMSRVAQPASKKIDQNKLKPEMDEKGNLTTAGFACSQCGQPLFVYKLEQVSEKGKAYTNYFGRCNVAEHEKLILLAQLKPEKDSDEAVTYSLGKFGQRALDFYSIHVTKESTHPVKPLAQIAGNRYASTPVGKALSDACMGTIASFLSKYQDIIIEHQKVVKGNQKRLESLRELAGKENLEYPSVTLPPQPHTKEGVDAYNEVIARVRMWVNLNLWQKLKLSRDDAKPLLRLKGFPSFPLVERQANEVDWWDMVCNVKKLINEKKEDGKVFWQNLAGYKRQEALRPYLSSEEDRKKGKKFARYQLGDLLLHLEKKHGEDWGKVYDEAWERIDKKVEGLSKHIKLEEERRSEDAQSKAALTDWLRAKASFVIEGLKEADKDEFCRCELKLQKWYGDLRGKPFAIEAENSILDISGFSKQYNCAFIWQKDGVKKLNLYLIINYFKGGKLRFKKIKPEAFEANRFYTVINKKSGEIVPMEVNFNFDDPNLIILPLAFGKRQGREFIWNDLLSLETGSLKLANGRVIEKTLYNRRTRQDEPALFVALTFERREVLDSSNIKPMNLIGVDRGENIPAVIALTDPEGCPLSRFKDSLGNPTHILRIGESYKEKQRTIQAKKEVEQRRAGGYSRKYASKAKNLADDMVRNTARDLLYYAVTQDAMLIFENLSRGFGRQGKRTFMAERQYTRMEDWLTAKLAYEGLPSKTYLSKTLAQYTSKTCSNCGFTITSADYDRVLEKLKKTATGWMTTINGKELKVEGQITYYNRYKRQNVVKDLSVELDRLSEESVNNDISSWTKGRSGEALSLLKKRFSHRPVQEKFVCLNCEFETHADEQAALNIARSWLFLRSQEYKKYQTNKTTGNTDKRAFVETWQSFYRKKLKEVWKPAV

SEQ ID NO: 33719 - protein, 978 aa, synthetic construct
  REGION 1..978: note = engineered CasX variant
QEIKRINKIRRRLVKDSNTKKAGKTGPMKTLLVPVMTPDLRERLENLRKKPENIPQPISNTSRANLNKLLTDYTEMKKAILHVYWEEFQKDPVGLMSRVAQPASKKIDQNKLKPEMDEKGNLTTAGFACSQCGQPLFVYKLEQVSEKGKAYTNYFGRCNVAEHEKLILLAQLKPEKDSDEAVTYSLGKFGQRALDFYSIHVTKESTHPVKPLAQIAGNRYASAPVGKALSDACMGTIASFLSKYQDIIIEHQKVVKGNQKRLESLRELAGKENLEYPSVTLPPQPHTKEGVDAYNEVIARVRMWVNLNLWQKLKLSRDDAKPLLRLKGFPSFPLVERQANEVDWWDMVCNVKKLINEKKEDGKVFWQNLAGYKRQEALRPYLSSEEDRKKGKKFARYQLGDLLLHLEKKHGEDWGKVYDEAWERIDKKVEGLSKHIKLEEERRSEDAQSKAALTDWLRAKASFVIEGLKEADKDEFCRCELKLQKWYGDLRGKPFAIEAENSILDISGFSKQYNCAFIWQKDGVKKLNLYLIINYFKGGKLRFKKIKPEAFEANRFYTVINKKSGEIVPMEVNFNFDDPNLIILPLAFGKRQGREFIWNDLLSLETGSLKLANGRVIEKTLYNRRTRQDEPALFVALTFERREVLDSSNIKPMNLIGVDRGENIPAVIALTDPEGCPLSRFKDSLGNPTHILRIGESYKEKQRTIQAKKEVEQRRAGGYSRKYASKAKNLADDMVRNTARDLLYYAVTQDAMLIFENLSRGFGRQGKRTFMAERQYTRMEDWLTAKLAYEGLPSKTYLSKTLAQYTSKTCSNCGFTITSADYDRVLEKLKKTATGWMTTINGKELKVEGQITYYNRYKRQNVVKDLSVELDRLSEESVNNDISSWTKGRSGEALSLLKKRFSHRPVQEKFVCLNCEFETHADEQAALNIARSWLFLRSQEYKKYQTNKTTGNTDKRAFVETWQSFYRKKLKEVWKPAV

SEQ ID NO: 33720 - protein, 978 aa, synthetic construct
  REGION 1..978: note = engineered CasX variant
QEIKRINKIRRRLVKDSNTKKAGKTGPMKTLLVPVMTPDLRERLENLRKKPENIPQPISNTSRANLNKLLTDYTEMKKAILHVYWEEFQKDPVGLMSRVAQPASKKIDQNKLKPEMDEKGNLTTAGFACSQCGQPLFVYKLEQVSEKGKAYTNYFGRCNVAEHEKLILLAQLKPEKDSDEAVTYSLGKFGQRALDFYSIHVTKESTHPVKPLAQIAGNRYASVPVGKALSDACMGTIASFLSKYQDIIIEHQKVVKGNQKRLESLRELAGKENLEYPSVTLPPQPHTKEGVDAYNEVIARVRMWVNLNLWQKLKLSRDDAKPLLRLKGFPSFPLVERQANEVDWWDMVCNVKKLINEKKEDGKVFWQNLAGYKRQEALRPYLSSEEDRKKGKKFARYQLGDLLLHLEKKHGEDWGKVYDEAWERIDKKVEGLSKHIKLEEERRSEDAQSKAALTDWLRAKASFVIEGLKEADKDEFCRCELKLQKWYGDLRGKPFAIEAENSILDISGFSKQYNCAFIWQKDGVKKLNLYLIINYFKGGKLRFKKIKPEAFEANRFYTVINKKSGEIVPMEVNFNFDDPNLIILPLAFGKRQGREFIWNDLLSLETGSLKLANGRVIEKTLYNRRTRQDEPALFVALTFERREVLDSSNIKPMNLIGVDRGENIPAVIALTDPEGCPLSRFKDSLGNPTHILRIGESYKEKQRTIQAKKEVEQRRAGGYSRKYASKAKNLADDMVRNTARDLLYYAVTQDAMLIFENLSRGFGRQGKRTFMAERQYTRMEDWLTAKLAYEGLPSKTYLSKTLAQYTSKTCSNCGFTITSADYDRVLEKLKKTATGWMTTINGKELKVEGQITYYNRYKRQNVVKDLSVELDRLSEESVNNDISSWTKGRSGEALSLLKKRFSHRPVQEKFVCLNCEFETHADEQAALNIARSWLFLRSQEYKKYQTNKTTGNTDKRAFVETWQSFYRKKLKEVWKPAV

SEQ ID NO: 33721 - protein, 978 aa, synthetic construct
  REGION 1..978: note = engineered CasX variant
QEIKRINKIRRRLVKDSNTKKAGKTGPMKTLLVPVMTPDLRERLENLRKKPENIPQPISNTSRANLNKLLTDYTEMKKAILHVYWEEFQKDPVGLMSRVAQPASKKIDQNKLKPEMDEKGNLTTAGFACSQCGQPLFVYKLEQVSEKGKAYTNYFGRCNVAEHEKLIKLAQLKPEKDSDEAVTYSLGKFGQRALDFYSIHVTKESTHPVKPLAQIAGNRYASGPVGKALSDACMGTIASFLSKYQDIIIEHQKVVKGNQKRLESLRELAGKENLEYPSVTLPPQPHTKEGVDAYNEVIARVRMWVNLNLWQKLKLSRDDAKPLLRLKGFPSFPLVERQANEVDWWDMVCNVKKLINEKKEDGKVFWQNLAGYKRQEALRPYLSSEEDRKKGKKFARYQLGDLLLHLEKKHGEDWGKVYDEAWERIDKKVEGLSKHIKLEEERRSEDAQSKAALTDWLRAKASFVIEGLKEADKDEFCRCELKLQKWYGDLRGKPFAIEAENSILDISGFSKQYNCAFIWQKDGVKKLNLYLIINYFKGGKLRFKKIKPEAFEANRFYTVINKKSGEIVPMEVNFNFDDPNLIILPLAFGKRQGREFIWNDLLSLETGSLKLANGRVIEKTLYNRRTRQDEPALFVALTFERREVLDSSNIKPMNLIGVDRGENIPAVIALTDPEGCPLSRFKDSLGNPTHILRIGESYKEKQRTIQAKKEVEQRRAGGYSRKYASKAKNLADDMVRNTARDLLYYAVTQDAMLIFENLSRGFGRQGKRTFMAERQYTRMEDWLTAKLAYEGLPSKTYLSKTLAQYTSKTCSNCGFTITSADYDRVLEKLKKTATGWMTTINGKELKVEGQITYYNRYKRQNVVKDLSVELDRLSEESVNNDISSWTKGRSGEALSLLKKRFSHRPVQEKFVCLNCEFETHADEQAALNIARSWLFLRSQEYKKYQTNKTTGNTDKRAFVETWQSFYRKKLKEVWKPAV

SEQ ID NO: 33722 - protein, 977 aa, synthetic construct
  REGION 1..977: note = engineered CasX variant
QEIKRINKIRRRLVKDSNTKKAGKTGPMKTLLVPVMTPDLRERLENLRKKPENIPQPISNTSRANLNKLLTDYTEMKKAILHVYWEEFQKDPVGLMSRVAQPASKKIDQNKLKPEMDEKGNLTTAGFACSQCGQPLFVYKLEQVSEKGKAYTNYFGRCNVAEHEKLILLAQLKPEKDSDEAVTYSLGKFGQRALDFYSIHVTKESTHPVKPLAQIAGNRYASPVGKALSDACMGTIASFLSKYQDIIIEHQKVVKGNQKRLESLRELAGKENLEYPSVTLPPQPHTKEGVDAYNEVIARVRMWVNLNLWQKLKLSRDDAKPLLRLKGFPSFPLVERQANEVDWWDMVCNVKKLINEKKEDGKVFWQNLAGYKRQEALRPYLSSEEDRKKGKKFARYQLGDLLLHLEKKHGEDWGKVYDEAWERIDKKVEGLSKHIKLEEERRSEDAQSKAALTDWLRAKASFVIEGLKEADKDEFCRCELKLQKWYGDLRGKPFAIEAENSILDISGFSKQYNCAFIWQKDGVKKLNLYLIINYFKGGKLRFKKIKPEAFEANRFYTVINKKSGEIVPMEVNFNFDDPNLIILPLAFGKRQGREFIWNDLLSLETGSLKLANGRVIEKTLYNRRTRQDEPALFVALTFERREVLDSSNIKPMNLIGVDRGENIPAVIALTDPEGCPLSRFKDSLGNPTHILRIGESYKEKQRTIQAKKEVEQRRAGGYSRKYASKAKNLADDMVRNTARDLLYYAVTQDAMLIFENLSRGFGRQGKRTFMAERQYTRMEDWLTAKLAYEGLPSKTYLSKTLAQYTSKTCSNCGFTITSADYDRVLEKLKKTATGWMTTINGKELKVEGQITYYNRYKRQNVVKDLSVELDRLSEESVNNDISSWTKGRSGEALSLLKKRFSHRPVQEKFVCLNCEFETHADEQAALNIARSWLFLRSQEYKKYQTNKTTGNTDKRAFVETWQSFYRKKLKEVWKPAV

SEQ ID NO: 33723 - protein, 979 aa, synthetic construct
  REGION 1..979: note = engineered CasX variant
QEIKRINKIRRRLVKDSNTKKAGKTGPMKTLLVPVMTPDLRERLENLRKKPENIPQPISNTSRANLNKLLTDYTEMKKAILHVYWEEFQKDPVGLMSRVAQPASKKIDQNKLKPEMDEKGNLTTAGFACSQCGQPLFVYKLEQVSEKGKAYTNYFGRCNVAEHEKLILLAQLKPEKDSDEAVTYSLGKFGQRALDFYSIHVTKESTHPVKPLAQIAGNRYASYPVGKALSDACMGTIASFLSKYQDIIIEHQKVVKGNQKRLESLRELAGKENLEYPSVTLPPQPHTKEGVDAYNEVIARVRMWVNLNLWQKLKLSRDDAKPLLRLKGFPSFPLVERQANEVDWWDMVCNVKKLINEKKEDGKVFWQNLAGYKRQEALRPYLSSEEDRKKGKKFARYQLGDLLLHLEKKHGEDWGKVYDEAWERIDKKVEGLSKHIKLEEERRSEDAQSKAALTDWLRAKASFVIEGLKEADKDEFCRCELKLQKWYGDLRGKPFAIEAENSILDISGFSKQYNCAFIWQKDGVKKLNLYLIINYFKGGKLRFKKIKPEAFEANRFYTVINKKSGEIVPMEVNFNFDDPNLIILPLAFGKRQGREFIWNDLLSLETGSLKLANGRVIEKTLYNRRTRQDEPALFVALTFERREVLDSSNIKPMNLIGVDRGENIPAVIALTDPEGCPLSRFKDSLGNPTHILRIGESYKEKQRTIQAKKEVEQRRAGGYSRKYASKAKNLADDMVRNTARDLLYYAVTQDAMLIFENLSRGFGRQGKRTFMAERQYTRMEDWLTAKLAYEGLPSKTYLSKTLAQYTSKTCSNCGFTITSADYDRVLEKLKKTATGWMTTINGKELKVEGQITYYNRYKRQNVVKDLSVELDRLSEESVNNDISSWTKGRSGEALSLLKKRFSHRPVQEKFVCLNCGFETHADEQAALNIARSWLFLRSQEYKKYQTNKTSTGNTDKRAFVETWQSFYRKKLKEVWKPAV

SEQ ID NO: 33724 - protein, 979 aa, synthetic construct
  REGION 1..979: note = engineered CasX variant
QEIKRINKIRRRLVKDSNTKKAGKTGPMKTLLVPVMTPDLRERLENLRKKPENIPQPISNTSRANLNKLLTDYTEMKKAILHVYWEEFQKDPVGLMSRVAQPASKKIDQNKLKPEMDEKGNLTTAGFACSQCGQPLFVYKLEQVSEKGKAYTNYFGRCNVAEHEKLILLAQLKPEKDSDEAVTYSLGKFGQRALDFYSIHVTKESTHPVKPLAQIAGNRYASHPVGKALSDACMGTIASFLSKYQDIIIEHQKVVKGNQKRLESLRELAGKENLEYPSVTLPPQPHTKEGVDAYNEVIARVRMWVNLNLWQKLKLSRDDAKPLLRLKGFPSFPLVERQANEVDWWDMVCNVKKLINEKKEDGKVFWQNLAGYKRQEALRPYLSSEEDRKKGKKFARYQLGDLLLHLEKKHGEDWGKVYDEAWERIDKKVEGLSKHIKLEEERRSEDAQSKAALTDWLRAKASFVIEGLKEADKDEFCRCELKLQKWYGDLRGKPFAIEAENSILDISGFSKQYNCAFIWQKDGVKKLNLYLIINYFKGGKLRFKKIKPEAFEANRFYTVINKKSGEIVPMEVNFNFDDPNLIILPLAFGKRQGREFIWNDLLSLETGSLKLANGRVIEKTLYNRRTRQDEPALFVALTFERREVLDSSNIKPMNLIGVDRGENIPAVIALTDPEGCPLSRFKDSLGNPTHILRIGESYKEKQRTIQAKKEVEQRRAGGYSRKYASKAKNLADDMVRNTARDLLYYAVTQDAMLIFENLSRGFGRQGKRTFMAERQYTRMEDWLTAKLAYEGLPSKTYLSKTLAQYTSKTCSNCGFTITSADYDRVLEKLKKTATGWMTTINGKELKVEGQITYYNRYKRQNVVKDLSVELDRLSEESVNNDISSWTKGRSGEALSLLKKRFSHRPVQEKFVCLNCGFETHADEQAALNIARSWLFLRSQEYKKYQTNKTSTGNTDKRAFVETWQSFYRKKLKEVWKPAV

SEQ ID NO: 33725 - protein, 979 aa, synthetic construct
  REGION 1..979: note = engineered CasX variant
QEIKRINKIRRRLVKDSNTKKAGKTGPMKTLLVPVMTPDLRERLENLRKKPENIPQPISNTSRANLNKLLTDYTEMKKAILHVYWEEFQKDPVGLMSRVAQPASKKIDQNKLKPEMDEKGNLTTAGFACSQCGQPLFVYKLEQVSEKGKAYTNYFGRCNVAEHEKLILLAQLKPEKDSDEAVTYSLGKFGQRALDFYSIHVTKESTHPVKPLAQIAGNRYASSPVGKALSDACMGTIASFLSKYQDIIIEHQKVVKGNQKRLESLRELAGKENLEYPSVTLPPQPHTKEGVDAYNEVIARVRMWVNLNLWQKLKLSRDDAKPLLRLKGFPSFPLVERQANEVDWWDMVCNVKKLINEKKEDGKVFWQNLAGYKRQEALRPYLSSEEDRKKGKKFARYQLGDLLLHLEKKHGEDWGKVYDEAWERIDKKVEGLSKHIKLEEERRSEDAQSKAALTDWLRAKASFVIEGLKEADKDEFCRCELKLQKWYGDLRGKPFAIEAENSILDISGFSKQYNCAFIWQKDGVKKLNLYLIINYFKGGKLRFKKIKPEAFEANRFYTVINKKSGEIVPMEVNFNFDDPNLIILPLAFGKRQGREFIWNDLLSLETGSLKLANGRVIEKTLYNRRTRQDEPALFVALTFERREVLDSSNIKPMNLIGVDRGENIPAVIALTDPEGCPLSRFKDSLGNPTHILRIGESYKEKQRTIQAKKEVEQRRAGGYSRKYASKAKNLADDMVRNTARDLLYYAVTQDAMLIFENLSRGFGRQGKRTFMAERQYTRMEDWLTAKLAYEGLPSKTYLSKTLAQYTSKTCSNCGFTITSADYDRVLEKLKKTATGWMTTINGKELKVEGQITYYNRYKRQNVVKDLSVELDRLSEESVNNDISSWTKGRSGEALSLLKKRFSHRPVQEKFVCLNCGFETHADEQAALNIARSWLFLRSQEYKKYQTNKTSTGNTDKRAFVETWQSFYRKKLKEVWKPAV

SEQ ID NO: 33726 - protein, 979 aa, synthetic construct
  REGION 1..979: note = engineered CasX variant
QEIKRINKIRRRLVKDSNTKKAGKTGPMKTLLVPVMTPDLRERLENLRKKPENIPQPISNTSRANLNKLLTDYTEMKKAILHVYWEEFQKDPVGLMSRVAQPASKKIDQNKLKPEMDEKGNLTTAGFACSQCGQPLFVYKLEQVSEKGKAYTNYFGRCNVAEHEKLILLAQLKPEKDSDEAVTYSLGKFGQRALDFYSIHVTKESTHPVKPLAQIAGNRYASTPVGKALSDACMGTIASFLSKYQDIIIEHQKVVKGNQKRLESLRELAGKENLEYPSVTLPPQPHTKEGVDAYNEVIARVRMWVNLNLWQKLKLSRDDAKPLLRLKGFPSFPLVERQANEVDWWDMVCNVKKLINEKKEDGKVFWQNLAGYKRQEALRPYLSSEEDRKKGKKFARYQLGDLLLHLEKKHGEDWGKVYDEAWERIDKKVEGLSKHIKLEEERRSEDAQSKAALTDWLRAKASFVIEGLKEADKDEFCRCELKLQKWYGDLRGKPFAIEAENSILDISGFSKQYNCAFIWQKDGVKKLNLYLIINYFKGGKLRFKKIKPEAFEANRFYTVINKKSGEIVPMEVNFNFDDPNLIILPLAFGKRQGREFIWNDLLSLETGSLKLANGRVIEKTLYNRRTRQDEPALFVALTFERREVLDSSNIKPMNLIGVDRGENIPAVIALTDPEGCPLSRFKDSLGNPTHILRIGESYKEKQRTIQAKKEVEQRRAGGYSRKYASKAKNLADDMVRNTARDLLYYAVTQDAMLIFENLSRGFGRQGKRTFMAERQYTRMEDWLTAKLAYEGLPSKTYLSKTLAQYTSKTCSNCGFTITSADYDRVLEKLKKTATGWMTTINGKELKVEGQITYYNRYKRQNVVKDLSVELDRLSEESVNNDISSWTKGRSGEALSLLKKRFSHRPVQEKFVCLNCGFETHADEQAALNIARSWLFLRSQEYKKYQTNKTSTGNTDKRAFVETWQSFYRKKLKEVWKPAV

SEQ ID NO: 33727 - protein, 979 aa, synthetic construct
  REGION 1..979: note = engineered CasX variant
QEIKRINKIRRRLVKDSNTKKAGKTGPMKTLLVPVMTPDLRERLENLRKKPENIPQPISNTSRANLNKLLTDYTEMKKAILHVYWEEFQKDPVGLMSRVAQPASKKIDQNKLKPEMDEKGNLTTAGFACSQCGQPLFVYKLEQVSEKGKAYTNYFGRCNVAEHEKLILLAQLKPEKDSDEAVTYSLGKFGQRALDFYSIHVTKESTHPVKPLAQIAGNRYASAPVGKALSDACMGTIASFLSKYQDIIIEHQKVVKGNQKRLESLRELAGKENLEYPSVTLPPQPHTKEGVDAYNEVIARVRMWVNLNLWQKLKLSRDDAKPLLRLKGFPSFPLVERQANEVDWWDMVCNVKKLINEKKEDGKVFWQNLAGYKRQEALRPYLSSEEDRKKGKKFARYQLGDLLLHLEKKHGEDWGKVYDEAWERIDKKVEGLSKHIKLEEERRSEDAQSKAALTDWLRAKASFVIEGLKEADKDEFCRCELKLQKWYGDLRGKPFAIEAENSILDISGFSKQYNCAFIWQKDGVKKLNLYLIINYFKGGKLRFKKIKPEAFEANRFYTVINKKSGEIVPMEVNFNFDDPNLIILPLAFGKRQGREFIWNDLLSLETGSLKLANGRVIEKTLYNRRTRQDEPALFVALTFERREVLDSSNIKPMNLIGVDRGENIPAVIALTDPEGCPLSRFKDSLGNPTHILRIGESYKEKQRTIQAKKEVEQRRAGGYSRKYASKAKNLADDMVRNTARDLLYYAVTQDAMLIFENLSRGFGRQGKRTFMAERQYTRMEDWLTAKLAYEGLPSKTYLSKTLAQYTSKTCSNCGFTITSADYDRVLEKLKKTATGWMTTINGKELKVEGQITYYNRYKRQNVVKDLSVELDRLSEESVNNDISSWTKGRSGEALSLLKKRFSHRPVQEKFVCLNCGFETHADEQAALNIARSWLFLRSQEYKKYQTNKTSTGNTDKRAFVETWQSFYRKKLKEVWKPAV

SEQ ID NO: 33728 - protein, 979 aa, synthetic construct
  REGION 1..979: note = engineered CasX variant
QEIKRINKIRRRLVKDSNTKKAGKTGPMKTLLVPVMTPDLRERLENLRKKPENIPQPISNTSRANLNKLLTDYTEMKKAILHVYWEEFQKDPVGLMSRVAQPASKKIDQNKLKPEMDEKGNLTTAGFACSQCGQPLFVYKLEQVSEKGKAYTNYFGRCNVAEHEKLILLAQLKPEKDSDEAVTYSLGKFGQRALDFYSIHVTKESTHPVKPLAQIAGNRYASVPVGKALSDACMGTIASFLSKYQDIIIEHQKVVKGNQKRLESLRELAGKENLEYPSVTLPPQPHTKEGVDAYNEVIARVRMWVNLNLWQKLKLSRDDAKPLLRLKGFPSFPLVERQANEVDWWDMVCNVKKLINEKKEDGKVFWQNLAGYKRQEALRPYLSSEEDRKKGKKFARYQLGDLLLHLEKKHGEDWGKVYDEAWERIDKKVEGLSKHIKLEEERRSEDAQSKAALTDWLRAKASFVIEGLKEADKDEFCRCELKLQKWYGDLRGKPFAIEAENSILDISGFSKQYNCAFIWQKDGVKKLNLYLIINYFKGGKLRFKKIKPEAFEANRFYTVINKKSGEIVPMEVNFNFDDPNLIILPLAFGKRQGREFIWNDLLSLETGSLKLANGRVIEKTLYNRRTRQDEPALFVALTFERREVLDSSNIKPMNLIGVDRGENIPAVIALTDPEGCPLSRFKDSLGNPTHILRIGESYKEKQRTIQAKKEVEQRRAGGYSRKYASKAKNLADDMVRNTARDLLYYAVTQDAMLIFENLSRGFGRQGKRTFMAERQYTRMEDWLTAKLAYEGLPSKTYLSKTLAQYTSKTCSNCGFTITSADYDRVLEKLKKTATGWMTTINGKELKVEGQITYYNRYKRQNVVKDLSVELDRLSEESVNNDISSWTKGRSGEALSLLKKRFSHRPVQEKFVCLNCGFETHADEQAALNIARSWLFLRSQEYKKYQTNKTSTGNTDKRAFVETWQSFYRKKLKEVWKPAV

SEQ ID NO: 33729 - protein, 979 aa, synthetic construct
  REGION 1..979: note = engineered CasX variant
QEIKRINKIRRRLVKDSNTKKAGKTGPMKTLLVPVMTPDLRERLENLRKKPENIPQPISNTSRANLNKLLTDYTEMKKAILHVYWEEFQKDPVGLMSRVAQPASKKIDQNKLKPEMDEKGNLTTAGFACSQCGQPLFVYKLEQVSEKGKAYTNYFGRCNVAEHEKLIKLAQLKPEKDSDEAVTYSLGKFGQRALDFYSIHVTKESTHPVKPLAQIAGNRYASGPVGKALSDACMGTIASFLSKYQDIIIEHQKVVKGNQKRLESLRELAGKENLEYPSVTLPPQPHTKEGVDAYNEVIARVRMWVNLNLWQKLKLSRDDAKPLLRLKGFPSFPLVERQANEVDWWDMVCNVKKLINEKKEDGKVFWQNLAGYKRQEALRPYLSSEEDRKKGKKFARYQLGDLLLHLEKKHGEDWGKVYDEAWERIDKKVEGLSKHIKLEEERRSEDAQSKAALTDWLRAKASFVIEGLKEADKDEFCRCELKLQKWYGDLRGKPFAIEAENSILDISGFSKQYNCAFIWQKDGVKKLNLYLIINYFKGGKLRFKKIKPEAFEANRFYTVINKKSGEIVPMEVNFNFDDPNLIILPLAFGKRQGREFIWNDLLSLETGSLKLANGRVIEKTLYNRRTRQDEPALFVALTFERREVLDSSNIKPMNLIGVDRGENIPAVIALTDPEGCPLSRFKDSLGNPTHILRIGESYKEKQRTIQAKKEVEQRRAGGYSRKYASKAKNLADDMVRNTARDLLYYAVTQDAMLIFENLSRGFGRQGKRTFMAERQYTRMEDWLTAKLAYEGLPSKTYLSKTLAQYTSKTCSNCGFTITSADYDRVLEKLKKTATGWMTTINGKELKVEGQITYYNRYKRQNVVKDLSVELDRLSEESVNNDISSWTKGRSGEALSLLKKRFSHRPVQEKFVCLNCGFETHADEQAALNIARSWLFLRSQEYKKYQTNKTSTGNTDKRAFVETWQSFYRKKLKEVWKPAV

SEQ ID NO: 33730 - protein, 978 aa, synthetic construct
  REGION 1..978: note = engineered CasX variant
QEIKRINKIRRRLVKDSNTKKAGKTGPMKTLLVPVMTPDLRERLENLRKKPENIPQPISNTSRANLNKLLTDYTEMKKAILHVYWEEFQKDPVGLMSRVAQPASKKIDQNKLKPEMDEKGNLTTAGFACSQCGQPLFVYKLEQVSEKGKAYTNYFGRCNVAEHEKLILLAQLKPEKDSDEAVTYSLGKFGQRALDFYSIHVTKESTHPVKPLAQIAGNRYASPVGKALSDACMGTIASFLSKYQDIIIEHQKVVKGNQKRLESLRELAGKENLEYPSVTLPPQPHTKEGVDAYNEVIARVRMWVNLNLWQKLKLSRDDAKPLLRLKGFPSFPLVERQANEVDWWDMVCNVKKLINEKKEDGKVFWQNLAGYKRQEALRPYLSSEEDRKKGKKFARYQLGDLLLHLEKKHGEDWGKVYDEAWERIDKKVEGLSKHIKLEEERRSEDAQSKAALTDWLRAKASFVIEGLKEADKDEFCRCELKLQKWYGDLRGKPFAIEAENSILDISGFSKQYNCAFIWQKDGVKKLNLYLIINYFKGGKLRFKKIKPEAFEANRFYTVINKKSGEIVPMEVNFNFDDPNLIILPLAFGKRQGREFIWNDLLSLETGSLKLANGRVIEKTLYNRRTRQDEPALFVALTFERREVLDSSNIKPMNLIGVDRGENIPAVIALTDPEGCPLSRFKDSLGNPTHILRIGESYKEKQRTIQAKKEVEQRRAGGYSRKYASKAKNLADDMVRNTARDLLYYAVTQDAMLIFENLSRGFGRQGKRTFMAERQYTRMEDWLTAKLAYEGLPSKTYLSKTLAQYTSKTCSNCGFTITSADYDRVLEKLKKTATGWMTTINGKELKVEGQITYYNRYKRQNVVKDLSVELDRLSEESVNNDISSWTKGRSGEALSLLKKRFSHRPVQEKFVCLNCGFETHADEQAALNIARSWLFLRSQEYKKYQTNKTSTGNTDKRAFVETWQSFYRKKLKEVWKPAV

SEQ ID NO: 33731 - protein, 979 aa, synthetic construct
  REGION 1..979: note = engineered CasX variant
QEIKRINKIRRRLVKDSNTKKAGKTGPMKTLLVPVMTPDLRERLENLRKKPENIPQPISNTSRANLNKLLTDYTEMKKAILHVYWEEFQKDPVGLMSRVAQPASKKIDQNKLKPEMDEKGNLTTAGFACSQCGQPLFVYKLEQVSEKGKAYTNYFGRCNVAEHEKLILLAQLKPEKDSDEAVTYSLGKFGQRALDFYSIHVTKESTHPVKPLAQIAGNRYASYPVGKALSDACMGTIASFLSKYQDIIIEHQKVVKGNQKRLESLRELAGKENLEYPSVTLPPQPHTKEGVDAYNEVIARVRMWVNLNLWQKLKLSRDDAKPLLRLKGFPSFPLVERQANEVDWWDMVCNVKKLINEKKEDGKVFWQNLAGYKRQEALRPYLSSEEDRKKGKKFARYQLGDLLLHLEKKHGEDWGKVYDEAWERIDKKVEGLSKHIKLEEERRSEDAQSKAALTDWLRAKASFVIEGLKEADKDEFCRCELKLQKWYGDLRGKPFAIEAENSILDISGFSKQYNCAFIWQKDGVKKLNLYLIINYFKGGKLRFKKIKPEAFEANRFYTVINKKSGEIVPMEVNFNFDDPNLIILPLAFGKRQGREFIWNDLLSLETGSLKLANGRVIEKTLYNRRTRQDEPALFVALTFERREVLDSSNIKPMNLIGVDRGENIPAVIALTDPEGCPLSRFKDSLGNPTHILRIGESYKEKQRTIQAKKEVEQRRAGGYSRKYASKAKNLADDMVRNTARDLLYYAVTQDAMLIFENLSRGFGRQGKRTFMAERQYTRMEDWLTAKLAYEGLPSKTYLSKTLAQYTSKTCSNCGFTITSADYDRVLEKLKKTATGWMTTINGKELKVEGQITYYNRYKRQNVVKDLSVELDRLSEESVNNDISSWTKGRSGEALSLLKKRFSHRPVQEKFVCLNCGFETHADEQAALNIARSWLFLRSQEYKKYQTNKTTGKNTDKRAFVETWQSFYRKKLKEVWKPAV

SEQ ID NO: 33732 - protein, 979 aa, synthetic construct
  REGION 1..979: note = engineered CasX variant
QEIKRINKIRRRLVKDSNTKKAGKTGPMKTLLVPVMTPDLRERLENLRKKPENIPQPISNTSRANLNKLLTDYTEMKKAILHVYWEEFQKDPVGLMSRVAQPASKKIDQNKLKPEMDEKGNLTTAGFACSQCGQPLFVYKLEQVSEKGKAYTNYFGRCNVAEHEKLILLAQLKPEKDSDEAVTYSLGKFGQRALDFYSIHVTKESTHPVKPLAQIAGNRYASHPVGKALSDACMGTIASFLSKYQDIIIEHQKVVKGNQKRLESLRELAGKENLEYPSVTLPPQPHTKEGVDAYNEVIARVRMWVNLNLWQKLKLSRDDAKPLLRLKGFPSFPLVERQANEVDWWDMVCNVKKLINEKKEDGKVFWQNLAGYKRQEALRPYLSSEEDRKKGKKFARYQLGDLLLHLEKKHGEDWGKVYDEAWERIDKKVEGLSKHIKLEEERRSEDAQSKAALTDWLRAKASFVIEGLKEADKDEFCRCELKLQKWYGDLRGKPFAIEAENSILDISGFSKQYNCAFIWQKDGVKKLNLYLIINYFKGGKLRFKKIKPEAFEANRFYTVINKKSGEIVPMEVNFNFDDPNLIILPLAFGKRQGREFIWNDLLSLETGSLKLANGRVIEKTLYNRRTRQDEPALFVALTFERREVLDSSNIKPMNLIGVDRGENIPAVIALTDPEGCPLSRFKDSLGNPTHILRIGESYKEKQRTIQAKKEVEQRRAGGYSRKYASKAKNLADDMVRNTARDLLYYAVTQDAMLIFENLSRGFGRQGKRTFMAERQYTRMEDWLTAKLAYEGLPSKTYLSKTLAQYTSKTCSNCGFTITSADYDRVLEKLKKTATGWMTTINGKELKVEGQITYYNRYKRQNVVKDLSVELDRLSEESVNNDISSWTKGRSGEALSLLKKRFSHRPVQEKFVCLNCGFETHADEQAALNIARSWLFLRSQEYKKYQTNKTTGKNTDKRAFVETWQSFYRKKLKEVWKPAV

SEQ ID NO: 33733 - protein, 979 aa, synthetic construct
  REGION 1..979: note = engineered CasX variant
QEIKRINKIRRRLVKDSNTKKAGKTGPMKTLLVPVMTPDLRERLENLRKKPENIPQPISNTSRANLNKLLTDYTEMKKAILHVYWEEFQKDPVGLMSRVAQPASKKIDQNKLKPEMDEKGNLTTAGFACSQCGQPLFVYKLEQVSEKGKAYTNYFGRCNVAEHEKLILLAQLKPEKDSDEAVTYSLGKFGQRALDFYSIHVTKESTHPVKPLAQIAGNRYASSPVGKALSDACMGTIASFLSKYQDIIIEHQKVVKGNQKRLESLRELAGKENLEYPSVTLPPQPHTKEGVDAYNEVIARVRMWVNLNLWQKLKLSRDDAKPLLRLKGFPSFPLVERQANEVDWWDMVCNVKKLINEKKEDGKVFWQNLAGYKRQEALRPYLSSEEDRKKGKKFARYQLGDLLLHLEKKHGEDWGKVYDEAWERIDKKVEGLSKHIKLEEERRSEDAQSKAALTDWLRAKASFVIEGLKEADKDEFCRCELKLQKWYGDLRGKPFAIEAENSILDISGFSKQYNCAFIWQKDGVKKLNLYLIINYFKGGKLRFKKIKPEAFEANRFYTVINKKSGEIVPMEVNFNFDDPNLIILPLAFGKRQGREFIWNDLLSLETGSLKLANGRVIEKTLYNRRTRQDEPALFVALTFERREVLDSSNIKPMNLIGVDRGENIPAVIALTDPEGCPLSRFKDSLGNPTHILRIGESYKEKQRTIQAKKEVEQRRAGGYSRKYASKAKNLADDMVRNTARDLLYYAVTQDAMLIFENLSRGFGRQGKRTFMAERQYTRMEDWLTAKLAYEGLPSKTYLSKTLAQYTSKTCSNCGFTITSADYDRVLEKLKKTATGWMTTINGKELKVEGQITYYNRYKRQNVVKDLSVELDRLSEESVNNDISSWTKGRSGEALSLLKKRFSHRPVQEKFVCLNCGFETHADEQAALNIARSWLFLRSQEYKKYQTNKTTGKNTDKRAFVETWQSFYRKKLKEVWKPAV

SEQ ID NO: 33734 - protein, 979 aa, synthetic construct
  REGION 1..979: note = engineered CasX variant
QEIKRINKIRRRLVKDSNTKKAGKTGPMKTLLVPVMTPDLRERLENLRKKPENIPQPISNTSRANLNKLLTDYTEMKKAILHVYWEEFQKDPVGLMSRVAQPASKKIDQNKLKPEMDEKGNLTTAGFACSQCGQPLFVYKLEQVSEKGKAYTNYFGRCNVAEHEKLILLAQLKPEKDSDEAVTYSLGKFGQRALDFYSIHVTKESTHPVKPLAQIAGNRYASTPVGKALSDACMGTIASFLSKYQDIIIEHQKVVKGNQKRLESLRELAGKENLEYPSVTLPPQPHTKEGVDAYNEVIARVRMWVNLNLWQKLKLSRDDAKPLLRLKGFPSFPLVERQANEVDWWDMVCNVKKLINEKKEDGKVFWQNLAGYKRQEALRPYLSSEEDRKKGKKFARYQLGDLLLHLEKKHGEDWGKVYDEAWERIDKKVEGLSKHIKLEEERRSEDAQSKAALTDWLRAKASFVIEGLKEADKDEFCRCELKLQKWYGDLRGKPFAIEAENSILDISGFSKQYNCAFIWQKDGVKKLNLYLIINYFKGGKLRFKKIKPEAFEANRFYTVINKKSGEIVPMEVNFNFDDPNLIILPLAFGKRQGREFIWNDLLSLETGSLKLANGRVIEKTLYNRRTRQDEPALFVALTFERREVLDSSNIKPMNLIGVDRGENIPAVIALTDPEGCPLSRFKDSLGNPTHILRIGESYKEKQRTIQAKKEVEQRRAGGYSRKYASKAKNLADDMVRNTARDLLYYAVTQDAMLIFENLSRGFGRQGKRTFMAERQYTRMEDWLTAKLAYEGLPSKTYLSKTLAQYTSKTCSNCGFTITSADYDRVLEKLKKTATGWMTTINGKELKVEGQITYYNRYKRQNVVKDLSVELDRLSEESVNNDISSWTKGRSGEALSLLKKRFSHRPVQEKFVCLNCGFETHADEQAALNIARSWLFLRSQEYKKYQTNKTTGKNTDKRAFVETWQSFYRKKLKEVWKPAV

SEQ ID NO: 33735 - protein, 979 aa, synthetic construct
  REGION 1..979: note = engineered CasX variant
QEIKRINKIRRRLVKDSNTKKAGKTGPMKTLLVPVMTPDLRERLENLRKKPENIPQPISNTSRANLNKLLTDYTEMKKAILHVYWEEFQKDPVGLMSRVAQPASKKIDQNKLKPEMDEKGNLTTAGFACSQCGQPLFVYKLEQVSEKGKAYTNYFGRCNVAEHEKLILLAQLKPEKDSDEAVTYSLGKFGQRALDFYSIHVTKESTHPVKPLAQIAGNRYASAPVGKALSDACMGTIASFLSKYQDIIIEHQKVVKGNQKRLESLRELAGKENLEYPSVTLPPQPHTKEGVDAYNEVIARVRMWVNLNLWQKLKLSRDDAKPLLRLKGFPSFPLVERQANEVDWWDMVCNVKKLINEKKEDGKVFWQNLAGYKRQEALRPYLSSEEDRKKGKKFARYQLGDLLLHLEKKHGEDWGKVYDEAWERIDKKVEGLSKHIKLEEERRSEDAQSKAALTDWLRAKASFVIEGLKEADKDEFCRCELKLQKWYGDLRGKPFAIEAENSILDISGFSKQYNCAFIWQKDGVKKLNLYLIINYFKGGKLRFKKIKPEAFEANRFYTVINKKSGEIVPMEVNFNFDDPNLIILPLAFGKRQGREFIWNDLLSLETGSLKLANGRVIEKTLYNRRTRQDEPALFVALTFERREVLDSSNIKPMNLIGVDRGENIPAVIALTDPEGCPLSRFKDSLGNPTHILRIGESYKEKQRTIQAKKEVEQRRAGGYSRKYASKAKNLADDMVRNTARDLLYYAVTQDAMLIFENLSRGFGRQGKRTFMAERQYTRMEDWLTAKLAYEGLPSKTYLSKTLAQYTSKTCSNCGFTITSADYDRVLEKLKKTATGWMTTINGKELKVEGQITYYNRYKRQNVVKDLSVELDRLSEESVNNDISSWTKGRSGEALSLLKKRFSHRPVQEKFVCLNCGFETHADEQAALNIARSWLFLRSQEYKKYQTNKTTGKNTDKRAFVETWQSFYRKKLKEVWKPAV

SEQ ID NO: 33736 - protein, 979 aa, synthetic construct
  REGION 1..979: note = engineered CasX variant
QEIKRINKIRRRLVKDSNTKKAGKTGPMKTLLVPVMTPDLRERLENLRKKPENIPQPISNTSRANLNKLLTDYTEMKKAILHVYWEEFQKDPVGLMSRVAQPASKKIDQNKLKPEMDEKGNLTTAGFACSQCGQPLFVYKLEQVSEKGKAYTNYFGRCNVAEHEKLILLAQLKPEKDSDEAVTYSLGKFGQRALDFYSIHVTKESTHPVKPLAQIAGNRYASVPVGKALSDACMGTIASFLSKYQDIIIEHQKVVKGNQKRLESLRELAGKENLEYPSVTLPPQPHTKEGVDAYNEVIARVRMWVNLNLWQKLKLSRDDAKPLLRLKGFPSFPLVERQANEVDWWDMVCNVKKLINEKKEDGKVFWQNLAGYKRQEALRPYLSSEEDRKKGKKFARYQLGDLLLHLEKKHGEDWGKVYDEAWERIDKKVEGLSKHIKLEEERRSEDAQSKAALTDWLRAKASFVIEGLKEADKDEFCRCELKLQKWYGDLRGKPFAIEAENSILDISGFSKQYNCAFIWQKDGVKKLNLYLIINYFKGGKLRFKKIKPEAFEANRFYTVINKKSGEIVPMEVNFNFDDPNLIILPLAFGKRQGREFIWNDLLSLETGSLKLANGRVIEKTLYNRRTRQDEPALFVALTFERREVLDSSNIKPMNLIGVDRGENIPAVIALTDPEGCPLSRFKDSLGNPTHILRIGESYKEKQRTIQAKKEVEQRRAGGYSRKYASKAKNLADDMVRNTARDLLYYAVTQDAMLIFENLSRGFGRQGKRTFMAERQYTRMEDWLTAKLAYEGLPSKTYLSKTLAQYTSKTCSNCGFTITSADYDRVLEKLKKTATGWMTTINGKELKVEGQITYYNRYKRQNVVKDLSVELDRLSEESVNNDISSWTKGRSGEALSLLKKRFSHRPVQEKFVCLNCGFETHADEQAALNIARSWLFLRSQEYKKYQTNKTTGKNTDKRAFVETWQSFYRKKLKEVWKPAV

SEQ ID NO: 33737 - protein, 979 aa, synthetic construct
  REGION 1..979: note = engineered CasX variant
QEIKRINKIRRRLVKDSNTKKAGKTGPMKTLLVPVMTPDLRERLENLRKKPENIPQPISNTSRANLNKLLTDYTEMKKAILHVYWEEFQKDPVGLMSRVAQPASKKIDQNKLKPEMDEKGNLTTAGFACSQCGQPLFVYKLEQVSEKGKAYTNYFGRCNVAEHEKLIKLAQLKPEKDSDEAVTYSLGKFGQRALDFYSIHVTKESTHPVKPLAQIAGNRYASGPVGKALSDACMGTIASFLSKYQDIIIEHQKVVKGNQKRLESLRELAGKENLEYPSVTLPPQPHTKEGVDAYNEVIARVRMWVNLNLWQKLKLSRDDAKPLLRLKGFPSFPLVERQANEVDWWDMVCNVKKLINEKKEDGKVFWQNLAGYKRQEALRPYLSSEEDRKKGKKFARYQLGDLLLHLEKKHGEDWGKVYDEAWERIDKKVEGLSKHIKLEEERRSEDAQSKAALTDWLRAKASFVIEGLKEADKDEFCRCELKLQKWYGDLRGKPFAIEAENSILDISGFSKQYNCAFIWQKDGVKKLNLYLIINYFKGGKLRFKKIKPEAFEANRFYTVINKKSGEIVPMEVNFNFDDPNLIILPLAFGKRQGREFIWNDLLSLETGSLKLANGRVIEKTLYNRRTRQDEPALFVALTFERREVLDSSNIKPMNLIGVDRGENIPAVIALTDPEGCPLSRFKDSLGNPTHILRIGESYKEKQRTIQAKKEVEQRRAGGYSRKYASKAKNLADDMVRNTARDLLYYAVTQDAMLIFENLSRGFGRQGKRTFMAERQYTRMEDWLTAKLAYEGLPSKTYLSKTLAQYTSKTCSNCGFTITSADYDRVLEKLKKTATGWMTTINGKELKVEGQITYYNRYKRQNVVKDLSVELDRLSEESVNNDISSWTKGRSGEALSLLKKRFSHRPVQEKFVCLNCGFETHADEQAALNIARSWLFLRSQEYKKYQTNKTTGKNTDKRAFVETWQSFYRKKLKEVWKPAV

SEQ ID NO: 33738 - protein, 978 aa, synthetic construct
  REGION 1..978: note = engineered CasX variant
QEIKRINKIRRRLVKDSNTKKAGKTGPMKTLLVPVMTPDLRERLENLRKKPENIPQPISNTSRANLNKLLTDYTEMKKAILHVYWEEFQKDPVGLMSRVAQPASKKIDQNKLKPEMDEKGNLTTAGFACSQCGQPLFVYKLEQVSEKGKAYTNYFGRCNVAEHEKLILLAQLKPEKDSDEAVTYSLGKFGQRALDFYSIHVTKESTHPVKPLAQIAGNRYASPVGKALSDACMGTIASFLSKYQDIIIEHQKVVKGNQKRLESLRELAGKENLEYPSVTLPPQPHTKEGVDAYNEVIARVRMWVNLNLWQKLKLSRDDAKPLLRLKGFPSFPLVERQANEVDWWDMVCNVKKLINEKKEDGKVFWQNLAGYKRQEALRPYLSSEEDRKKGKKFARYQLGDLLLHLEKKHGEDWGKVYDEAWERIDKKVEGLSKHIKLEEERRSEDAQSKAALTDWLRAKASFVIEGLKEADKDEFCRCELKLQKWYGDLRGKPFAIEAENSILDISGFSKQYNCAFIWQKDGVKKLNLYLIINYFKGGKLRFKKIKPEAFEANRFYTVINKKSGEIVPMEVNFNFDDPNLIILPLAFGKRQGREFIWNDLLSLETGSLKLANGRVIEKTLYNRRTRQDEPALFVALTFERREVLDSSNIKPMNLIGVDRGENIPAVIALTDPEGCPLSRFKDSLGNPTHILRIGESYKEKQRTIQAKKEVEQRRAGGYSRKYASKAKNLADDMVRNTARDLLYYAVTQDAMLIFENLSRGFGRQGKRTFMAERQYTRMEDWLTAKLAYEGLPSKTYLSKTLAQYTSKTCSNCGFTITSADYDRVLEKLKKTATGWMTTINGKELKVEGQITYYNRYKRQNVVKDLSVELDRLSEESVNNDISSWTKGRSGEALSLLKKRFSHRPVQEKFVCLNCGFETHADEQAALNIARSWLFLRSQEYKKYQTNKTTGKNTDKRAFVETWQSFYRKKLKEVWKPAV

SEQ ID NO: 33739 - protein, 978 aa, synthetic construct
  REGION 1..978: note = engineered CasX variant
QEIKRINKIRRRLVKDSNTKKAGKTGPMKTLLVPVMTPDLRERLENLRKKPENIPQPISNTSRANLNKLLTDYTEMKKAILHVYWEEFQKDPVGLMSRVAQPASKKIDQNKLKPEMDEKGNLTTAGFACSQCGQPLFVYKLEQVSEKGKAYTNYFGRCNVAEHEKLILLAQLKPEKDSDEAVTYSLGKFGQRALDFYSIHVTKESTHPVKPLAQIAGNRYASYPVGKALSDACMGTIASFLSKYQDIIIEHQKVVKGNQKRLESLRELAGKENLEYPSVTLPPQPHTKEGVDAYNEVIARVRMWVNLNLWQKLKLSRDDAKPLLRLKKFPSFPLVERQANEVDWWDMVCNVKKLINEKKEDGKVFWQNLAGYKRQEALRPYLSSEEDRKKGKKFARYQLGDLLLHLEKKHGEDWGKVYDEAWERIDKKVEGLSKHIKLEEERRSEDAQSKAALTDWLRAKASFVIEGLKEADKDEFCRCELKLQKWYGDLRGKPFAIEAENSILDISGFSKQYNCAFIWQKDGVKKLNLYLIINYFKGGKLRFKKIKPEAFEANRFYTVINKKSGEIVPMEVNFNFDDPNLIILPLAFGKRQGREFIWNDLLSLETGSLKLANGRVIEKTLYNRRTRQDEPALFVALTFERREVLDSSNIKPMNLIGVDRGENIPAVIALTDPEGCPLSRFKDSLGNPTHILRIGESYKEKQRTIQAKKEVEQRRAGGYSRKYASKAKNLADDMVRNTARDLLYYAVTQDAMLIFENLSRGFGRQGKRTFMAERQYTRMEDWLTAKLAYEGLPSKTYLSKTLAQYTSKTCSNCGFTITSADYDRVLEKLKKTATGWMTTINGKELKVEGQITYYNRYKRQNVVKDLSVELDRLSEESVNNDISSWTKGRSGEALSLLKKRFSHRPVQEKFVCLNCGFETHADEQAALNIARSWLFLRSQEYKKYQTNKTTGNTDKRAFVETWQSFYRKKLKEVWKPAV

SEQ ID NO: 33740 - protein, 978 aa, synthetic construct
  REGION 1..978: note = engineered CasX variant
QEIKRINKIRRRLVKDSNTKKAGKTGPMKTLLVPVMTPDLRERLENLRKKPENIPQPISNTSRANLNKLLTDYTEMKKAILHVYWEEFQKDPVGLMSRVAQPASKKIDQNKLKPEMDEKGNLTTAGFACSQCGQPLFVYKLEQVSEKGKAYTNYFGRCNVAEHEKLILLAQLKPEKDSDEAVTYSLGKFGQRALDFYSIHVTKESTHPVKPLAQIAGNRYASHPVGKALSDACMGTIASFLSKYQDIIIEHQKVVKGNQKRLESLRELAGKENLEYPSVTLPPQPHTKEGVDAYNEVIARVRMWVNLNLWQKLKLSRDDAKPLLRLKKFPSFPLVERQANEVDWWDMVCNVKKLINEKKEDGKVFWQNLAGYKRQEALRPYLSSEEDRKKGKKFARYQLGDLLLHLEKKHGEDWGKVYDEAWERIDKKVEGLSKHIKLEEERRSEDAQSKAALTDWLRAKASFVIEGLKEADKDEFCRCELKLQKWYGDLRGKPFAIEAENSILDISGFSKQYNCAFIWQKDGVKKLNLYLIINYFKGGKLRFKKIKPEAFEANRFYTVINKKSGEIVPMEVNFNFDDPNLIILPLAFGKRQGREFIWNDLLSLETGSLKLANGRVIEKTLYNRRTRQDEPALFVALTFERREVLDSSNIKPMNLIGVDRGENIPAVIALTDPEGCPLSRFKDSLGNPTHILRIGESYKEKQRTIQAKKEVEQRRAGGYSRKYASKAKNLADDMVRNTARDLLYYAVTQDAMLIFENLSRGFGRQGKRTFMAERQYTRMEDWLTAKLAYEGLPSKTYLSKTLAQYTSKTCSNCGFTITSADYDRVLEKLKKTATGWMTTINGKELKVEGQITYYNRYKRQNVVKDLSVELDRLSEESVNNDISSWTKGRSGEALSLLKKRFSHRPVQEKFVCLNCGFETHADEQAALNIARSWLFLRSQEYKKYQTNKTTGNTDKRAFVETWQSFYRKKLKEVWKPAV

SEQ ID NO: 33741 - protein, 978 aa, synthetic construct
  REGION 1..978: note = engineered CasX variant
QEIKRINKIRRRLVKDSNTKKAGKTGPMKTLLVPVMTPDLRERLENLRKKPENIPQPISNTSRANLNKLLTDYTEMKKAILHVYWEEFQKDPVGLMSRVAQPASKKIDQNKLKPEMDEKGNLTTAGFACSQCGQPLFVYKLEQVSEKGKAYTNYFGRCNVAEHEKLILLAQLKPEKDSDEAVTYSLGKFGQRALDFYSIHVTKESTHPVKPLAQIAGNRYASSPVGKALSDACMGTIASFLSKYQDIIIEHQKVVKGNQKRLESLRELAGKENLEYPSVTLPPQPHTKEGVDAYNEVIARVRMWVNLNLWQKLKLSRDDAKPLLRLKKFPSFPLVERQANEVDWWDMVCNVKKLINEKKEDGKVFWQNLAGYKRQEALRPYLSSEEDRKKGKKFARYQLGDLLLHLEKKHGEDWGKVYDEAWERIDKKVEGLSKHIKLEEERRSEDAQSKAALTDWLRAKASFVIEGLKEADKDEFCRCELKLQKWYGDLRGKPFAIEAENSILDISGFSKQYNCAFIWQKDGVKKLNLYLIINYFKGGKLRFKKIKPEAFEANRFYTVINKKSGEIVPMEVNFNFDDPNLIILPLAFGKRQGREFIWNDLLSLETGSLKLANGRVIEKTLYNRRTRQDEPALFVALTFERREVLDSSNIKPMNLIGVDRGENIPAVIALTDPEGCPLSRFKDSLGNPTHILRIGESYKEKQRTIQAKKEVEQRRAGGYSRKYASKAKNLADDMVRNTARDLLYYAVTQDAMLIFENLSRGFGRQGKRTFMAERQYTRMEDWLTAKLAYEGLPSKTYLSKTLAQYTSKTCSNCGFTITSADYDRVLEKLKKTATGWMTTINGKELKVEGQITYYNRYKRQNVVKDLSVELDRLSEESVNNDISSWTKGRSGEALSLLKKRFSHRPVQEKFVCLNCGFETHADEQAALNIARSWLFLRSQEYKKYQTNKTTGNTDKRAFVETWQSFYRKKLKEVWKPAV

SEQ ID NO: 33742 - protein, 978 aa, synthetic construct
  REGION 1..978: note = engineered CasX variant
QEIKRINKIRRRLVKDSNTKKAGKTGPMKTLLVPVMTPDLRERLENLRKKPENIPQPISNTSRANLNKLLTDYTEMKKAILHVYWEEFQKDPVGLMSRVAQPASKKIDQNKLKPEMDEKGNLTTAGFACSQCGQPLFVYKLEQVSEKGKAYTNYFGRCNVAEHEKLILLAQLKPEKDSDEAVTYSLGKFGQRALDFYSIHVTKESTHPVKPLAQIAGNRYASTPVGKALSDACMGTIASFLSKYQDIIIEHQKVVKGNQKRLESLRELAGKENLEYPSVTLPPQPHTKEGVDAYNEVIARVRMWVNLNLWQKLKLSRDDAKPLLRLKKFPSFPLVERQANEVDWWDMVCNVKKLINEKKEDGKVFWQNLAGYKRQEALRPYLSSEEDRKKGKKFARYQLGDLLLHLEKKHGEDWGKVYDEAWERIDKKVEGLSKHIKLEEERRSEDAQSKAALTDWLRAKASFVIEGLKEADKDEFCRCELKLQKWYGDLRGKPFAIEAENSILDISGFSKQYNCAFIWQKDGVKKLNLYLIINYFKGGKLRFKKIKPEAFEANRFYTVINKKSGEIVPMEVNFNFDDPNLIILPLAFGKRQGREFIWNDLLSLETGSLKLANGRVIEKTLYNRRTRQDEPALFVALTFERREVLDSSNIKPMNLIGVDRGENIPAVIALTDPEGCPLSRFKDSLGNPTHILRIGESYKEKQRTIQAKKEVEQRRAGGYSRKYASKAKNLADDMVRNTARDLLYYAVTQDAMLIFENLSRGFGRQGKRTFMAERQYTRMEDWLTAKLAYEGLPSKTYLSKTLAQYTSKTCSNCGFTITSADYDRVLEKLKKTATGWMTTINGKELKVEGQITYYNRYKRQNVVKDLSVELDRLSEESVNNDISSWTKGRSGEALSLLKKRFSHRPVQEKFVCLNCGFETHADEQAALNIARSWLFLRSQEYKKYQTNKTTGNTDKRAFVETWQSFYRKKLKEVWKPAV

SEQ ID NO: 33743 - protein, 978 aa, synthetic construct
  REGION 1..978: note = engineered CasX variant
QEIKRINKIRRRLVKDSNTKKAGKTGPMKTLLVPVMTPDLRERLENLRKKPENIPQPISNTSRANLNKLLTDYTEMKKAILHVYWEEFQKDPVGLMSRVAQPASKKIDQNKLKPEMDEKGNLTTAGFACSQCGQPLFVYKLEQVSEKGKAYTNYFGRCNVAEHEKLILLAQLKPEKDSDEAVTYSLGKFGQRALDFYSIHVTKESTHPVKPLAQIAGNRYASAPVGKALSDACMGTIASFLSKYQDIIIEHQKVVKGNQKRLESLRELAGKENLEYPSVTLPPQPHTKEGVDAYNEVIARVRMWVNLNLWQKLKLSRDDAKPLLRLKKFPSFPLVERQANEVDWWDMVCNVKKLINEKKEDGKVFWQNLAGYKRQEALRPYLSSEEDRKKGKKFARYQLGDLLLHLEKKHGEDWGKVYDEAWERIDKKVEGLSKHIKLEEERRSEDAQSKAALTDWLRAKASFVIEGLKEADKDEFCRCELKLQKWYGDLRGKPFAIEAENSILDISGFSKQYNCAFIWQKDGVKKLNLYLIINYFKGGKLRFKKIKPEAFEANRFYTVINKKSGEIVPMEVNFNFDDPNLIILPLAFGKRQGREFIWNDLLSLETGSLKLANGRVIEKTLYNRRTRQDEPALFVALTFERREVLDSSNIKPMNLIGVDRGENIPAVIALTDPEGCPLSRFKDSLGNPTHILRIGESYKEKQRTIQAKKEVEQRRAGGYSRKYASKAKNLADDMVRNTARDLLYYAVTQDAMLIFENLSRGFGRQGKRTFMAERQYTRMEDWLTAKLAYEGLPSKTYLSKTLAQYTSKTCSNCGFTITSADYDRVLEKLKKTATGWMTTINGKELKVEGQITYYNRYKRQNVVKDLSVELDRLSEESVNNDISSWTKGRSGEALSLLKKRFSHRPVQEKFVCLNCGFETHADEQAALNIARSWLFLRSQEYKKYQTNKTTGNTDKRAFVETWQSFYRKKLKEVWKPAV

SEQ ID NO: 33744 - protein, 978 aa, synthetic construct
  REGION 1..978: note = engineered CasX variant
QEIKRINKIRRRLVKDSNTKKAGKTGPMKTLLVPVMTPDLRERLENLRKKPENIPQPISNTSRANLNKLLTDYTEMKKAILHVYWEEFQKDPVGLMSRVAQPASKKIDQNKLKPEMDEKGNLTTAGFACSQCGQPLFVYKLEQVSEKGKAYTNYFGRCNVAEHEKLILLAQLKPEKDSDEAVTYSLGKFGQRALDFYSIHVTKESTHPVKPLAQIAGNRYASVPVGKALSDACMGTIASFLSKYQDIIIEHQKVVKGNQKRLESLRELAGKENLEYPSVTLPPQPHTKEGVDAYNEVIARVRMWVNLNLWQKLKLSRDDAKPLLRLKKFPSFPLVERQANEVDWWDMVCNVKKLINEKKEDGKVFWQNLAGYKRQEALRPYLSSEEDRKKGKKFARYQLGDLLLHLEKKHGEDWGKVYDEAWERIDKKVEGLSKHIKLEEERRSEDAQSKAALTDWLRAKASFVIEGLKEADKDEFCRCELKLQKWYGDLRGKPFAIEAENSILDISGFSKQYNCAFIWQKDGVKKLNLYLIINYFKGGKLRFKKIKPEAFEANRFYTVINKKSGEIVPMEVNFNFDDPNLIILPLAFGKRQGREFIWNDLLSLETGSLKLANGRVIEKTLYNRRTRQDEPALFVALTFERREVLDSSNIKPMNLIGVDRGENIPAVIALTDPEGCPLSRFKDSLGNPTHILRIGESYKEKQRTIQAKKEVEQRRAGGYSRKYASKAKNLADDMVRNTARDLLYYAVTQDAMLIFENLSRGFGRQGKRTFMAERQYTRMEDWLTAKLAYEGLPSKTYLSKTLAQYTSKTCSNCGFTITSADYDRVLEKLKKTATGWMTTINGKELKVEGQITYYNRYKRQNVVKDLSVELDRLSEESVNNDISSWTKGRSGEALSLLKKRFSHRPVQEKFVCLNCGFETHADEQAALNIARSWLFLRSQEYKKYQTNKTTGNTDKRAFVETWQSFYRKKLKEVWKPAV

SEQ ID NO: 33745 - protein, 978 aa, synthetic construct
  REGION 1..978: note = engineered CasX variant
QEIKRINKIRRRLVKDSNTKKAGKTGPMKTLLVPVMTPDLRERLENLRKKPENIPQPISNTSRANLNKLLTDYTEMKKAILHVYWEEFQKDPVGLMSRVAQPASKKIDQNKLKPEMDEKGNLTTAGFACSQCGQPLFVYKLEQVSEKGKAYTNYFGRCNVAEHEKLIKLAQLKPEKDSDEAVTYSLGKFGQRALDFYSIHVTKESTHPVKPLAQIAGNRYASGPVGKALSDACMGTIASFLSKYQDIIIEHQKVVKGNQKRLESLRELAGKENLEYPSVTLPPQPHTKEGVDAYNEVIARVRMWVNLNLWQKLKLSRDDAKPLLRLKKFPSFPLVERQANEVDWWDMVCNVKKLINEKKEDGKVFWQNLAGYKRQEALRPYLSSEEDRKKGKKFARYQLGDLLLHLEKKHGEDWGKVYDEAWERIDKKVEGLSKHIKLEEERRSEDAQSKAALTDWLRAKASFVIEGLKEADKDEFCRCELKLQKWYGDLRGKPFAIEAENSILDISGFSKQYNCAFIWQKDGVKKLNLYLIINYFKGGKLRFKKIKPEAFEANRFYTVINKKSGEIVPMEVNFNFDDPNLIILPLAFGKRQGREFIWNDLLSLETGSLKLANGRVIEKTLYNRRTRQDEPALFVALTFERREVLDSSNIKPMNLIGVDRGENIPAVIALTDPEGCPLSRFKDSLGNPTHILRIGESYKEKQRTIQAKKEVEQRRAGGYSRKYASKAKNLADDMVRNTARDLLYYAVTQDAMLIFENLSRGFGRQGKRTFMAERQYTRMEDWLTAKLAYEGLPSKTYLSKTLAQYTSKTCSNCGFTITSADYDRVLEKLKKTATGWMTTINGKELKVEGQITYYNRYKRQNVVKDLSVELDRLSEESVNNDISSWTKGRSGEALSLLKKRFSHRPVQEKFVCLNCGFETHADEQAALNIARSWLFLRSQEYKKYQTNKTTGNTDKRAFVETWQSFYRKKLKEVWKPAV

SEQ ID NO: 33746 - protein, 977 aa, synthetic construct
  REGION 1..977: note = engineered CasX variant
QEIKRINKIRRRLVKDSNTKKAGKTGPMKTLLVPVMTPDLRERLENLRKKPENIPQPISNTSRANLNKLLTDYTEMKKAILHVYWEEFQKDPVGLMSRVAQPASKKIDQNKLKPEMDEKGNLTTAGFACSQCGQPLFVYKLEQVSEKGKAYTNYFGRCNVAEHEKLILLAQLKPEKDSDEAVTYSLGKFGQRALDFYSIHVTKESTHPVKPLAQIAGNRYASPVGKALSDACMGTIASFLSKYQDIIIEHQKVVKGNQKRLESLRELAGKENLEYPSVTLPPQPHTKEGVDAYNEVIARVRMWVNLNLWQKLKLSRDDAKPLLRLKKFPSFPLVERQANEVDWWDMVCNVKKLINEKKEDGKVFWQNLAGYKRQEALRPYLSSEEDRKKGKKFARYQLGDLLLHLEKKHGEDWGKVYDEAWERIDKKVEGLSKHIKLEEERRSEDAQSKAALTDWLRAKASFVIEGLKEADKDEFCRCELKLQKWYGDLRGKPFAIEAENSILDISGFSKQYNCAFIWQKDGVKKLNLYLIINYFKGGKLRFKKIKPEAFEANRFYTVINKKSGEIVPMEVNFNFDDPNLIILPLAFGKRQGREFIWNDLLSLETGSLKLANGRVIEKTLYNRRTRQDEPALFVALTFERREVLDSSNIKPMNLIGVDRGENIPAVIALTDPEGCPLSRFKDSLGNPTHILRIGESYKEKQRTIQAKKEVEQRRAGGYSRKYASKAKNLADDMVRNTARDLLYYAVTQDAMLIFENLSRGFGRQGKRTFMAERQYTRMEDWLTAKLAYEGLPSKTYLSKTLAQYTSKTCSNCGFTITSADYDRVLEKLKKTATGWMTTINGKELKVEGQITYYNRYKRQNVVKDLSVELDRLSEESVNNDISSWTKGRSGEALSLLKKRFSHRPVQEKFVCLNCGFETHADEQAALNIARSWLFLRSQEYKKYQTNKTTGNTDKRAFVETWQSFYRKKLKEVWKPAV

SEQ ID NO: 33747 - protein, 978 aa, synthetic construct
  REGION 1..978: note = engineered CasX variant
QEIKRINKIRRRLVKDSNTKKAGKTGPMKTLLVPVMTPDLRERLENLRKKPENIPQPISNTSRANLNKLLTDYTEMKKAILHVYWEEFQKDPVGLMSRVAQPASKKIDQNKLKPEMDEKGNLTTAGFACSQCGQPLFVYKLEQVSEKGKAYTNYFGRCNVAEHEKLILLAQLKPEKDSDEAVTYSLGKFGQRALDFYSIHVTKESTHPVKPLAQIAGNRYASYPVGKALSDACMGTIASFLSKYQDIIIEHQKVVKGNQKRLESLRELAGKENLEYPSVTLPPQPHTKEGVDAYNEVIARVRMWVNLNLWQKLKLSRDDAKPLLRLKGFPSFPLVERQANEVDWWDMVCNVKKLINEKKEDGKVFWQNLAGYKRQEALRPYLSSEEDRKKGKKFARYQLGDLLLHLEKKHGEDWGKVYDEAWERIDKKVEGLSKHIKLEEERRSEDAQSKAALTDWLRAKASFVIEGLKEADKDEFCRCELKLQKWYGDLRGKPFAIEAENSILDISGFSKQYNCAFIWQKDGVKKLNLYLIINYFKGGKLRFKKIKPEAFEANRFYTVINKKSGEIVPMEVNFNFDDPNLIILPLAFGKRQGREFIWNDLLSLETGSLKLANGRVIEKTLYNRRTRQDEPALFVALTFERREVLDSSNIKPMNLIGVDRGENIPAVIALTDPEGCPLSRFKDSLGNPTHILRIGERYKEKQRTIQAKKEVEQRRAGGYSRKYASKAKNLADDMVRNTARDLLYYAVTQDAMLIFENLSRGFGRQGKRTFMAERQYTRMEDWLTAKLAYEGLPSKTYLSKTLAQYTSKTCSNCGFTITSADYDRVLEKLKKTATGWMTTINGKELKVEGQITYYNRYKRQNVVKDLSVELDRLSEESVNNDISSWTKGRSGEALSLLKKRFSHRPVQEKFVCLNCGFETHADEQAALNIARSWLFLRSQEYKKYQTNKTTGNTDKRAFVETWQSFYRKKLKEVWKPAV

SEQ ID NO: 33748 - protein, 978 aa, synthetic construct
  REGION 1..978: note = engineered CasX variant
QEIKRINKIRRRLVKDSNTKKAGKTGPMKTLLVPVMTPDLRERLENLRKKPENIPQPISNTSRANLNKLLTDYTEMKKAILHVYWEEFQKDPVGLMSRVAQPASKKIDQNKLKPEMDEKGNLTTAGFACSQCGQPLFVYKLEQVSEKGKAYTNYFGRCNVAEHEKLILLAQLKPEKDSDEAVTYSLGKFGQRALDFYSIHVTKESTHPVKPLAQIAGNRYASHPVGKALSDACMGTIASFLSKYQDIIIEHQKVVKGNQKRLESLRELAGKENLEYPSVTLPPQPHTKEGVDAYNEVIARVRMWVNLNLWQKLKLSRDDAKPLLRLKGFPSFPLVERQANEVDWWDMVCNVKKLINEKKEDGKVFWQNLAGYKRQEALRPYLSSEEDRKKGKKFARYQLGDLLLHLEKKHGEDWGKVYDEAWERIDKKVEGLSKHIKLEEERRSEDAQSKAALTDWLRAKASFVIEGLKEADKDEFCRCELKLQKWYGDLRGKPFAIEAENSILDISGFSKQYNCAFIWQKDGVKKLNLYLIINYFKGGKLRFKKIKPEAFEANRFYTVINKKSGEIVPMEVNFNFDDPNLIILPLAFGKRQGREFIWNDLLSLETGSLKLANGRVIEKTLYNRRTRQDEPALFVALTFERREVLDSSNIKPMNLIGVDRGENIPAVIALTDPEGCPLSRFKDSLGNPTHILRIGERYKEKQRTIQAKKEVEQRRAGGYSRKYASKAKNLADDMVRNTARDLLYYAVTQDAMLIFENLSRGFGRQGKRTFMAERQYTRMEDWLTAKLAYEGLPSKTYLSKTLAQYTSKTCSNCGFTITSADYDRVLEKLKKTATGWMTTINGKELKVEGQITYYNRYKRQNVVKDLSVELDRLSEESVNNDISSWTKGRSGEALSLLKKRFSHRPVQEKFVCLNCGFETHADEQAALNIARSWLFLRSQEYKKYQTNKTTGNTDKRAFVETWQSFYRKKLKEVWKPAV

SEQ ID NO: 33749 - protein, 978 aa, synthetic construct
  REGION 1..978: note = engineered CasX variant
QEIKRINKIRRRLVKDSNTKKAGKTGPMKTLLVPVMTPDLRERLENLRKKPENIPQPISNTSRANLNKLLTDYTEMKKAILHVYWEEFQKDPVGLMSRVAQPASKKIDQNKLKPEMDEKGNLTTAGFACSQCGQPLFVYKLEQVSEKGKAYTNYFGRCNVAEHEKLILLAQLKPEKDSDEAVTYSLGKFGQRALDFYSIHVTKESTHPVKPLAQIAGNRYASSPVGKALSDACMGTIASFLSKYQDIIIEHQKVVKGNQKRLESLRELAGKENLEYPSVTLPPQPHTKEGVDAYNEVIARVRMWVNLNLWQKLKLSRDDAKPLLRLKGFPSFPLVERQANEVDWWDMVCNVKKLINEKKEDGKVFWQNLAGYKRQEALRPYLSSEEDRKKGKKFARYQLGDLLLHLEKKHGEDWGKVYDEAWERIDKKVEGLSKHIKLEEERRSEDAQSKAALTDWLRAKASFVIEGLKEADKDEFCRCELKLQKWYGDLRGKPFAIEAENSILDISGFSKQYNCAFIWQKDGVKKLNLYLIINYFKGGKLRFKKIKPEAFEANRFYTVINKKSGEIVPMEVNFNFDDPNLIILPLAFGKRQGREFIWNDLLSLETGSLKLANGRVIEKTLYNRRTRQDEPALFVALTFERREVLDSSNIKPMNLIGVDRGENIPAVIALTDPEGCPLSRFKDSLGNPTHILRIGERYKEKQRTIQAKKEVEQRRAGGYSRKYASKAKNLADDMVRNTARDLLYYAVTQDAMLIFENLSRGFGRQGKRTFMAERQYTRMEDWLTAKLAYEGLPSKTYLSKTLAQYTSKTCSNCGFTITSADYDRVLEKLKKTATGWMTTINGKELKVEGQITYYNRYKRQNVVKDLSVELDRLSEESVNNDISSWTKGRSGEALSLLKKRFSHRPVQEKFVCLNCGFETHADEQAALNIARSWLFLRSQEYKKYQTNKTTGNTDKRAFVETWQSFYRKKLKEVWKPAV

SEQ ID NO: 33750 - protein, 978 aa, synthetic construct
  REGION 1..978: note = engineered CasX variant
QEIKRINKIRRRLVKDSNTKKAGKTGPMKTLLVPVMTPDLRERLENLRKKPENIPQPISNTSRANLNKLLTDYTEMKKAILHVYWEEFQKDPVGLMSRVAQPASKKIDQNKLKPEMDEKGNLTTAGFACSQCGQPLFVYKLEQVSEKGKAYTNYFGRCNVAEHEKLILLAQLKPEKDSDEAVTYSLGKFGQRALDFYSIHVTKESTHPVKPLAQIAGNRYASTPVGKALSDACMGTIASFLSKYQDIIIEHQKVVKGNQKRLESLRELAGKENLEYPSVTLPPQPHTKEGVDAYNEVIARVRMWVNLNLWQKLKLSRDDAKPLLRLKGFPSFPLVERQANEVDWWDMVCNVKKLINEKKEDGKVFWQNLAGYKRQEALRPYLSSEEDRKKGKKFARYQLGDLLLHLEKKHGEDWGKVYDEAWERIDKKVEGLSKHIKLEEERRSEDAQSKAALTDWLRAKASFVIEGLKEADKDEFCRCELKLQKWYGDLRGKPFAIEAENSILDISGFSKQYNCAFIWQKDGVKKLNLYLIINYFKGGKLRFKKIKPEAFEANRFYTVINKKSGEIVPMEVNFNFDDPNLIILPLAFGKRQGREFIWNDLLSLETGSLKLANGRVIEKTLYNRRTRQDEPALFVALTFERREVLDSSNIKPMNLIGVDRGENIPAVIALTDPEGCPLSRFKDSLGNPTHILRIGERYKEKQRTIQAKKEVEQRRAGGYSRKYASKAKNLADDMVRNTARDLLYYAVTQDAMLIFENLSRGFGRQGKRTFMAERQYTRMEDWLTAKLAYEGLPSKTYLSKTLAQYTSKTCSNCGFTITSADYDRVLEKLKKTATGWMTTINGKELKVEGQITYYNRYKRQNVVKDLSVELDRLSEESVNNDISSWTKGRSGEALSLLKKRFSHRPVQEKFVCLNCGFETHADEQAALNIARSWLFLRSQEYKKYQTNKTTGNTDKRAFVETWQSFYRKKLKEVWKPAV

SEQ ID NO: 33751 - protein, 978 aa, synthetic construct
  REGION 1..978: note = engineered CasX variant
QEIKRINKIRRRLVKDSNTKKAGKTGPMKTLLVPVMTPDLRERLENLRKKPENIPQPISNTSRANLNKLLTDYTEMKKAILHVYWEEFQKDPVGLMSRVAQPASKKIDQNKLKPEMDEKGNLTTAGFACSQCGQPLFVYKLEQVSEKGKAYTNYFGRCNVAEHEKLILLAQLKPEKDSDEAVTYSLGKFGQRALDFYSIHVTKESTHPVKPLAQIAGNRYASAPVGKALSDACMGTIASFLSKYQDIIIEHQKVVKGNQKRLESLRELAGKENLEYPSVTLPPQPHTKEGVDAYNEVIARVRMWVNLNLWQKLKLSRDDAKPLLRLKGFPSFPLVERQANEVDWWDMVCNVKKLINEKKEDGKVFWQNLAGYKRQEALRPYLSSEEDRKKGKKFARYQLGDLLLHLEKKHGEDWGKVYDEAWERIDKKVEGLSKHIKLEEERRSEDAQSKAALTDWLRAKASFVIEGLKEADKDEFCRCELKLQKWYGDLRGKPFAIEAENSILDISGFSKQYNCAFIWQKDGVKKLNLYLIINYFKGGKLRFKKIKPEAFEANRFYTVINKKSGEIVPMEVNFNFDDPNLIILPLAFGKRQGREFIWNDLLSLETGSLKLANGRVIEKTLYNRRTRQDEPALFVALTFERREVLDSSNIKPMNLIGVDRGENIPAVIALTDPEGCPLSRFKDSLGNPTHILRIGERYKEKQRTIQAKKEVEQRRAGGYSRKYASKAKNLADDMVRNTARDLLYYAVTQDAMLIFENLSRGFGRQGKRTFMAERQYTRMEDWLTAKLAYEGLPSKTYLSKTLAQYTSKTCSNCGFTITSADYDRVLEKLKKTATGWMTTINGKELKVEGQITYYNRYKRQNVVKDLSVELDRLSEESVNNDISSWTKGRSGEALSLLKKRFSHRPVQEKFVCLNCGFETHADEQAALNIARSWLFLRSQEYKKYQTNKTTGNTDKRAFVETWQSFYRKKLKEVWKPAV

SEQ ID NO: 33752 - protein, 978 aa, synthetic construct
  REGION 1..978: note = engineered CasX variant
QEIKRINKIRRRLVKDSNTKKAGKTGPMKTLLVPVMTPDLRERLENLRKKPENIPQPISNTSRANLNKLLTDYTEMKKAILHVYWEEFQKDPVGLMSRVAQPASKKIDQNKLKPEMDEKGNLTTAGFACSQCGQPLFVYKLEQVSEKGKAYTNYFGRCNVAEHEKLILLAQLKPEKDSDEAVTYSLGKFGQRALDFYSIHVTKESTHPVKPLAQIAGNRYASVPVGKALSDACMGTIASFLSKYQDIIIEHQKVVKGNQKRLESLRELAGKENLEYPSVTLPPQPHTKEGVDAYNEVIARVRMWVNLNLWQKLKLSRDDAKPLLRLKGFPSFPLVERQANEVDWWDMVCNVKKLINEKKEDGKVFWQNLAGYKRQEALRPYLSSEEDRKKGKKFARYQLGDLLLHLEKKHGEDWGKVYDEAWERIDKKVEGLSKHIKLEEERRSEDAQSKAALTDWLRAKASFVIEGLKEADKDEFCRCELKLQKWYGDLRGKPFAIEAENSILDISGFSKQYNCAFIWQKDGVKKLNLYLIINYFKGGKLRFKKIKPEAFEANRFYTVINKKSGEIVPMEVNFNFDDPNLIILPLAFGKRQGREFIWNDLLSLETGSLKLANGRVIEKTLYNRRTRQDEPALFVALTFERREVLDSSNIKPMNLIGVDRGENIPAVIALTDPEGCPLSRFKDSLGNPTHILRIGERYKEKQRTIQAKKEVEQRRAGGYSRKYASKAKNLADDMVRNTARDLLYYAVTQDAMLIFENLSRGFGRQGKRTFMAERQYTRMEDWLTAKLAYEGLPSKTYLSKTLAQYTSKTCSNCGFTITSADYDRVLEKLKKTATGWMTTINGKELKVEGQITYYNRYKRQNVVKDLSVELDRLSEESVNNDISSWTKGRSGEALSLLKKRFSHRPVQEKFVCLNCGFETHADEQAALNIARSWLFLRSQEYKKYQTNKTTGNTDKRAFVETWQSFYRKKLKEVWKPAV

SEQ ID NO: 33753 - protein, 978 aa, synthetic construct
  REGION 1..978: note = engineered CasX variant
QEIKRINKIRRRLVKDSNTKKAGKTGPMKTLLVPVMTPDLRERLENLRKKPENIPQPISNTSRANLNKLLTDYTEMKKAILHVYWEEFQKDPVGLMSRVAQPASKKIDQNKLKPEMDEKGNLTTAGFACSQCGQPLFVYKLEQVSEKGKAYTNYFGRCNVAEHEKLIKLAQLKPEKDSDEAVTYSLGKFGQRALDFYSIHVTKESTHPVKPLAQIAGNRYASGPVGKALSDACMGTIASFLSKYQDIIIEHQKVVKGNQKRLESLRELAGKENLEYPSVTLPPQPHTKEGVDAYNEVIARVRMWVNLNLWQKLKLSRDDAKPLLRLKGFPSFPLVERQANEVDWWDMVCNVKKLINEKKEDGKVFWQNLAGYKRQEALRPYLSSEEDRKKGKKFARYQLGDLLLHLEKKHGEDWGKVYDEAWERIDKKVEGLSKHIKLEEERRSEDAQSKAALTDWLRAKASFVIEGLKEADKDEFCRCELKLQKWYGDLRGKPFAIEAENSILDISGFSKQYNCAFIWQKDGVKKLNLYLIINYFKGGKLRFKKIKPEAFEANRFYTVINKKSGEIVPMEVNFNFDDPNLIILPLAFGKRQGREFIWNDLLSLETGSLKLANGRVIEKTLYNRRTRQDEPALFVALTFERREVLDSSNIKPMNLIGVDRGENIPAVIALTDPEGCPLSRFKDSLGNPTHILRIGERYKEKQRTIQAKKEVEQRRAGGYSRKYASKAKNLADDMVRNTARDLLYYAVTQDAMLIFENLSRGFGRQGKRTFMAERQYTRMEDWLTAKLAYEGLPSKTYLSKTLAQYTSKTCSNCGFTITSADYDRVLEKLKKTATGWMTTINGKELKVEGQITYYNRYKRQNVVKDLSVELDRLSEESVNNDISSWTKGRSGEALSLLKKRFSHRPVQEKFVCLNCGFETHADEQAALNIARSWLFLRSQEYKKYQTNKTTGNTDKRAFVETWQSFYRKKLKEVWKPAV

SEQ ID NO: 33754 - protein, 977 aa, synthetic construct
  REGION 1..977: note = engineered CasX variant
QEIKRINKIRRRLVKDSNTKKAGKTGPMKTLLVPVMTPDLRERLENLRKKPENIPQPISNTSRANLNKLLTDYTEMKKAILHVYWEEFQKDPVGLMSRVAQPASKKIDQNKLKPEMDEKGNLTTAGFACSQCGQPLFVYKLEQVSEKGKAYTNYFGRCNVAEHEKLILLAQLKPEKDSDEAVTYSLGKFGQRALDFYSIHVTKESTHPVKPLAQIAGNRYASPVGKALSDACMGTIASFLSKYQDIIIEHQKVVKGNQKRLESLRELAGKENLEYPSVTLPPQPHTKEGVDAYNEVIARVRMWVNLNLWQKLKLSRDDAKPLLRLKGFPSFPLVERQANEVDWWDMVCNVKKLINEKKEDGKVFWQNLAGYKRQEALRPYLSSEEDRKKGKKFARYQLGDLLLHLEKKHGEDWGKVYDEAWERIDKKVEGLSKHIKLEEERRSEDAQSKAALTDWLRAKASFVIEGLKEADKDEFCRCELKLQKWYGDLRGKPFAIEAENSILDISGFSKQYNCAFIWQKDGVKKLNLYLIINYFKGGKLRFKKIKPEAFEANRFYTVINKKSGEIVPMEVNFNFDDPNLIILPLAFGKRQGREFIWNDLLSLETGSLKLANGRVIEKTLYNRRTRQDEPALFVALTFERREVLDSSNIKPMNLIGVDRGENIPAVIALTDPEGCPLSRFKDSLGNPTHILRIGERYKEKQRTIQAKKEVEQRRAGGYSRKYASKAKNLADDMVRNTARDLLYYAVTQDAMLIFENLSRGFGRQGKRTFMAERQYTRMEDWLTAKLAYEGLPSKTYLSKTLAQYTSKTCSNCGFTITSADYDRVLEKLKKTATGWMTTINGKELKVEGQITYYNRYKRQNVVKDLSVELDRLSEESVNNDISSWTKGRSGEALSLLKKRFSHRPVQEKFVCLNCGFETHADEQAALNIARSWLFLRSQEYKKYQTNKTTGNTDKRAFVETWQSFYRKKLKEVWKPAV

SEQ ID NO: 33755 - protein, 978 aa, synthetic construct
  REGION 1..978: note = engineered CasX variant
QEIKRINKIRRRLVKDSNTKKAGKTGPMKTLLVPVMTPDLRERLENLRKKPENIPQPISNTSRANLNKLLTDYTEMKKAILHVYWEEFQKDPVGLMSRVAQPASKKIDQNKLKPEMDEKGNLTTAGFACSQCGQPLFVYKLEQVSEKGKAYTNYFGRCNVAEHEKLILLAQLKPEKDSDEAVTYSLGKFGQRALDFYSIHVTKESTHPVKPLAQIAGNRYASYPVGKALSDACMGTIASFLSKYQDIIIEHQKVVKGNQKRLESLRELAGKENLEYPSVTLPPQPHTKEGVDAYNEVIARVRMWVNLNLWQKLKLSRDDAKPLLRLKGFPSFPLVERQANEVDWWDMVCNVKKLINEKKEDGKVFWQNLAGYKRQEALRPYLSSEEDRKKGKKFARYQLGDLLLHLEKKHGEDWGKVYDEAWERIDKKVEGLSKHIKLEEERRSEDAQSKAALTDWLRAKASFVIEGLKEADKDEFCRCELKLQKWYGDLRGKPFAIEAENSILDISGFSKQYNCAFIWQKDGVKKLNLYLIINYFKGGKLRFKKIKPEAFEANRFYTVINKKSGEIVPMEVNFNFDDPNLIILPLAFGKRQGREFIWNDLLSLETGSLQLANGRVIEKTLYNRRTRQDEPALFVALTFERREVLDSSNIKPMNLIGVDRGENIPAVIALTDPEGCPLSRFKDSLGNPTHILRIGESYKEKQRTIQAKKEVEQRRAGGYSRKYASKAKNLADDMVRNTARDLLYYAVTQDAMLIFENLSRGFGRQGKRTFMAERQYTRMEDWLTAKLAYEGLPSKTYLSKTLAQYTSKTCSNCGFTITSADYDRVLEKLKKTATGWMTTINGKELKVEGQITYYNRYKRQNVVKDLSVELDRLSEESVNNDISSWTKGRSGEALSLLKKRFSHRPVQEKFVCLNCGFETHADEQAALNIARSWLFLRSQEYKKYQTNKTTGNTDKRAFVETWQSFYRKKLKEVWKPAV

SEQ ID NO: 33756 - protein, 978 aa, synthetic construct
  REGION 1..978: note = engineered CasX variant
QEIKRINKIRRRLVKDSNTKKAGKTGPMKTLLVPVMTPDLRERLENLRKKPENIPQPISNTSRANLNKLLTDYTEMKKAILHVYWEEFQKDPVGLMSRVAQPASKKIDQNKLKPEMDEKGNLTTAGFACSQCGQPLFVYKLEQVSEKGKAYTNYFGRCNVAEHEKLILLAQLKPEKDSDEAVTYSLGKFGQRALDFYSIHVTKESTHPVKPLAQIAGNRYASHPVGKALSDACMGTIASFLSKYQDIIIEHQKVVKGNQKRLESLRELAGKENLEYPSVTLPPQPHTKEGVDAYNEVIARVRMWVNLNLWQKLKLSRDDAKPLLRLKGFPSFPLVERQANEVDWWDMVCNVKKLINEKKEDGKVFWQNLAGYKRQEALRPYLSSEEDRKKGKKFARYQLGDLLLHLEKKHGEDWGKVYDEAWERIDKKVEGLSKHIKLEEERRSEDAQSKAALTDWLRAKASFVIEGLKEADKDEFCRCELKLQKWYGDLRGKPFAIEAENSILDISGFSKQYNCAFIWQKDGVKKLNLYLIINYFKGGKLRFKKIKPEAFEANRFYTVINKKSGEIVPMEVNFNFDDPNLIILPLAFGKRQGREFIWNDLLSLETGSLQLANGRVIEKTLYNRRTRQDEPALFVALTFERREVLDSSNIKPMNLIGVDRGENIPAVIALTDPEGCPLSRFKDSLGNPTHILRIGESYKEKQRTIQAKKEVEQRRAGGYSRKYASKAKNLADDMVRNTARDLLYYAVTQDAMLIFENLSRGFGRQGKRTFMAERQYTRMEDWLTAKLAYEGLPSKTYLSKTLAQYTSKTCSNCGFTITSADYDRVLEKLKKTATGWMTTINGKELKVEGQITYYNRYKRQNVVKDLSVELDRLSEESVNNDISSWTKGRSGEALSLLKKRFSHRPVQEKFVCLNCGFETHADEQAALNIARSWLFLRSQEYKKYQTNKTTGNTDKRAFVETWQSFYRKKLKEVWKPAV

SEQ ID NO: 33757 - protein, 978 aa, synthetic construct
  REGION 1..978: note = engineered CasX variant
QEIKRINKIRRRLVKDSNTKKAGKTGPMKTLLVPVMTPDLRERLENLRKKPENIPQPISNTSRANLNKLLTDYTEMKKAILHVYWEEFQKDPVGLMSRVAQPASKKIDQNKLKPEMDEKGNLTTAGFACSQCGQPLFVYKLEQVSEKGKAYTNYFGRCNVAEHEKLILLAQLKPEKDSDEAVTYSLGKFGQRALDFYSIHVTKESTHPVKPLAQIAGNRYASSPVGKALSDACMGTIASFLSKYQDIIIEHQKVVKGNQKRLESLRELAGKENLEYPSVTLPPQPHTKEGVDAYNEVIARVRMWVNLNLWQKLKLSRDDAKPLLRLKGFPSFPLVERQANEVDWWDMVCNVKKLINEKKEDGKVFWQNLAGYKRQEALRPYLSSEEDRKKGKKFARYQLGDLLLHLEKKHGEDWGKVYDEAWERIDKKVEGLSKHIKLEEERRSEDAQSKAALTDWLRAKASFVIEGLKEADKDEFCRCELKLQKWYGDLRGKPFAIEAENSILDISGFSKQYNCAFIWQKDGVKKLNLYLIINYFKGGKLRFKKIKPEAFEANRFYTVINKKSGEIVPMEVNFNFDDPNLIILPLAFGKRQGREFIWNDLLSLETGSLQLANGRVIEKTLYNRRTRQDEPALFVALTFERREVLDSSNIKPMNLIGVDRGENIPAVIALTDPEGCPLSRFKDSLGNPTHILRIGESYKEKQRTIQAKKEVEQRRAGGYSRKYASKAKNLADDMVRNTARDLLYYAVTQDAMLIFENLSRGFGRQGKRTFMAERQYTRMEDWLTAKLAYEGLPSKTYLSKTLAQYTSKTCSNCGFTITSADYDRVLEKLKKTATGWMTTINGKELKVEGQITYYNRYKRQNVVKDLSVELDRLSEESVNNDISSWTKGRSGEALSLLKKRFSHRPVQEKFVCLNCGFETHADEQAALNIARSWLFLRSQEYKKYQTNKTTGNTDKRAFVETWQSFYRKKLKEVWKPAV

SEQ ID NO: 33758 - protein, 978 aa, synthetic construct
  REGION 1..978: note = engineered CasX variant
QEIKRINKIRRRLVKDSNTKKAGKTGPMKTLLVPVMTPDLRERLENLRKKPENIPQPISNTSRANLNKLLTDYTEMKKAILHVYWEEFQKDPVGLMSRVAQPASKKIDQNKLKPEMDEKGNLTTAGFACSQCGQPLFVYKLEQVSEKGKAYTNYFGRCNVAEHEKLILLAQLKPEKDSDEAVTYSLGKFGQRALDFYSIHVTKESTHPVKPLAQIAGNRYASTPVGKALSDACMGTIASFLSKYQDIIIEHQKVVKGNQKRLESLRELAGKENLEYPSVTLPPQPHTKEGVDAYNEVIARVRMWVNLNLWQKLKLSRDDAKPLLRLKGFPSFPLVERQANEVDWWDMVCNVKKLINEKKEDGKVFWQNLAGYKRQEALRPYLSSEEDRKKGKKFARYQLGDLLLHLEKKHGEDWGKVYDEAWERIDKKVEGLSKHIKLEEERRSEDAQSKAALTDWLRAKASFVIEGLKEADKDEFCRCELKLQKWYGDLRGKPFAIEAENSILDISGFSKQYNCAFIWQKDGVKKLNLYLIINYFKGGKLRFKKIKPEAFEANRFYTVINKKSGEIVPMEVNFNFDDPNLIILPLAFGKRQGREFIWNDLLSLETGSLQLANGRVIEKTLYNRRTRQDEPALFVALTFERREVLDSSNIKPMNLIGVDRGENIPAVIALTDPEGCPLSRFKDSLGNPTHILRIGESYKEKQRTIQAKKEVEQRRAGGYSRKYASKAKNLADDMVRNTARDLLYYAVTQDAMLIFENLSRGFGRQGKRTFMAERQYTRMEDWLTAKLAYEGLPSKTYLSKTLAQYTSKTCSNCGFTITSADYDRVLEKLKKTATGWMTTINGKELKVEGQITYYNRYKRQNVVKDLSVELDRLSEESVNNDISSWTKGRSGEALSLLKKRFSHRPVQEKFVCLNCGFETHADEQAALNIARSWLFLRSQEYKKYQTNKTTGNTDKRAFVETWQSFYRKKLKEVWKPAV

SEQ ID NO: 33759 - protein, 978 aa, synthetic construct
  REGION 1..978: note = engineered CasX variant
QEIKRINKIRRRLVKDSNTKKAGKTGPMKTLLVPVMTPDLRERLENLRKKPENIPQPISNTSRANLNKLLTDYTEMKKAILHVYWEEFQKDPVGLMSRVAQPASKKIDQNKLKPEMDEKGNLTTAGFACSQCGQPLFVYKLEQVSEKGKAYTNYFGRCNVAEHEKLILLAQLKPEKDSDEAVTYSLGKFGQRALDFYSIHVTKESTHPVKPLAQIAGNRYASAPVGKALSDACMGTIASFLSKYQDIIIEHQKVVKGNQKRLESLRELAGKENLEYPSVTLPPQPHTKEGVDAYNEVIARVRMWVNLNLWQKLKLSRDDAKPLLRLKGFPSFPLVERQANEVDWWDMVCNVKKLINEKKEDGKVFWQNLAGYKRQEALRPYLSSEEDRKKGKKFARYQLGDLLLHLEKKHGEDWGKVYDEAWERIDKKVEGLSKHIKLEEERRSEDAQSKAALTDWLRAKASFVIEGLKEADKDEFCRCELKLQKWYGDLRGKPFAIEAENSILDISGFSKQYNCAFIWQKDGVKKLNLYLIINYFKGGKLRFKKIKPEAFEANRFYTVINKKSGEIVPMEVNFNFDDPNLIILPLAFGKRQGREFIWNDLLSLETGSLQLANGRVIEKTLYNRRTRQDEPALFVALTFERREVLDSSNIKPMNLIGVDRGENIPAVIALTDPEGCPLSRFKDSLGNPTHILRIGESYKEKQRTIQAKKEVEQRRAGGYSRKYASKAKNLADDMVRNTARDLLYYAVTQDAMLIFENLSRGFGRQGKRTFMAERQYTRMEDWLTAKLAYEGLPSKTYLSKTLAQYTSKTCSNCGFTITSADYDRVLEKLKKTATGWMTTINGKELKVEGQITYYNRYKRQNVVKDLSVELDRLSEESVNNDISSWTKGRSGEALSLLKKRFSHRPVQEKFVCLNCGFETHADEQAALNIARSWLFLRSQEYKKYQTNKTTGNTDKRAFVETWQSFYRKKLKEVWKPAV

SEQ ID NO: 33760 - protein, 978 aa, synthetic construct
  REGION 1..978: note = engineered CasX variant
QEIKRINKIRRRLVKDSNTKKAGKTGPMKTLLVPVMTPDLRERLENLRKKPENIPQPISNTSRANLNKLLTDYTEMKKAILHVYWEEFQKDPVGLMSRVAQPASKKIDQNKLKPEMDEKGNLTTAGFACSQCGQPLFVYKLEQVSEKGKAYTNYFGRCNVAEHEKLILLAQLKPEKDSDEAVTYSLGKFGQRALDFYSIHVTKESTHPVKPLAQIAGNRYASVPVGKALSDACMGTIASFLSKYQDIIIEHQKVVKGNQKRLESLRELAGKENLEYPSVTLPPQPHTKEGVDAYNEVIARVRMWVNLNLWQKLKLSRDDAKPLLRLKGFPSFPLVERQANEVDWWDMVCNVKKLINEKKEDGKVFWQNLAGYKRQEALRPYLSSEEDRKKGKKFARYQLGDLLLHLEKKHGEDWGKVYDEAWERIDKKVEGLSKHIKLEEERRSEDAQSKAALTDWLRAKASFVIEGLKEADKDEFCRCELKLQKWYGDLRGKPFAIEAENSILDISGFSKQYNCAFIWQKDGVKKLNLYLIINYFKGGKLRFKKIKPEAFEANRFYTVINKKSGEIVPMEVNFNFDDPNLIILPLAFGKRQGREFIWNDLLSLETGSLQLANGRVIEKTLYNRRTRQDEPALFVALTFERREVLDSSNIKPMNLIGVDRGENIPAVIALTDPEGCPLSRFKDSLGNPTHILRIGESYKEKQRTIQAKKEVEQRRAGGYSRKYASKAKNLADDMVRNTARDLLYYAVTQDAMLIFENLSRGFGRQGKRTFMAERQYTRMEDWLTAKLAYEGLPSKTYLSKTLAQYTSKTCSNCGFTITSADYDRVLEKLKKTATGWMTTINGKELKVEGQITYYNRYKRQNVVKDLSVELDRLSEESVNNDISSWTKGRSGEALSLLKKRFSHRPVQEKFVCLNCGFETHADEQAALNIARSWLFLRSQEYKKYQTNKTTGNTDKRAFVETWQSFYRKKLKEVWKPAV

SEQ ID NO: 33761 - protein, 978 aa, synthetic construct
  REGION 1..978: note = engineered CasX variant
QEIKRINKIRRRLVKDSNTKKAGKTGPMKTLLVPVMTPDLRERLENLRKKPENIPQPISNTSRANLNKLLTDYTEMKKAILHVYWEEFQKDPVGLMSRVAQPASKKIDQNKLKPEMDEKGNLTTAGFACSQCGQPLFVYKLEQVSEKGKAYTNYFGRCNVAEHEKLIKLAQLKPEKDSDEAVTYSLGKFGQRALDFYSIHVTKESTHPVKPLAQIAGNRYASGPVGKALSDACMGTIASFLSKYQDIIIEHQKVVKGNQKRLESLRELAGKENLEYPSVTLPPQPHTKEGVDAYNEVIARVRMWVNLNLWQKLKLSRDDAKPLLRLKGFPSFPLVERQANEVDWWDMVCNVKKLINEKKEDGKVFWQNLAGYKRQEALRPYLSSEEDRKKGKKFARYQLGDLLLHLEKKHGEDWGKVYDEAWERIDKKVEGLSKHIKLEEERRSEDAQSKAALTDWLRAKASFVIEGLKEADKDEFCRCELKLQKWYGDLRGKPFAIEAENSILDISGFSKQYNCAFIWQKDGVKKLNLYLIINYFKGGKLRFKKIKPEAFEANRFYTVINKKSGEIVPMEVNFNFDDPNLIILPLAFGKRQGREFIWNDLLSLETGSLQLANGRVIEKTLYNRRTRQDEPALFVALTFERREVLDSSNIKPMNLIGVDRGENIPAVIALTDPEGCPLSRFKDSLGNPTHILRIGESYKEKQRTIQAKKEVEQRRAGGYSRKYASKAKNLADDMVRNTARDLLYYAVTQDAMLIFENLSRGFGRQGKRTFMAERQYTRMEDWLTAKLAYEGLPSKTYLSKTLAQYTSKTCSNCGFTITSADYDRVLEKLKKTATGWMTTINGKELKVEGQITYYNRYKRQNVVKDLSVELDRLSEESVNNDISSWTKGRSGEALSLLKKRFSHRPVQEKFVCLNCGFETHADEQAALNIARSWLFLRSQEYKKYQTNKTTGNTDKRAFVETWQSFYRKKLKEVWKPAV

SEQ ID NO: 33762 - protein, 977 aa, synthetic construct
  REGION 1..977: note = engineered CasX variant
QEIKRINKIRRRLVKDSNTKKAGKTGPMKTLLVPVMTPDLRERLENLRKKPENIPQPISNTSRANLNKLLTDYTEMKKAILHVYWEEFQKDPVGLMSRVAQPASKKIDQNKLKPEMDEKGNLTTAGFACSQCGQPLFVYKLEQVSEKGKAYTNYFGRCNVAEHEKLILLAQLKPEKDSDEAVTYSLGKFGQRALDFYSIHVTKESTHPVKPLAQIAGNRYASPVGKALSDACMGTIASFLSKYQDIIIEHQKVVKGNQKRLESLRELAGKENLEYPSVTLPPQPHTKEGVDAYNEVIARVRMWVNLNLWQKLKLSRDDAKPLLRLKGFPSFPLVERQANEVDWWDMVCNVKKLINEKKEDGKVFWQNLAGYKRQEALRPYLSSEEDRKKGKKFARYQLGDLLLHLEKKHGEDWGKVYDEAWERIDKKVEGLSKHIKLEEERRSEDAQSKAALTDWLRAKASFVIEGLKEADKDEFCRCELKLQKWYGDLRGKPFAIEAENSILDISGFSKQYNCAFIWQKDGVKKLNLYLIINYFKGGKLRFKKIKPEAFEANRFYTVINKKSGEIVPMEVNFNFDDPNLIILPLAFGKRQGREFIWNDLLSLETGSLQLANGRVIEKTLYNRRTRQDEPALFVALTFERREVLDSSNIKPMNLIGVDRGENIPAVIALTDPEGCPLSRFKDSLGNPTHILRIGESYKEKQRTIQAKKEVEQRRAGGYSRKYASKAKNLADDMVRNTARDLLYYAVTQDAMLIFENLSRGFGRQGKRTFMAERQYTRMEDWLTAKLAYEGLPSKTYLSKTLAQYTSKTCSNCGFTITSADYDRVLEKLKKTATGWMTTINGKELKVEGQITYYNRYKRQNVVKDLSVELDRLSEESVNNDISSWTKGRSGEALSLLKKRFSHRPVQEKFVCLNCGFETHADEQAALNIARSWLFLRSQEYKKYQTNKTTGNTDKRAFVETWQSFYRKKLKEVWKPAV

SEQ ID NO: 33763 - protein, 978 aa, synthetic construct
  REGION 1..978: note = engineered CasX variant
QEIKRINKIRRRLVKDSNTKKAGKTGPMKTLLVRVMTPDLRERLENLRKKPPNIPQPISNTSQANLNKLLTDYTEMKKAILHVYWEEFQKDPVGLMSRVAQPASKKIDQNKLKPEMDEKGNLTTAGFACSQCGQPLFVYKLEQVSEKGKAYTNYFGRCNVAEHEKLILLAQLKPEKDSDEAVTYSLGKFGQRALDFYSIHVTKESTHPVKPLAQIAGNRYASYPVGKALSDACMGTIASFLSKYQDIIIEHQKVVKGNQKRLESLRELAGKENLEYPSVTLPPQPHTKEGVDAYNEVIARVRMWVNLNLWQKLKLSRDDAKPLLRLKGFPSFPLVERQANEVDWWDMVCNVKKLINEKKEDGKVFWQNLAGYKRQEALRPYLSSEEDRKKGKKFARYQLGDLLLHLEKKHGEDWGKVYDEAWERIDKKVEGLSKHIKLEEERRSEDAQSKAALTDWLRAKASFVIEGLKEADKDEFCRCELKLQKWYGDLRGKPFAIEAENSILDISGFSKQYNCAFIWQKDGVKKLNLYLIINYFKGGKLRFKKIKPEAFEANRFYTVINKKSGEIVPMEVNFNFDDPNLIILPLAFGKRQGREFIWNDLLSLETGSLKLANGRVIEKTLYNRRTRQDEPALFVALTFERREVLDSSNIKPMNLIGVDRGENIPAVIALTDPEGCPLSRFKDSLGNPTHILRIGESYKEKQRTIQAKKEVEQRRAGGYSRKYASKAKNLADDMVRNTARDLLYYAVTQDAMLIFENLSRGFGRQGKRTFMAERQYTRMEDWLTAKLAYEGLPSKTYLSKTLAQYTSKTCSNCGFTITSADYDRVLEKLKKTATGWMTTINGKELKVEGQITYYNRYKRQNVVKDLSVELDRLSEESVNNDISSWTKGRSGEALSLLKKRFSHRPVQEKFVCLNCGFETHADEQAALNIARSWLFLRSQEYKKYQTNKTTGNTDKRAFVETWQSFYRKKLKEVWKPAV

SEQ ID NO: 33764 - protein, 978 aa, synthetic construct
  REGION 1..978: note = engineered CasX variant
QEIKRINKIRRRLVKDSNTKKAGKTGPMKTLLVRVMTPDLRERLENLRKKPPNIPQPISNTSQANLNKLLTDYTEMKKAILHVYWEEFQKDPVGLMSRVAQPASKKIDQNKLKPEMDEKGNLTTAGFACSQCGQPLFVYKLEQVSEKGKAYTNYFGRCNVAEHEKLILLAQLKPEKDSDEAVTYSLGKFGQRALDFYSIHVTKESTHPVKPLAQIAGNRYASHPVGKALSDACMGTIASFLSKYQDIIIEHQKVVKGNQKRLESLRELAGKENLEYPSVTLPPQPHTKEGVDAYNEVIARVRMWVNLNLWQKLKLSRDDAKPLLRLKGFPSFPLVERQANEVDWWDMVCNVKKLINEKKEDGKVFWQNLAGYKRQEALRPYLSSEEDRKKGKKFARYQLGDLLLHLEKKHGEDWGKVYDEAWERIDKKVEGLSKHIKLEEERRSEDAQSKAALTDWLRAKASFVIEGLKEADKDEFCRCELKLQKWYGDLRGKPFAIEAENSILDISGFSKQYNCAFIWQKDGVKKLNLYLIINYFKGGKLRFKKIKPEAFEANRFYTVINKKSGEIVPMEVNFNFDDPNLIILPLAFGKRQGREFIWNDLLSLETGSLKLANGRVIEKTLYNRRTRQDEPALFVALTFERREVLDSSNIKPMNLIGVDRGENIPAVIALTDPEGCPLSRFKDSLGNPTHILRIGESYKEKQRTIQAKKEVEQRRAGGYSRKYASKAKNLADDMVRNTARDLLYYAVTQDAMLIFENLSRGFGRQGKRTFMAERQYTRMEDWLTAKLAYEGLPSKTYLSKTLAQYTSKTCSNCGFTITSADYDRVLEKLKKTATGWMTTINGKELKVEGQITYYNRYKRQNVVKDLSVELDRLSEESVNNDISSWTKGRSGEALSLLKKRFSHRPVQEKFVCLNCGFETHADEQAALNIARSWLFLRSQEYKKYQTNKTTGNTDKRAFVETWQSFYRKKLKEVWKPAV

SEQ ID NO: 33765 - protein, 978 aa, synthetic construct
  REGION 1..978: note = engineered CasX variant
QEIKRINKIRRRLVKDSNTKKAGKTGPMKTLLVRVMTPDLRERLENLRKKPPNIPQPISNTSQANLNKLLTDYTEMKKAILHVYWEEFQKDPVGLMSRVAQPASKKIDQNKLKPEMDEKGNLTTAGFACSQCGQPLFVYKLEQVSEKGKAYTNYFGRCNVAEHEKLILLAQLKPEKDSDEAVTYSLGKFGQRALDFYSIHVTKESTHPVKPLAQIAGNRYASSPVGKALSDACMGTIASFLSKYQDIIIEHQKVVKGNQKRLESLRELAGKENLEYPSVTLPPQPHTKEGVDAYNEVIARVRMWVNLNLWQKLKLSRDDAKPLLRLKGFPSFPLVERQANEVDWWDMVCNVKKLINEKKEDGKVFWQNLAGYKRQEALRPYLSSEEDRKKGKKFARYQLGDLLLHLEKKHGEDWGKVYDEAWERIDKKVEGLSKHIKLEEERRSEDAQSKAALTDWLRAKASFVIEGLKEADKDEFCRCELKLQKWYGDLRGKPFAIEAENSILDISGFSKQYNCAFIWQKDGVKKLNLYLIINYFKGGKLRFKKIKPEAFEANRFYTVINKKSGEIVPMEVNFNFDDPNLIILPLAFGKRQGREFIWNDLLSLETGSLKLANGRVIEKTLYNRRTRQDEPALFVALTFERREVLDSSNIKPMNLIGVDRGENIPAVIALTDPEGCPLSRFKDSLGNPTHILRIGESYKEKQRTIQAKKEVEQRRAGGYSRKYASKAKNLADDMVRNTARDLLYYAVTQDAMLIFENLSRGFGRQGKRTFMAERQYTRMEDWLTAKLAYEGLPSKTYLSKTLAQYTSKTCSNCGFTITSADYDRVLEKLKKTATGWMTTINGKELKVEGQITYYNRYKRQNVVKDLSVELDRLSEESVNNDISSWTKGRSGEALSLLKKRFSHRPVQEKFVCLNCGFETHADEQAALNIARSWLFLRSQEYKKYQTNKTTGNTDKRAFVETWQSFYRKKLKEVWKPAV

SEQ ID NO: 33766 - protein, 978 aa, synthetic construct
  REGION 1..978: note = engineered CasX variant
QEIKRINKIRRRLVKDSNTKKAGKTGPMKTLLVRVMTPDLRERLENLRKKPPNIPQPISNTSQANLNKLLTDYTEMKKAILHVYWEEFQKDPVGLMSRVAQPASKKIDQNKLKPEMDEKGNLTTAGFACSQCGQPLFVYKLEQVSEKGKAYTNYFGRCNVAEHEKLILLAQLKPEKDSDEAVTYSLGKFGQRALDFYSIHVTKESTHPVKPLAQIAGNRYASTPVGKALSDACMGTIASFLSKYQDIIIEHQKVVKGNQKRLESLRELAGKENLEYPSVTLPPQPHTKEGVDAYNEVIARVRMWVNLNLWQKLKLSRDDAKPLLRLKGFPSFPLVERQANEVDWWDMVCNVKKLINEKKEDGKVFWQNLAGYKRQEALRPYLSSEEDRKKGKKFARYQLGDLLLHLEKKHGEDWGKVYDEAWERIDKKVEGLSKHIKLEEERRSEDAQSKAALTDWLRAKASFVIEGLKEADKDEFCRCELKLQKWYGDLRGKPFAIEAENSILDISGFSKQYNCAFIWQKDGVKKLNLYLIINYFKGGKLRFKKIKPEAFEANRFYTVINKKSGEIVPMEVNFNFDDPNLIILPLAFGKRQGREFIWNDLLSLETGSLKLANGRVIEKTLYNRRTRQDEPALFVALTFERREVLDSSNIKPMNLIGVDRGENIPAVIALTDPEGCPLSRFKDSLGNPTHILRIGESYKEKQRTIQAKKEVEQRRAGGYSRKYASKAKNLADDMVRNTARDLLYYAVTQDAMLIFENLSRGFGRQGKRTFMAERQYTRMEDWLTAKLAYEGLPSKTYLSKTLAQYTSKTCSNCGFTITSADYDRVLEKLKKTATGWMTTINGKELKVEGQITYYNRYKRQNVVKDLSVELDRLSEESVNNDISSWTKGRSGEALSLLKKRFSHRPVQEKFVCLNCGFETHADEQAALNIARSWLFLRSQEYKKYQTNKTTGNTDKRAFVETWQSFYRKKLKEVWKPAV

SEQ ID NO: 33767 - protein, 978 aa, synthetic construct
  REGION 1..978: note = engineered CasX variant
QEIKRINKIRRRLVKDSNTKKAGKTGPMKTLLVRVMTPDLRERLENLRKKPPNIPQPISNTSQANLNKLLTDYTEMKKAILHVYWEEFQKDPVGLMSRVAQPASKKIDQNKLKPEMDEKGNLTTAGFACSQCGQPLFVYKLEQVSEKGKAYTNYFGRCNVAEHEKLILLAQLKPEKDSDEAVTYSLGKFGQRALDFYSIHVTKESTHPVKPLAQIAGNRYASAPVGKALSDACMGTIASFLSKYQDIIIEHQKVVKGNQKRLESLRELAGKENLEYPSVTLPPQPHTKEGVDAYNEVIARVRMWVNLNLWQKLKLSRDDAKPLLRLKGFPSFPLVERQANEVDWWDMVCNVKKLINEKKEDGKVFWQNLAGYKRQEALRPYLSSEEDRKKGKKFARYQLGDLLLHLEKKHGEDWGKVYDEAWERIDKKVEGLSKHIKLEEERRSEDAQSKAALTDWLRAKASFVIEGLKEADKDEFCRCELKLQKWYGDLRGKPFAIEAENSILDISGFSKQYNCAFIWQKDGVKKLNLYLIINYFKGGKLRFKKIKPEAFEANRFYTVINKKSGEIVPMEVNFNFDDPNLIILPLAFGKRQGREFIWNDLLSLETGSLKLANGRVIEKTLYNRRTRQDEPALFVALTFERREVLDSSNIKPMNLIGVDRGENIPAVIALTDPEGCPLSRFKDSLGNPTHILRIGESYKEKQRTIQAKKEVEQRRAGGYSRKYASKAKNLADDMVRNTARDLLYYAVTQDAMLIFENLSRGFGRQGKRTFMAERQYTRMEDWLTAKLAYEGLPSKTYLSKTLAQYTSKTCSNCGFTITSADYDRVLEKLKKTATGWMTTINGKELKVEGQITYYNRYKRQNVVKDLSVELDRLSEESVNNDISSWTKGRSGEALSLLKKRFSHRPVQEKFVCLNCGFETHADEQAALNIARSWLFLRSQEYKKYQTNKTTGNTDKRAFVETWQSFYRKKLKEVWKPAV

SEQ ID NO: 33768 - protein, 978 aa, synthetic construct
  REGION 1..978: note = engineered CasX variant
QEIKRINKIRRRLVKDSNTKKAGKTGPMKTLLVRVMTPDLRERLENLRKKPPNIPQPISNTSQANLNKLLTDYTEMKKAILHVYWEEFQKDPVGLMSRVAQPASKKIDQNKLKPEMDEKGNLTTAGFACSQCGQPLFVYKLEQVSEKGKAYTNYFGRCNVAEHEKLILLAQLKPEKDSDEAVTYSLGKFGQRALDFYSIHVTKESTHPVKPLAQIAGNRYASVPVGKALSDACMGTIASFLSKYQDIIIEHQKVVKGNQKRLESLRELAGKENLEYPSVTLPPQPHTKEGVDAYNEVIARVRMWVNLNLWQKLKLSRDDAKPLLRLKGFPSFPLVERQANEVDWWDMVCNVKKLINEKKEDGKVFWQNLAGYKRQEALRPYLSSEEDRKKGKKFARYQLGDLLLHLEKKHGEDWGKVYDEAWERIDKKVEGLSKHIKLEEERRSEDAQSKAALTDWLRAKASFVIEGLKEADKDEFCRCELKLQKWYGDLRGKPFAIEAENSILDISGFSKQYNCAFIWQKDGVKKLNLYLIINYFKGGKLRFKKIKPEAFEANRFYTVINKKSGEIVPMEVNFNFDDPNLIILPLAFGKRQGREFIWNDLLSLETGSLKLANGRVIEKTLYNRRTRQDEPALFVALTFERREVLDSSNIKPMNLIGVDRGENIPAVIALTDPEGCPLSRFKDSLGNPTHILRIGESYKEKQRTIQAKKEVEQRRAGGYSRKYASKAKNLADDMVRNTARDLLYYAVTQDAMLIFENLSRGFGRQGKRTFMAERQYTRMEDWLTAKLAYEGLPSKTYLSKTLAQYTSKTCSNCGFTITSADYDRVLEKLKKTATGWMTTINGKELKVEGQITYYNRYKRQNVVKDLSVELDRLSEESVNNDISSWTKGRSGEALSLLKKRFSHRPVQEKFVCLNCGFETHADEQAALNIARSWLFLRSQEYKKYQTNKTTGNTDKRAFVETWQSFYRKKLKEVWKPAV

SEQ ID NO: 33769 - protein, 978 aa, synthetic construct
  REGION 1..978: note = engineered CasX variant
QEIKRINKIRRRLVKDSNTKKAGKTGPMKTLLVRVMTPDLRERLENLRKKPPNIPQPISNTSQANLNKLLTDYTEMKKAILHVYWEEFQKDPVGLMSRVAQPASKKIDQNKLKPEMDEKGNLTTAGFACSQCGQPLFVYKLEQVSEKGKAYTNYFGRCNVAEHEKLIKLAQLKPEKDSDEAVTYSLGKFGQRALDFYSIHVTKESTHPVKPLAQIAGNRYASGPVGKALSDACMGTIASFLSKYQDIIIEHQKVVKGNQKRLESLRELAGKENLEYPSVTLPPQPHTKEGVDAYNEVIARVRMWVNLNLWQKLKLSRDDAKPLLRLKGFPSFPLVERQANEVDWWDMVCNVKKLINEKKEDGKVFWQNLAGYKRQEALRPYLSSEEDRKKGKKFARYQLGDLLLHLEKKHGEDWGKVYDEAWERIDKKVEGLSKHIKLEEERRSEDAQSKAALTDWLRAKASFVIEGLKEADKDEFCRCELKLQKWYGDLRGKPFAIEAENSILDISGFSKQYNCAFIWQKDGVKKLNLYLIINYFKGGKLRFKKIKPEAFEANRFYTVINKKSGEIVPMEVNFNFDDPNLIILPLAFGKRQGREFIWNDLLSLETGSLKLANGRVIEKTLYNRRTRQDEPALFVALTFERREVLDSSNIKPMNLIGVDRGENIPAVIALTDPEGCPLSRFKDSLGNPTHILRIGESYKEKQRTIQAKKEVEQRRAGGYSRKYASKAKNLADDMVRNTARDLLYYAVTQDAMLIFENLSRGFGRQGKRTFMAERQYTRMEDWLTAKLAYEGLPSKTYLSKTLAQYTSKTCSNCGFTITSADYDRVLEKLKKTATGWMTTINGKELKVEGQITYYNRYKRQNVVKDLSVELDRLSEESVNNDISSWTKGRSGEALSLLKKRFSHRPVQEKFVCLNCGFETHADEQAALNIARSWLFLRSQEYKKYQTNKTTGNTDKRAFVETWQSFYRKKLKEVWKPAV

SEQ ID NO: 33770 - protein, 977 aa, synthetic construct
  REGION 1..977: note = engineered CasX variant
QEIKRINKIRRRLVKDSNTKKAGKTGPMKTLLVRVMTPDLRERLENLRKKPPNIPQPISNTSQANLNKLLTDYTEMKKAILHVYWEEFQKDPVGLMSRVAQPASKKIDQNKLKPEMDEKGNLTTAGFACSQCGQPLFVYKLEQVSEKGKAYTNYFGRCNVAEHEKLILLAQLKPEKDSDEAVTYSLGKFGQRALDFYSIHVTKESTHPVKPLAQIAGNRYASPVGKALSDACMGTIASFLSKYQDIIIEHQKVVKGNQKRLESLRELAGKENLEYPSVTLPPQPHTKEGVDAYNEVIARVRMWVNLNLWQKLKLSRDDAKPLLRLKGFPSFPLVERQANEVDWWDMVCNVKKLINEKKEDGKVFWQNLAGYKRQEALRPYLSSEEDRKKGKKFARYQLGDLLLHLEKKHGEDWGKVYDEAWERIDKKVEGLSKHIKLEEERRSEDAQSKAALTDWLRAKASFVIEGLKEADKDEFCRCELKLQKWYGDLRGKPFAIEAENSILDISGFSKQYNCAFIWQKDGVKKLNLYLIINYFKGGKLRFKKIKPEAFEANRFYTVINKKSGEIVPMEVNFNFDDPNLIILPLAFGKRQGREFIWNDLLSLETGSLKLANGRVIEKTLYNRRTRQDEPALFVALTFERREVLDSSNIKPMNLIGVDRGENIPAVIALTDPEGCPLSRFKDSLGNPTHILRIGESYKEKQRTIQAKKEVEQRRAGGYSRKYASKAKNLADDMVRNTARDLLYYAVTQDAMLIFENLSRGFGRQGKRTFMAERQYTRMEDWLTAKLAYEGLPSKTYLSKTLAQYTSKTCSNCGFTITSADYDRVLEKLKKTATGWMTTINGKELKVEGQITYYNRYKRQNVVKDLSVELDRLSEESVNNDISSWTKGRSGEALSLLKKRFSHRPVQEKFVCLNCGFETHADEQAALNIARSWLFLRSQEYKKYQTNKTTGNTDKRAFVETWQSFYRKKLKEVWKPAV

SEQ ID NO: 33771 - protein, 978 aa, synthetic construct
  REGION 1..978: note = engineered CasX variant
QEIKRINKIRRRLVKDSNTKKAGKTGPMKTLLVRVMTPDLRERLENLRKKPPNIPQPISNTSRANLNKLLTDYTEMKKAILHVYDEEFQKDPVGLMSRVAQPASKKIDQNKLKPEMDEKGNLTTAGFACSQCGQPLFVYKLEQVSEKGKAYTNYFGRCNVAEHEKLILLAQLKPEKDSDEAVTYSLGKFGQRALDFYSIHVTKESTHPVKPLAQIAGNRYASYPVGKALSDACMGTIASFLSKYQDIIIEHQKVVKGNQKRLESLRELAGKENLEYPSVTLPPQPHTKEGVDAYNEVIARVRMWVNLNLWQKLKLSRDDAKPLLRLKGFPSFPLVERQANEVDWWDMVCNVKKLINEKKEDGKVFWQNLAGYKRQEALRPYLSSEEDRKKGKKFARYQLGDLLLHLEKKHGEDWGKVYDEAWERIDKKVEGLSKHIKLEEERRSEDAQSKAALTDWLRAKASFVIEGLKEADKDEFCRCELKLQKWYGDLRGKPFAIEAENSILDISGFSKQYNCAFIWQKDGVKKLNLYLIINYFKGGKLRFKKIKPEAFEANRFYTVINKKSGEIVPMEVNFNFDDPNLIILPLAFGKRQGREFIWNDLLSLETGSLKLANGRVIEKTLYNRRTRQDEPALFVALTFERREVLDSSNIKPMNLIGVDRGENIPAVIALTDPEGCPLSRFKDSLGNPTHILRIGESYKEKQRTIQAKKEVEQRRAGGYSRKYASKAKNLADDMVRNTARDLLYYAVTQDAMLIFENLSRGFGRQGKRTFMAERQYTRMEDWLTAKLAYEGLPSKTYLSKTLAQYTSKTCSNCGFTITSADYDRVLEKLKKTATGWMTTINGKELKVEGQITYYNRYKRQNVVKDLSVELDRLSEESVNNDISSWTKGRSGEALSLLKKRFSHRPVQEKFVCLNCGFETHADEQAALNIARSWLFLRSQEYKKYQTNKTTGNTDKRAFVETWQSFYRKKLKEVWKPAV

SEQ ID NO: 33772 - protein, 978 aa, synthetic construct
  REGION 1..978: note = engineered CasX variant
QEIKRINKIRRRLVKDSNTKKAGKTGPMKTLLVRVMTPDLRERLENLRKKPPNIPQPISNTSRANLNKLLTDYTEMKKAILHVYDEEFQKDPVGLMSRVAQPASKKIDQNKLKPEMDEKGNLTTAGFACSQCGQPLFVYKLEQVSEKGKAYTNYFGRCNVAEHEKLILLAQLKPEKDSDEAVTYSLGKFGQRALDFYSIHVTKESTHPVKPLAQIAGNRYASHPVGKALSDACMGTIASFLSKYQDIIIEHQKVVKGNQKRLESLRELAGKENLEYPSVTLPPQPHTKEGVDAYNEVIARVRMWVNLNLWQKLKLSRDDAKPLLRLKGFPSFPLVERQANEVDWWDMVCNVKKLINEKKEDGKVFWQNLAGYKRQEALRPYLSSEEDRKKGKKFARYQLGDLLLHLEKKHGEDWGKVYDEAWERIDKKVEGLSKHIKLEEERRSEDAQSKAALTDWLRAKASFVIEGLKEADKDEFCRCELKLQKWYGDLRGKPFAIEAENSILDISGFSKQYNCAFIWQKDGVKKLNLYLIINYFKGGKLRFKKIKPEAFEANRFYTVINKKSGEIVPMEVNFNFDDPNLIILPLAFGKRQGREFIWNDLLSLETGSLKLANGRVIEKTLYNRRTRQDEPALFVALTFERREVLDSSNIKPMNLIGVDRGENIPAVIALTDPEGCPLSRFKDSLGNPTHILRIGESYKEKQRTIQAKKEVEQRRAGGYSRKYASKAKNLADDMVRNTARDLLYYAVTQDAMLIFENLSRGFGRQGKRTFMAERQYTRMEDWLTAKLAYEGLPSKTYLSKTLAQYTSKTCSNCGFTITSADYDRVLEKLKKTATGWMTTINGKELKVEGQITYYNRYKRQNVVKDLSVELDRLSEESVNNDISSWTKGRSGEALSLLKKRFSHRPVQEKFVCLNCGFETHADEQAALNIARSWLFLRSQEYKKYQTNKTTGNTDKRAFVETWQSFYRKKLKEVWKPAV

SEQ ID NO: 33773 - protein, 978 aa, synthetic construct
  REGION 1..978: note = engineered CasX variant
QEIKRINKIRRRLVKDSNTKKAGKTGPMKTLLVRVMTPDLRERLENLRKKPPNIPQPISNTSRANLNKLLTDYTEMKKAILHVYDEEFQKDPVGLMSRVAQPASKKIDQNKLKPEMDEKGNLTTAGFACSQCGQPLFVYKLEQVSEKGKAYTNYFGRCNVAEHEKLILLAQLKPEKDSDEAVTYSLGKFGQRALDFYSIHVTKESTHPVKPLAQIAGNRYASSPVGKALSDACMGTIASFLSKYQDIIIEHQKVVKGNQKRLESLRELAGKENLEYPSVTLPPQPHTKEGVDAYNEVIARVRMWVNLNLWQKLKLSRDDAKPLLRLKGFPSFPLVERQANEVDWWDMVCNVKKLINEKKEDGKVFWQNLAGYKRQEALRPYLSSEEDRKKGKKFARYQLGDLLLHLEKKHGEDWGKVYDEAWERIDKKVEGLSKHIKLEEERRSEDAQSKAALTDWLRAKASFVIEGLKEADKDEFCRCELKLQKWYGDLRGKPFAIEAENSILDISGFSKQYNCAFIWQKDGVKKLNLYLIINYFKGGKLRFKKIKPEAFEANRFYTVINKKSGEIVPMEVNFNFDDPNLIILPLAFGKRQGREFIWNDLLSLETGSLKLANGRVIEKTLYNRRTRQDEPALFVALTFERREVLDSSNIKPMNLIGVDRGENIPAVIALTDPEGCPLSRFKDSLGNPTHILRIGESYKEKQRTIQAKKEVEQRRAGGYSRKYASKAKNLADDMVRNTARDLLYYAVTQDAMLIFENLSRGFGRQGKRTFMAERQYTRMEDWLTAKLAYEGLPSKTYLSKTLAQYTSKTCSNCGFTITSADYDRVLEKLKKTATGWMTTINGKELKVEGQITYYNRYKRQNVVKDLSVELDRLSEESVNNDISSWTKGRSGEALSLLKKRFSHRPVQEKFVCLNCGFETHADEQAALNIARSWLFLRSQEYKKYQTNKTTGNTDKRAFVETWQSFYRKKLKEVWKPAV

SEQ ID NO: 33774 - protein, 978 aa, synthetic construct
  REGION 1..978: note = engineered CasX variant
QEIKRINKIRRRLVKDSNTKKAGKTGPMKTLLVRVMTPDLRERLENLRKKPPNIPQPISNTSRANLNKLLTDYTEMKKAILHVYDEEFQKDPVGLMSRVAQPASKKIDQNKLKPEMDEKGNLTTAGFACSQCGQPLFVYKLEQVSEKGKAYTNYFGRCNVAEHEKLILLAQLKPEKDSDEAVTYSLGKFGQRALDFYSIHVTKESTHPVKPLAQIAGNRYASTPVGKALSDACMGTIASFLSKYQDIIIEHQKVVKGNQKRLESLRELAGKENLEYPSVTLPPQPHTKEGVDAYNEVIARVRMWVNLNLWQKLKLSRDDAKPLLRLKGFPSFPLVERQANEVDWWDMVCNVKKLINEKKEDGKVFWQNLAGYKRQEALRPYLSSEEDRKKGKKFARYQLGDLLLHLEKKHGEDWGKVYDEAWERIDKKVEGLSKHIKLEEERRSEDAQSKAALTDWLRAKASFVIEGLKEADKDEFCRCELKLQKWYGDLRGKPFAIEAENSILDISGFSKQYNCAFIWQKDGVKKLNLYLIINYFKGGKLRFKKIKPEAFEANRFYTVINKKSGEIVPMEVNFNFDDPNLIILPLAFGKRQGREFIWNDLLSLETGSLKLANGRVIEKTLYNRRTRQDEPALFVALTFERREVLDSSNIKPMNLIGVDRGENIPAVIALTDPEGCPLSRFKDSLGNPTHILRIGESYKEKQRTIQAKKEVEQRRAGGYSRKYASKAKNLADDMVRNTARDLLYYAVTQDAMLIFENLSRGFGRQGKRTFMAERQYTRMEDWLTAKLAYEGLPSKTYLSKTLAQYTSKTCSNCGFTITSADYDRVLEKLKKTATGWMTTINGKELKVEGQITYYNRYKRQNVVKDLSVELDRLSEESVNNDISSWTKGRSGEALSLLKKRFSHRPVQEKFVCLNCGFETHADEQAALNIARSWLFLRSQEYKKYQTNKTTGNTDKRAFVETWQSFYRKKLKEVWKPAV

SEQ ID NO: 33775 - protein, 978 aa, synthetic construct
  REGION 1..978: note = engineered CasX variant
QEIKRINKIRRRLVKDSNTKKAGKTGPMKTLLVRVMTPDLRERLENLRKKPPNIPQPISNTSRANLNKLLTDYTEMKKAILHVYDEEFQKDPVGLMSRVAQPASKKIDQNKLKPEMDEKGNLTTAGFACSQCGQPLFVYKLEQVSEKGKAYTNYFGRCNVAEHEKLILLAQLKPEKDSDEAVTYSLGKFGQRALDFYSIHVTKESTHPVKPLAQIAGNRYASAPVGKALSDACMGTIASFLSKYQDIIIEHQKVVKGNQKRLESLRELAGKENLEYPSVTLPPQPHTKEGVDAYNEVIARVRMWVNLNLWQKLKLSRDDAKPLLRLKGFPSFPLVERQANEVDWWDMVCNVKKLINEKKEDGKVFWQNLAGYKRQEALRPYLSSEEDRKKGKKFARYQLGDLLLHLEKKHGEDWGKVYDEAWERIDKKVEGLSKHIKLEEERRSEDAQSKAALTDWLRAKASFVIEGLKEADKDEFCRCELKLQKWYGDLRGKPFAIEAENSILDISGFSKQYNCAFIWQKDGVKKLNLYLIINYFKGGKLRFKKIKPEAFEANRFYTVINKKSGEIVPMEVNFNFDDPNLIILPLAFGKRQGREFIWNDLLSLETGSLKLANGRVIEKTLYNRRTRQDEPALFVALTFERREVLDSSNIKPMNLIGVDRGENIPAVIALTDPEGCPLSRFKDSLGNPTHILRIGESYKEKQRTIQAKKEVEQRRAGGYSRKYASKAKNLADDMVRNTARDLLYYAVTQDAMLIFENLSRGFGRQGKRTFMAERQYTRMEDWLTAKLAYEGLPSKTYLSKTLAQYTSKTCSNCGFTITSADYDRVLEKLKKTATGWMTTINGKELKVEGQITYYNRYKRQNVVKDLSVELDRLSEESVNNDISSWTKGRSGEALSLLKKRFSHRPVQEKFVCLNCGFETHADEQAALNIARSWLFLRSQEYKKYQTNKTTGNTDKRAFVETWQSFYRKKLKEVWKPAV

SEQ ID NO: 33776 - protein, 978 aa, synthetic construct
  REGION 1..978: note = engineered CasX variant
QEIKRINKIRRRLVKDSNTKKAGKTGPMKTLLVRVMTPDLRERLENLRKKPPNIPQPISNTSRANLNKLLTDYTEMKKAILHVYDEEFQKDPVGLMSRVAQPASKKIDQNKLKPEMDEKGNLTTAGFACSQCGQPLFVYKLEQVSEKGKAYTNYFGRCNVAEHEKLILLAQLKPEKDSDEAVTYSLGKFGQRALDFYSIHVTKESTHPVKPLAQIAGNRYASVPVGKALSDACMGTIASFLSKYQDIIIEHQKVVKGNQKRLESLRELAGKENLEYPSVTLPPQPHTKEGVDAYNEVIARVRMWVNLNLWQKLKLSRDDAKPLLRLKGFPSFPLVERQANEVDWWDMVCNVKKLINEKKEDGKVFWQNLAGYKRQEALRPYLSSEEDRKKGKKFARYQLGDLLLHLEKKHGEDWGKVYDEAWERIDKKVEGLSKHIKLEEERRSEDAQSKAALTDWLRAKASFVIEGLKEADKDEFCRCELKLQKWYGDLRGKPFAIEAENSILDISGFSKQYNCAFIWQKDGVKKLNLYLIINYFKGGKLRFKKIKPEAFEANRFYTVINKKSGEIVPMEVNFNFDDPNLIILPLAFGKRQGREFIWNDLLSLETGSLKLANGRVIEKTLYNRRTRQDEPALFVALTFERREVLDSSNIKPMNLIGVDRGENIPAVIALTDPEGCPLSRFKDSLGNPTHILRIGESYKEKQRTIQAKKEVEQRRAGGYSRKYASKAKNLADDMVRNTARDLLYYAVTQDAMLIFENLSRGFGRQGKRTFMAERQYTRMEDWLTAKLAYEGLPSKTYLSKTLAQYTSKTCSNCGFTITSADYDRVLEKLKKTATGWMTTINGKELKVEGQITYYNRYKRQNVVKDLSVELDRLSEESVNNDISSWTKGRSGEALSLLKKRFSHRPVQEKFVCLNCGFETHADEQAALNIARSWLFLRSQEYKKYQTNKTTGNTDKRAFVETWQSFYRKKLKEVWKPAV

SEQ ID NO: 33777 - protein, 978 aa, synthetic construct
  REGION 1..978: note = engineered CasX variant
QEIKRINKIRRRLVKDSNTKKAGKTGPMKTLLVRVMTPDLRERLENLRKKPPNIPQPISNTSRANLNKLLTDYTEMKKAILHVYDEEFQKDPVGLMSRVAQPASKKIDQNKLKPEMDEKGNLTTAGFACSQCGQPLFVYKLEQVSEKGKAYTNYFGRCNVAEHEKLIKLAQLKPEKDSDEAVTYSLGKFGQRALDFYSIHVTKESTHPVKPLAQIAGNRYASGPVGKALSDACMGTIASFLSKYQDIIIEHQKVVKGNQKRLESLRELAGKENLEYPSVTLPPQPHTKEGVDAYNEVIARVRMWVNLNLWQKLKLSRDDAKPLLRLKGFPSFPLVERQANEVDWWDMVCNVKKLINEKKEDGKVFWQNLAGYKRQEALRPYLSSEEDRKKGKKFARYQLGDLLLHLEKKHGEDWGKVYDEAWERIDKKVEGLSKHIKLEEERRSEDAQSKAALTDWLRAKASFVIEGLKEADKDEFCRCELKLQKWYGDLRGKPFAIEAENSILDISGFSKQYNCAFIWQKDGVKKLNLYLIINYFKGGKLRFKKIKPEAFEANRFYTVINKKSGEIVPMEVNFNFDDPNLIILPLAFGKRQGREFIWNDLLSLETGSLKLANGRVIEKTLYNRRTRQDEPALFVALTFERREVLDSSNIKPMNLIGVDRGENIPAVIALTDPEGCPLSRFKDSLGNPTHILRIGESYKEKQRTIQAKKEVEQRRAGGYSRKYASKAKNLADDMVRNTARDLLYYAVTQDAMLIFENLSRGFGRQGKRTFMAERQYTRMEDWLTAKLAYEGLPSKTYLSKTLAQYTSKTCSNCGFTITSADYDRVLEKLKKTATGWMTTINGKELKVEGQITYYNRYKRQNVVKDLSVELDRLSEESVNNDISSWTKGRSGEALSLLKKRFSHRPVQEKFVCLNCGFETHADEQAALNIARSWLFLRSQEYKKYQTNKTTGNTDKRAFVETWQSFYRKKLKEVWKPAV

SEQ ID NO: 33778 - protein, 977 aa, synthetic construct
  REGION 1..977: note = engineered CasX variant
QEIKRINKIRRRLVKDSNTKKAGKTGPMKTLLVRVMTPDLRERLENLRKKPPNIPQPISNTSRANLNKLLTDYTEMKKAILHVYDEEFQKDPVGLMSRVAQPASKKIDQNKLKPEMDEKGNLTTAGFACSQCGQPLFVYKLEQVSEKGKAYTNYFGRCNVAEHEKLILLAQLKPEKDSDEAVTYSLGKFGQRALDFYSIHVTKESTHPVKPLAQIAGNRYASPVGKALSDACMGTIASFLSKYQDIIIEHQKVVKGNQKRLESLRELAGKENLEYPSVTLPPQPHTKEGVDAYNEVIARVRMWVNLNLWQKLKLSRDDAKPLLRLKGFPSFPLVERQANEVDWWDMVCNVKKLINEKKEDGKVFWQNLAGYKRQEALRPYLSSEEDRKKGKKFARYQLGDLLLHLEKKHGEDWGKVYDEAWERIDKKVEGLSKHIKLEEERRSEDAQSKAALTDWLRAKASFVIEGLKEADKDEFCRCELKLQKWYGDLRGKPFAIEAENSILDISGFSKQYNCAFIWQKDGVKKLNLYLIINYFKGGKLRFKKIKPEAFEANRFYTVINKKSGEIVPMEVNFNFDDPNLIILPLAFGKRQGREFIWNDLLSLETGSLKLANGRVIEKTLYNRRTRQDEPALFVALTFERREVLDSSNIKPMNLIGVDRGENIPAVIALTDPEGCPLSRFKDSLGNPTHILRIGESYKEKQRTIQAKKEVEQRRAGGYSRKYASKAKNLADDMVRNTARDLLYYAVTQDAMLIFENLSRGFGRQGKRTFMAERQYTRMEDWLTAKLAYEGLPSKTYLSKTLAQYTSKTCSNCGFTITSADYDRVLEKLKKTATGWMTTINGKELKVEGQITYYNRYKRQNVVKDLSVELDRLSEESVNNDISSWTKGRSGEALSLLKKRFSHRPVQEKFVCLNCGFETHADEQAALNIARSWLFLRSQEYKKYQTNKTTGNTDKRAFVETWQSFYRKKLKEVWKPAV

SEQ ID NO: 33779 - protein, 978 aa, synthetic construct
  REGION 1..978: note = engineered CasX variant
QEIKRINKIRRRLVKDSNTKKAGKTGPMKTLLVRVMTPDLRERLENLRKKPPNIPQPISNTSRANLNKLLTDYTEMKKAILHVYWEEFQKDPVGLMSRVAQPASKKIDQNKLKPEMDEKGNLTTAGFACSQCGQPLFVYKLEQVSEKGKAYTNYFGRCNVAEHEKLIKLAQLKPEKDSDEAVTYSLGKFGQRALDFYSIHVTKESTHPVKPLAQIAGNRYASYPVGKALSDACMGTIASFLSKYQDIIIEHQKVVKGNQKRLESLRELAGKENLEYPSVTLPPQPHTKEGVDAYNEVIARVRMWVNLNLWQKLKLSRDDAKPLLRLKGFPSFPLVERQANEVDWWDMVCNVKKLINEKKEDGKVFWQNLAGYKRQEALRPYLSSEEDRKKGKKFARYQLGDLLLHLEKKHGEDWGKVYDEAWERIDKKVEGLSKHIKLEEERRSEDAQSKAALTDWLRAKASFVIEGLKEADKDEFCRCELKLQKWYGDLRGKPFAIEAENSILDISGFSKQYNCAFIWQKDGVKKLNLYLIINYFKGGKLRFKKIKPEAFEANRFYTVINKKSGEIVPMEVNFNFDDPNLIILPLAFGKRQGREFIWNDLLSLETGSLKLANGRVIEKTLYNRRTRQDEPALFVALTFERREVLDSSNIKPMNLIGVDRGENIPAVIALTDPEGCPLSRFKDSLGNPTHILRIGESYKEKQRTIQAKKEVEQRRAGGYSRKYASKAKNLADDMVRNTARDLLYYAVTQDAMLIFENLSRGFGRQGKRTFMAERQYTRMEDWLTAKLAYEGLPSKTYLSKTLAQYTSKTCSNCGFTITSADYDRVLEKLKKTATGWMTTINGKELKVEGQITYYNRYKRQNVVKDLSVELDRLSEESVNNDISSWTKGRSGEALSLLKKRFSHRPVQEKFVCLNCGFETHADEQAALNIARSWLFLRSQEYKKYQTNKTTGNTDKRAFVETWQSFYRKKLKEVWKPAV

SEQ ID NO: 33780 - protein, 978 aa, synthetic construct
  REGION 1..978: note = engineered CasX variant
QEIKRINKIRRRLVKDSNTKKAGKTGPMKTLLVRVMTPDLRERLENLRKKPPNIPQPISNTSRANLNKLLTDYTEMKKAILHVYWEEFQKDPVGLMSRVAQPASKKIDQNKLKPEMDEKGNLTTAGFACSQCGQPLFVYKLEQVSEKGKAYTNYFGRCNVAEHEKLIKLAQLKPEKDSDEAVTYSLGKFGQRALDFYSIHVTKESTHPVKPLAQIAGNRYASHPVGKALSDACMGTIASFLSKYQDIIIEHQKVVKGNQKRLESLRELAGKENLEYPSVTLPPQPHTKEGVDAYNEVIARVRMWVNLNLWQKLKLSRDDAKPLLRLKGFPSFPLVERQANEVDWWDMVCNVKKLINEKKEDGKVFWQNLAGYKRQEALRPYLSSEEDRKKGKKFARYQLGDLLLHLEKKHGEDWGKVYDEAWERIDKKVEGLSKHIKLEEERRSEDAQSKAALTDWLRAKASFVIEGLKEADKDEFCRCELKLQKWYGDLRGKPFAIEAENSILDISGFSKQYNCAFIWQKDGVKKLNLYLIINYFKGGKLRFKKIKPEAFEANRFYTVINKKSGEIVPMEVNFNFDDPNLIILPLAFGKRQGREFIWNDLLSLETGSLKLANGRVIEKTLYNRRTRQDEPALFVALTFERREVLDSSNIKPMNLIGVDRGENIPAVIALTDPEGCPLSRFKDSLGNPTHILRIGESYKEKQRTIQAKKEVEQRRAGGYSRKYASKAKNLADDMVRNTARDLLYYAVTQDAMLIFENLSRGFGRQGKRTFMAERQYTRMEDWLTAKLAYEGLPSKTYLSKTLAQYTSKTCSNCGFTITSADYDRVLEKLKKTATGWMTTINGKELKVEGQITYYNRYKRQNVVKDLSVELDRLSEESVNNDISSWTKGRSGEALSLLKKRFSHRPVQEKFVCLNCGFETHADEQAALNIARSWLFLRSQEYKKYQTNKTTGNTDKRAFVETWQSFYRKKLKEVWKPAV

SEQ ID NO: 33781 - protein, 978 aa, synthetic construct
  REGION 1..978: note = engineered CasX variant
QEIKRINKIRRRLVKDSNTKKAGKTGPMKTLLVRVMTPDLRERLENLRKKPPNIPQPISNTSRANLNKLLTDYTEMKKAILHVYWEEFQKDPVGLMSRVAQPASKKIDQNKLKPEMDEKGNLTTAGFACSQCGQPLFVYKLEQVSEKGKAYTNYFGRCNVAEHEKLIKLAQLKPEKDSDEAVTYSLGKFGQRALDFYSIHVTKESTHPVKPLAQIAGNRYASTPVGKALSDACMGTIASFLSKYQDIIIEHQKVVKGNQKRLESLRELAGKENLEYPSVTLPPQPHTKEGVDAYNEVIARVRMWVNLNLWQKLKLSRDDAKPLLRLKGFPSFPLVERQANEVDWWDMVCNVKKLINEKKEDGKVFWQNLAGYKRQEALRPYLSSEEDRKKGKKFARYQLGDLLLHLEKKHGEDWGKVYDEAWERIDKKVEGLSKHIKLEEERRSEDAQSKAALTDWLRAKASFVIEGLKEADKDEFCRCELKLQKWYGDLRGKPFAIEAENSILDISGFSKQYNCAFIWQKDGVKKLNLYLIINYFKGGKLRFKKIKPEAFEANRFYTVINKKSGEIVPMEVNFNFDDPNLIILPLAFGKRQGREFIWNDLLSLETGSLKLANGRVIEKTLYNRRTRQDEPALFVALTFERREVLDSSNIKPMNLIGVDRGENIPAVIALTDPEGCPLSRFKDSLGNPTHILRIGESYKEKQRTIQAKKEVEQRRAGGYSRKYASKAKNLADDMVRNTARDLLYYAVTQDAMLIFENLSRGFGRQGKRTFMAERQYTRMEDWLTAKLAYEGLPSKTYLSKTLAQYTSKTCSNCGFTITSADYDRVLEKLKKTATGWMTTINGKELKVEGQITYYNRYKRQNVVKDLSVELDRLSEESVNNDISSWTKGRSGEALSLLKKRFSHRPVQEKFVCLNCGFETHADEQAALNIARSWLFLRSQEYKKYQTNKTTGNTDKRAFVETWQSFYRKKLKEVWKPAV

SEQ ID NO: 33782 - protein, 978 aa, synthetic construct
  REGION 1..978: note = engineered CasX variant
QEIKRINKIRRRLVKDSNTKKAGKTGPMKTLLVRVMTPDLRERLENLRKKPPNIPQPISNTSRANLNKLLTDYTEMKKAILHVYWEEFQKDPVGLMSRVAQPASKKIDQNKLKPEMDEKGNLTTAGFACSQCGQPLFVYKLEQVSEKGKAYTNYFGRCNVAEHEKLIKLAQLKPEKDSDEAVTYSLGKFGQRALDFYSIHVTKESTHPVKPLAQIAGNRYASAPVGKALSDACMGTIASFLSKYQDIIIEHQKVVKGNQKRLESLRELAGKENLEYPSVTLPPQPHTKEGVDAYNEVIARVRMWVNLNLWQKLKLSRDDAKPLLRLKGFPSFPLVERQANEVDWWDMVCNVKKLINEKKEDGKVFWQNLAGYKRQEALRPYLSSEEDRKKGKKFARYQLGDLLLHLEKKHGEDWGKVYDEAWERIDKKVEGLSKHIKLEEERRSEDAQSKAALTDWLRAKASFVIEGLKEADKDEFCRCELKLQKWYGDLRGKPFAIEAENSILDISGFSKQYNCAFIWQKDGVKKLNLYLIINYFKGGKLRFKKIKPEAFEANRFYTVINKKSGEIVPMEVNFNFDDPNLIILPLAFGKRQGREFIWNDLLSLETGSLKLANGRVIEKTLYNRRTRQDEPALFVALTFERREVLDSSNIKPMNLIGVDRGENIPAVIALTDPEGCPLSRFKDSLGNPTHILRIGESYKEKQRTIQAKKEVEQRRAGGYSRKYASKAKNLADDMVRNTARDLLYYAVTQDAMLIFENLSRGFGRQGKRTFMAERQYTRMEDWLTAKLAYEGLPSKTYLSKTLAQYTSKTCSNCGFTITSADYDRVLEKLKKTATGWMTTINGKELKVEGQITYYNRYKRQNVVKDLSVELDRLSEESVNNDISSWTKGRSGEALSLLKKRFSHRPVQEKFVCLNCGFETHADEQAALNIARSWLFLRSQEYKKYQTNKTTGNTDKRAFVETWQSFYRKKLKEVWKPAV

SEQ ID NO: 33783 - protein, 978 aa, synthetic construct
  REGION 1..978: note = engineered CasX variant
QEIKRINKIRRRLVKDSNTKKAGKTGPMKTLLVRVMTPDLRERLENLRKKPPNIPQPISNTSRANLNKLLTDYTEMKKAILHVYWEEFQKDPVGLMSRVAQPASKKIDQNKLKPEMDEKGNLTTAGFACSQCGQPLFVYKLEQVSEKGKAYTNYFGRCNVAEHEKLIKLAQLKPEKDSDEAVTYSLGKFGQRALDFYSIHVTKESTHPVKPLAQIAGNRYASVPVGKALSDACMGTIASFLSKYQDIIIEHQKVVKGNQKRLESLRELAGKENLEYPSVTLPPQPHTKEGVDAYNEVIARVRMWVNLNLWQKLKLSRDDAKPLLRLKGFPSFPLVERQANEVDWWDMVCNVKKLINEKKEDGKVFWQNLAGYKRQEALRPYLSSEEDRKKGKKFARYQLGDLLLHLEKKHGEDWGKVYDEAWERIDKKVEGLSKHIKLEEERRSEDAQSKAALTDWLRAKASFVIEGLKEADKDEFCRCELKLQKWYGDLRGKPFAIEAENSILDISGFSKQYNCAFIWQKDGVKKLNLYLIINYFKGGKLRFKKIKPEAFEANRFYTVINKKSGEIVPMEVNFNFDDPNLIILPLAFGKRQGREFIWNDLLSLETGSLKLANGRVIEKTLYNRRTRQDEPALFVALTFERREVLDSSNIKPMNLIGVDRGENIPAVIALTDPEGCPLSRFKDSLGNPTHILRIGESYKEKQRTIQAKKEVEQRRAGGYSRKYASKAKNLADDMVRNTARDLLYYAVTQDAMLIFENLSRGFGRQGKRTFMAERQYTRMEDWLTAKLAYEGLPSKTYLSKTLAQYTSKTCSNCGFTITSADYDRVLEKLKKTATGWMTTINGKELKVEGQITYYNRYKRQNVVKDLSVELDRLSEESVNNDISSWTKGRSGEALSLLKKRFSHRPVQEKFVCLNCGFETHADEQAALNIARSWLFLRSQEYKKYQTNKTTGNTDKRAFVETWQSFYRKKLKEVWKPAV

SEQ ID NO: 33784 - protein, 979 aa, synthetic construct
  REGION 1..979: note = engineered CasX variant
QEIKRINKIRRRLVKDSNTKKAGKTGPMKTLLVRVMTPDLRERLENLRKKPPNIPQPISNTSRANLNKLLTDYTEMKKAILHVYWEEFQKDPVGLMSRVAQPASKKIDQNKLKPEMDEKGNLTTAGFACSQCGQPLFVYKLEQVSEKGKAYTNYFGRCNVAEHEKLIKKLAQLKPEKDSDEAVTYSLGKFGQRALDFYSIHVTKESTHPVKPLAQIAGNRYASGPVGKALSDACMGTIASFLSKYQDIIIEHQKVVKGNQKRLESLRELAGKENLEYPSVTLPPQPHTKEGVDAYNEVIARVRMWVNLNLWQKLKLSRDDAKPLLRLKGFPSFPLVERQANEVDWWDMVCNVKKLINEKKEDGKVFWQNLAGYKRQEALRPYLSSEEDRKKGKKFARYQLGDLLLHLEKKHGEDWGKVYDEAWERIDKKVEGLSKHIKLEEERRSEDAQSKAALTDWLRAKASFVIEGLKEADKDEFCRCELKLQKWYGDLRGKPFAIEAENSILDISGFSKQYNCAFIWQKDGVKKLNLYLIINYFKGGKLRFKKIKPEAFEANRFYTVINKKSGEIVPMEVNFNFDDPNLIILPLAFGKRQGREFIWNDLLSLETGSLKLANGRVIEKTLYNRRTRQDEPALFVALTFERREVLDSSNIKPMNLIGVDRGENIPAVIALTDPEGCPLSRFKDSLGNPTHILRIGESYKEKQRTIQAKKEVEQRRAGGYSRKYASKAKNLADDMVRNTARDLLYYAVTQDAMLIFENLSRGFGRQGKRTFMAERQYTRMEDWLTAKLAYEGLPSKTYLSKTLAQYTSKTCSNCGFTITSADYDRVLEKLKKTATGWMTTINGKELKVEGQITYYNRYKRQNVVKDLSVELDRLSEESVNNDISSWTKGRSGEALSLLKKRFSHRPVQEKFVCLNCGFETHADEQAALNIARSWLFLRSQEYKKYQTNKTTGNTDKRAFVETWQSFYRKKLKEVWKPAV

SEQ ID NO: 33785 - protein, 977 aa, synthetic construct
  REGION 1..977: note = engineered CasX variant
QEIKRINKIRRRLVKDSNTKKAGKTGPMKTLLVRVMTPDLRERLENLRKKPPNIPQPISNTSRANLNKLLTDYTEMKKAILHVYWEEFQKDPVGLMSRVAQPASKKIDQNKLKPEMDEKGNLTTAGFACSQCGQPLFVYKLEQVSEKGKAYTNYFGRCNVAEHEKLIKLAQLKPEKDSDEAVTYSLGKFGQRALDFYSIHVTKESTHPVKPLAQIAGNRYASPVGKALSDACMGTIASFLSKYQDIIIEHQKVVKGNQKRLESLRELAGKENLEYPSVTLPPQPHTKEGVDAYNEVIARVRMWVNLNLWQKLKLSRDDAKPLLRLKGFPSFPLVERQANEVDWWDMVCNVKKLINEKKEDGKVFWQNLAGYKRQEALRPYLSSEEDRKKGKKFARYQLGDLLLHLEKKHGEDWGKVYDEAWERIDKKVEGLSKHIKLEEERRSEDAQSKAALTDWLRAKASFVIEGLKEADKDEFCRCELKLQKWYGDLRGKPFAIEAENSILDISGFSKQYNCAFIWQKDGVKKLNLYLIINYFKGGKLRFKKIKPEAFEANRFYTVINKKSGEIVPMEVNFNFDDPNLIILPLAFGKRQGREFIWNDLLSLETGSLKLANGRVIEKTLYNRRTRQDEPALFVALTFERREVLDSSNIKPMNLIGVDRGENIPAVIALTDPEGCPLSRFKDSLGNPTHILRIGESYKEKQRTIQAKKEVEQRRAGGYSRKYASKAKNLADDMVRNTARDLLYYAVTQDAMLIFENLSRGFGRQGKRTFMAERQYTRMEDWLTAKLAYEGLPSKTYLSKTLAQYTSKTCSNCGFTITSADYDRVLEKLKKTATGWMTTINGKELKVEGQITYYNRYKRQNVVKDLSVELDRLSEESVNNDISSWTKGRSGEALSLLKKRFSHRPVQEKFVCLNCGFETHADEQAALNIARSWLFLRSQEYKKYQTNKTTGNTDKRAFVETWQSFYRKKLKEVWKPAV

SEQ ID NO: 33786 - protein, 978 aa, synthetic construct
  REGION 1..978: note = engineered CasX variant
QEIKRINKIRRRLVKDSNTKKAGKTGPMKTLLVRVMTPDLRERLENLRKKPPNIPQPISNTSRANLNKLLTDYTEMKKAILHVYWEEFQKDPVGLMSRVAQPASKKIDQNKLKPEMDEKGNLTTAGFACSQCGQPLFVYKLEQVSEKGKAYTNYFGRCNVAEHEKLILLYQLKPEKDSDEAVTYSLGKFGQRALDFYSIHVTKESTHPVKPLAQIAGNRYASYPVGKALSDACMGTIASFLSKYQDIIIEHQKVVKGNQKRLESLRELAGKENLEYPSVTLPPQPHTKEGVDAYNEVIARVRMWVNLNLWQKLKLSRDDAKPLLRLKGFPSFPLVERQANEVDWWDMVCNVKKLINEKKEDGKVFWQNLAGYKRQEALRPYLSSEEDRKKGKKFARYQLGDLLLHLEKKHGEDWGKVYDEAWERIDKKVEGLSKHIKLEEERRSEDAQSKAALTDWLRAKASFVIEGLKEADKDEFCRCELKLQKWYGDLRGKPFAIEAENSILDISGFSKQYNCAFIWQKDGVKKLNLYLIINYFKGGKLRFKKIKPEAFEANRFYTVINKKSGEIVPMEVNFNFDDPNLIILPLAFGKRQGREFIWNDLLSLETGSLKLANGRVIEKTLYNRRTRQDEPALFVALTFERREVLDSSNIKPMNLIGVDRGENIPAVIALTDPEGCPLSRFKDSLGNPTHILRIGESYKEKQRTIQAKKEVEQRRAGGYSRKYASKAKNLADDMVRNTARDLLYYAVTQDAMLIFENLSRGFGRQGKRTFMAERQYTRMEDWLTAKLAYEGLPSKTYLSKTLAQYTSKTCSNCGFTITSADYDRVLEKLKKTATGWMTTINGKELKVEGQITYYNRYKRQNVVKDLSVELDRLSEESVNNDISSWTKGRSGEALSLLKKRFSHRPVQEKFVCLNCGFETHADEQAALNIARSWLFLRSQEYKKYQTNKTTGNTDKRAFVETWQSFYRKKLKEVWKPAV

SEQ ID NO: 33787 - protein, 978 aa, synthetic construct
  REGION 1..978: note = engineered CasX variant
QEIKRINKIRRRLVKDSNTKKAGKTGPMKTLLVRVMTPDLRERLENLRKKPPNIPQPISNTSRANLNKLLTDYTEMKKAILHVYWEEFQKDPVGLMSRVAQPASKKIDQNKLKPEMDEKGNLTTAGFACSQCGQPLFVYKLEQVSEKGKAYTNYFGRCNVAEHEKLILLYQLKPEKDSDEAVTYSLGKFGQRALDFYSIHVTKESTHPVKPLAQIAGNRYASHPVGKALSDACMGTIASFLSKYQDIIIEHQKVVKGNQKRLESLRELAGKENLEYPSVTLPPQPHTKEGVDAYNEVIARVRMWVNLNLWQKLKLSRDDAKPLLRLKGFPSFPLVERQANEVDWWDMVCNVKKLINEKKEDGKVFWQNLAGYKRQEALRPYLSSEEDRKKGKKFARYQLGDLLLHLEKKHGEDWGKVYDEAWERIDKKVEGLSKHIKLEEERRSEDAQSKAALTDWLRAKASFVIEGLKEADKDEFCRCELKLQKWYGDLRGKPFAIEAENSILDISGFSKQYNCAFIWQKDGVKKLNLYLIINYFKGGKLRFKKIKPEAFEANRFYTVINKKSGEIVPMEVNFNFDDPNLIILPLAFGKRQGREFIWNDLLSLETGSLKLANGRVIEKTLYNRRTRQDEPALFVALTFERREVLDSSNIKPMNLIGVDRGENIPAVIALTDPEGCPLSRFKDSLGNPTHILRIGESYKEKQRTIQAKKEVEQRRAGGYSRKYASKAKNLADDMVRNTARDLLYYAVTQDAMLIFENLSRGFGRQGKRTFMAERQYTRMEDWLTAKLAYEGLPSKTYLSKTLAQYTSKTCSNCGFTITSADYDRVLEKLKKTATGWMTTINGKELKVEGQITYYNRYKRQNVVKDLSVELDRLSEESVNNDISSWTKGRSGEALSLLKKRFSHRPVQEKFVCLNCGFETHADEQAALNIARSWLFLRSQEYKKYQTNKTTGNTDKRAFVETWQSFYRKKLKEVWKPAV

SEQ ID NO: 33788 - protein, 978 aa, synthetic construct
  REGION 1..978: note = engineered CasX variant
QEIKRINKIRRRLVKDSNTKKAGKTGPMKTLLVRVMTPDLRERLENLRKKPPNIPQPISNTSRANLNKLLTDYTEMKKAILHVYWEEFQKDPVGLMSRVAQPASKKIDQNKLKPEMDEKGNLTTAGFACSQCGQPLFVYKLEQVSEKGKAYTNYFGRCNVAEHEKLILLYQLKPEKDSDEAVTYSLGKFGQRALDFYSIHVTKESTHPVKPLAQIAGNRYASSPVGKALSDACMGTIASFLSKYQDIIIEHQKVVKGNQKRLESLRELAGKENLEYPSVTLPPQPHTKEGVDAYNEVIARVRMWVNLNLWQKLKLSRDDAKPLLRLKGFPSFPLVERQANEVDWWDMVCNVKKLINEKKEDGKVFWQNLAGYKRQEALRPYLSSEEDRKKGKKFARYQLGDLLLHLEKKHGEDWGKVYDEAWERIDKKVEGLSKHIKLEEERRSEDAQSKAALTDWLRAKASFVIEGLKEADKDEFCRCELKLQKWYGDLRGKPFAIEAENSILDISGFSKQYNCAFIWQKDGVKKLNLYLIINYFKGGKLRFKKIKPEAFEANRFYTVINKKSGEIVPMEVNFNFDDPNLIILPLAFGKRQGREFIWNDLLSLETGSLKLANGRVIEKTLYNRRTRQDEPALFVALTFERREVLDSSNIKPMNLIGVDRGENIPAVIALTDPEGCPLSRFKDSLGNPTHILRIGESYKEKQRTIQAKKEVEQRRAGGYSRKYASKAKNLADDMVRNTARDLLYYAVTQDAMLIFENLSRGFGRQGKRTFMAERQYTRMEDWLTAKLAYEGLPSKTYLSKTLAQYTSKTCSNCGFTITSADYDRVLEKLKKTATGWMTTINGKELKVEGQITYYNRYKRQNVVKDLSVELDRLSEESVNNDISSWTKGRSGEALSLLKKRFSHRPVQEKFVCLNCGFETHADEQAALNIARSWLFLRSQEYKKYQTNKTTGNTDKRAFVETWQSFYRKKLKEVWKPAV

SEQ ID NO: 33789 - protein, 978 aa, synthetic construct
  REGION 1..978: note = engineered CasX variant
QEIKRINKIRRRLVKDSNTKKAGKTGPMKTLLVRVMTPDLRERLENLRKKPPNIPQPISNTSRANLNKLLTDYTEMKKAILHVYWEEFQKDPVGLMSRVAQPASKKIDQNKLKPEMDEKGNLTTAGFACSQCGQPLFVYKLEQVSEKGKAYTNYFGRCNVAEHEKLILLYQLKPEKDSDEAVTYSLGKFGQRALDFYSIHVTKESTHPVKPLAQIAGNRYASTPVGKALSDACMGTIASFLSKYQDIIIEHQKVVKGNQKRLESLRELAGKENLEYPSVTLPPQPHTKEGVDAYNEVIARVRMWVNLNLWQKLKLSRDDAKPLLRLKGFPSFPLVERQANEVDWWDMVCNVKKLINEKKEDGKVFWQNLAGYKRQEALRPYLSSEEDRKKGKKFARYQLGDLLLHLEKKHGEDWGKVYDEAWERIDKKVEGLSKHIKLEEERRSEDAQSKAALTDWLRAKASFVIEGLKEADKDEFCRCELKLQKWYGDLRGKPFAIEAENSILDISGFSKQYNCAFIWQKDGVKKLNLYLIINYFKGGKLRFKKIKPEAFEANRFYTVINKKSGEIVPMEVNFNFDDPNLIILPLAFGKRQGREFIWNDLLSLETGSLKLANGRVIEKTLYNRRTRQDEPALFVALTFERREVLDSSNIKPMNLIGVDRGENIPAVIALTDPEGCPLSRFKDSLGNPTHILRIGESYKEKQRTIQAKKEVEQRRAGGYSRKYASKAKNLADDMVRNTARDLLYYAVTQDAMLIFENLSRGFGRQGKRTFMAERQYTRMEDWLTAKLAYEGLPSKTYLSKTLAQYTSKTCSNCGFTITSADYDRVLEKLKKTATGWMTTINGKELKVEGQITYYNRYKRQNVVKDLSVELDRLSEESVNNDISSWTKGRSGEALSLLKKRFSHRPVQEKFVCLNCGFETHADEQAALNIARSWLFLRSQEYKKYQTNKTTGNTDKRAFVETWQSFYRKKLKEVWKPAV

SEQ ID NO: 33790 - protein, 978 aa, synthetic construct
  REGION 1..978: note = engineered CasX variant
QEIKRINKIRRRLVKDSNTKKAGKTGPMKTLLVRVMTPDLRERLENLRKKPPNIPQPISNTSRANLNKLLTDYTEMKKAILHVYWEEFQKDPVGLMSRVAQPASKKIDQNKLKPEMDEKGNLTTAGFACSQCGQPLFVYKLEQVSEKGKAYTNYFGRCNVAEHEKLILLYQLKPEKDSDEAVTYSLGKFGQRALDFYSIHVTKESTHPVKPLAQIAGNRYASAPVGKALSDACMGTIASFLSKYQDIIIEHQKVVKGNQKRLESLRELAGKENLEYPSVTLPPQPHTKEGVDAYNEVIARVRMWVNLNLWQKLKLSRDDAKPLLRLKGFPSFPLVERQANEVDWWDMVCNVKKLINEKKEDGKVFWQNLAGYKRQEALRPYLSSEEDRKKGKKFARYQLGDLLLHLEKKHGEDWGKVYDEAWERIDKKVEGLSKHIKLEEERRSEDAQSKAALTDWLRAKASFVIEGLKEADKDEFCRCELKLQKWYGDLRGKPFAIEAENSILDISGFSKQYNCAFIWQKDGVKKLNLYLIINYFKGGKLRFKKIKPEAFEANRFYTVINKKSGEIVPMEVNFNFDDPNLIILPLAFGKRQGREFIWNDLLSLETGSLKLANGRVIEKTLYNRRTRQDEPALFVALTFERREVLDSSNIKPMNLIGVDRGENIPAVIALTDPEGCPLSRFKDSLGNPTHILRIGESYKEKQRTIQAKKEVEQRRAGGYSRKYASKAKNLADDMVRNTARDLLYYAVTQDAMLIFENLSRGFGRQGKRTFMAERQYTRMEDWLTAKLAYEGLPSKTYLSKTLAQYTSKTCSNCGFTITSADYDRVLEKLKKTATGWMTTINGKELKVEGQITYYNRYKRQNVVKDLSVELDRLSEESVNNDISSWTKGRSGEALSLLKKRFSHRPVQEKFVCLNCGFETHADEQAALNIARSWLFLRSQEYKKYQTNKTTGNTDKRAFVETWQSFYRKKLKEVWKPAV

SEQ ID NO: 33791 - protein, 978 aa, synthetic construct
  REGION 1..978: note = engineered CasX variant
QEIKRINKIRRRLVKDSNTKKAGKTGPMKTLLVRVMTPDLRERLENLRKKPPNIPQPISNTSRANLNKLLTDYTEMKKAILHVYWEEFQKDPVGLMSRVAQPASKKIDQNKLKPEMDEKGNLTTAGFACSQCGQPLFVYKLEQVSEKGKAYTNYFGRCNVAEHEKLILLYQLKPEKDSDEAVTYSLGKFGQRALDFYSIHVTKESTHPVKPLAQIAGNRYASVPVGKALSDACMGTIASFLSKYQDIIIEHQKVVKGNQKRLESLRELAGKENLEYPSVTLPPQPHTKEGVDAYNEVIARVRMWVNLNLWQKLKLSRDDAKPLLRLKGFPSFPLVERQANEVDWWDMVCNVKKLINEKKEDGKVFWQNLAGYKRQEALRPYLSSEEDRKKGKKFARYQLGDLLLHLEKKHGEDWGKVYDEAWERIDKKVEGLSKHIKLEEERRSEDAQSKAALTDWLRAKASFVIEGLKEADKDEFCRCELKLQKWYGDLRGKPFAIEAENSILDISGFSKQYNCAFIWQKDGVKKLNLYLIINYFKGGKLRFKKIKPEAFEANRFYTVINKKSGEIVPMEVNFNFDDPNLIILPLAFGKRQGREFIWNDLLSLETGSLKLANGRVIEKTLYNRRTRQDEPALFVALTFERREVLDSSNIKPMNLIGVDRGENIPAVIALTDPEGCPLSRFKDSLGNPTHILRIGESYKEKQRTIQAKKEVEQRRAGGYSRKYASKAKNLADDMVRNTARDLLYYAVTQDAMLIFENLSRGFGRQGKRTFMAERQYTRMEDWLTAKLAYEGLPSKTYLSKTLAQYTSKTCSNCGFTITSADYDRVLEKLKKTATGWMTTINGKELKVEGQITYYNRYKRQNVVKDLSVELDRLSEESVNNDISSWTKGRSGEALSLLKKRFSHRPVQEKFVCLNCGFETHADEQAALNIARSWLFLRSQEYKKYQTNKTTGNTDKRAFVETWQSFYRKKLKEVWKPAV

SEQ ID NO: 33792 - protein, 978 aa, synthetic construct
  REGION 1..978: note = engineered CasX variant
QEIKRINKIRRRLVKDSNTKKAGKTGPMKTLLVRVMTPDLRERLENLRKKPPNIPQPISNTSRANLNKLLTDYTEMKKAILHVYWEEFQKDPVGLMSRVAQPASKKIDQNKLKPEMDEKGNLTTAGFACSQCGQPLFVYKLEQVSEKGKAYTNYFGRCNVAEHEKLIKLYQLKPEKDSDEAVTYSLGKFGQRALDFYSIHVTKESTHPVKPLAQIAGNRYASGPVGKALSDACMGTIASFLSKYQDIIIEHQKVVKGNQKRLESLRELAGKENLEYPSVTLPPQPHTKEGVDAYNEVIARVRMWVNLNLWQKLKLSRDDAKPLLRLKGFPSFPLVERQANEVDWWDMVCNVKKLINEKKEDGKVFWQNLAGYKRQEALRPYLSSEEDRKKGKKFARYQLGDLLLHLEKKHGEDWGKVYDEAWERIDKKVEGLSKHIKLEEERRSEDAQSKAALTDWLRAKASFVIEGLKEADKDEFCRCELKLQKWYGDLRGKPFAIEAENSILDISGFSKQYNCAFIWQKDGVKKLNLYLIINYFKGGKLRFKKIKPEAFEANRFYTVINKKSGEIVPMEVNFNFDDPNLIILPLAFGKRQGREFIWNDLLSLETGSLKLANGRVIEKTLYNRRTRQDEPALFVALTFERREVLDSSNIKPMNLIGVDRGENIPAVIALTDPEGCPLSRFKDSLGNPTHILRIGESYKEKQRTIQAKKEVEQRRAGGYSRKYASKAKNLADDMVRNTARDLLYYAVTQDAMLIFENLSRGFGRQGKRTFMAERQYTRMEDWLTAKLAYEGLPSKTYLSKTLAQYTSKTCSNCGFTITSADYDRVLEKLKKTATGWMTTINGKELKVEGQITYYNRYKRQNVVKDLSVELDRLSEESVNNDISSWTKGRSGEALSLLKKRFSHRPVQEKFVCLNCGFETHADEQAALNIARSWLFLRSQEYKKYQTNKTTGNTDKRAFVETWQSFYRKKLKEVWKPAV

SEQ ID NO: 33793 - protein, 977 aa, synthetic construct
  REGION 1..977: note = engineered CasX variant
QEIKRINKIRRRLVKDSNTKKAGKTGPMKTLLVRVMTPDLRERLENLRKKPPNIPQPISNTSRANLNKLLTDYTEMKKAILHVYWEEFQKDPVGLMSRVAQPASKKIDQNKLKPEMDEKGNLTTAGFACSQCGQPLFVYKLEQVSEKGKAYTNYFGRCNVAEHEKLILLYQLKPEKDSDEAVTYSLGKFGQRALDFYSIHVTKESTHPVKPLAQIAGNRYASPVGKALSDACMGTIASFLSKYQDIIIEHQKVVKGNQKRLESLRELAGKENLEYPSVTLPPQPHTKEGVDAYNEVIARVRMWVNLNLWQKLKLSRDDAKPLLRLKGFPSFPLVERQANEVDWWDMVCNVKKLINEKKEDGKVFWQNLAGYKRQEALRPYLSSEEDRKKGKKFARYQLGDLLLHLEKKHGEDWGKVYDEAWERIDKKVEGLSKHIKLEEERRSEDAQSKAALTDWLRAKASFVIEGLKEADKDEFCRCELKLQKWYGDLRGKPFAIEAENSILDISGFSKQYNCAFIWQKDGVKKLNLYLIINYFKGGKLRFKKIKPEAFEANRFYTVINKKSGEIVPMEVNFNFDDPNLIILPLAFGKRQGREFIWNDLLSLETGSLKLANGRVIEKTLYNRRTRQDEPALFVALTFERREVLDSSNIKPMNLIGVDRGENIPAVIALTDPEGCPLSRFKDSLGNPTHILRIGESYKEKQRTIQAKKEVEQRRAGGYSRKYASKAKNLADDMVRNTARDLLYYAVTQDAMLIFENLSRGFGRQGKRTFMAERQYTRMEDWLTAKLAYEGLPSKTYLSKTLAQYTSKTCSNCGFTITSADYDRVLEKLKKTATGWMTTINGKELKVEGQITYYNRYKRQNVVKDLSVELDRLSEESVNNDISSWTKGRSGEALSLLKKRFSHRPVQEKFVCLNCGFETHADEQAALNIARSWLFLRSQEYKKYQTNKTTGNTDKRAFVETWQSFYRKKLKEVWKPAV

SEQ ID NO: 33794 - protein, 978 aa, synthetic construct
  REGION 1..978: note = engineered CasX variant
QEIKRINKIRRRLVKDSNTKKAGKTGPMKTLLVRVMTPDLRERLENLRKKPPNIPQPISNTSRANLNKLLTDYTEMKKAILHVYWEEFQKDPVGLMSRVAQPASKKIDQNKLKPEMDEKGNLTTAGFACSQCGQPLFVYKLEQVSEKGKAYTNYFGRCNVAEHEKLILLSQLKPEKDSDEAVTYSLGKFGQRALDFYSIHVTKESTHPVKPLAQIAGNRYASYPVGKALSDACMGTIASFLSKYQDIIIEHQKVVKGNQKRLESLRELAGKENLEYPSVTLPPQPHTKEGVDAYNEVIARVRMWVNLNLWQKLKLSRDDAKPLLRLKGFPSFPLVERQANEVDWWDMVCNVKKLINEKKEDGKVFWQNLAGYKRQEALRPYLSSEEDRKKGKKFARYQLGDLLLHLEKKHGEDWGKVYDEAWERIDKKVEGLSKHIKLEEERRSEDAQSKAALTDWLRAKASFVIEGLKEADKDEFCRCELKLQKWYGDLRGKPFAIEAENSILDISGFSKQYNCAFIWQKDGVKKLNLYLIINYFKGGKLRFKKIKPEAFEANRFYTVINKKSGEIVPMEVNFNFDDPNLIILPLAFGKRQGREFIWNDLLSLETGSLKLANGRVIEKTLYNRRTRQDEPALFVALTFERREVLDSSNIKPMNLIGVDRGENIPAVIALTDPEGCPLSRFKDSLGNPTHILRIGESYKEKQRTIQAKKEVEQRRAGGYSRKYASKAKNLADDMVRNTARDLLYYAVTQDAMLIFENLSRGFGRQGKRTFMAERQYTRMEDWLTAKLAYEGLPSKTYLSKTLAQYTSKTCSNCGFTITSADYDRVLEKLKKTATGWMTTINGKELKVEGQITYYNRYKRQNVVKDLSVELDRLSEESVNNDISSWTKGRSGEALSLLKKRFSHRPVQEKFVCLNCGFETHADEQAALNIARSWLFLRSQEYKKYQTNKTTGNTDKRAFVETWQSFYRKKLKEVWKPAV

SEQ ID NO: 33795 - protein, 978 aa, synthetic construct
  REGION 1..978: note = engineered CasX variant
QEIKRINKIRRRLVKDSNTKKAGKTGPMKTLLVRVMTPDLRERLENLRKKPPNIPQPISNTSRANLNKLLTDYTEMKKAILHVYWEEFQKDPVGLMSRVAQPASKKIDQNKLKPEMDEKGNLTTAGFACSQCGQPLFVYKLEQVSEKGKAYTNYFGRCNVAEHEKLILLSQLKPEKDSDEAVTYSLGKFGQRALDFYSIHVTKESTHPVKPLAQIAGNRYASHPVGKALSDACMGTIASFLSKYQDIIIEHQKVVKGNQKRLESLRELAGKENLEYPSVTLPPQPHTKEGVDAYNEVIARVRMWVNLNLWQKLKLSRDDAKPLLRLKGFPSFPLVERQANEVDWWDMVCNVKKLINEKKEDGKVFWQNLAGYKRQEALRPYLSSEEDRKKGKKFARYQLGDLLLHLEKKHGEDWGKVYDEAWERIDKKVEGLSKHIKLEEERRSEDAQSKAALTDWLRAKASFVIEGLKEADKDEFCRCELKLQKWYGDLRGKPFAIEAENSILDISGFSKQYNCAFIWQKDGVKKLNLYLIINYFKGGKLRFKKIKPEAFEANRFYTVINKKSGEIVPMEVNFNFDDPNLIILPLAFGKRQGREFIWNDLLSLETGSLKLANGRVIEKTLYNRRTRQDEPALFVALTFERREVLDSSNIKPMNLIGVDRGENIPAVIALTDPEGCPLSRFKDSLGNPTHILRIGESYKEKQRTIQAKKEVEQRRAGGYSRKYASKAKNLADDMVRNTARDLLYYAVTQDAMLIFENLSRGFGRQGKRTFMAERQYTRMEDWLTAKLAYEGLPSKTYLSKTLAQYTSKTCSNCGFTITSADYDRVLEKLKKTATGWMTTINGKELKVEGQITYYNRYKRQNVVKDLSVELDRLSEESVNNDISSWTKGRSGEALSLLKKRFSHRPVQEKFVCLNCGFETHADEQAALNIARSWLFLRSQEYKKYQTNKTTGNTDKRAFVETWQSFYRKKLKEVWKPAV

SEQ ID NO: 33796 - protein, 978 aa, synthetic construct
  REGION 1..978: note = engineered CasX variant
QEIKRINKIRRRLVKDSNTKKAGKTGPMKTLLVRVMTPDLRERLENLRKKPPNIPQPISNTSRANLNKLLTDYTEMKKAILHVYWEEFQKDPVGLMSRVAQPASKKIDQNKLKPEMDEKGNLTTAGFACSQCGQPLFVYKLEQVSEKGKAYTNYFGRCNVAEHEKLILLSQLKPEKDSDEAVTYSLGKFGQRALDFYSIHVTKESTHPVKPLAQIAGNRYASSPVGKALSDACMGTIASFLSKYQDIIIEHQKVVKGNQKRLESLRELAGKENLEYPSVTLPPQPHTKEGVDAYNEVIARVRMWVNLNLWQKLKLSRDDAKPLLRLKGFPSFPLVERQANEVDWWDMVCNVKKLINEKKEDGKVFWQNLAGYKRQEALRPYLSSEEDRKKGKKFARYQLGDLLLHLEKKHGEDWGKVYDEAWERIDKKVEGLSKHIKLEEERRSEDAQSKAALTDWLRAKASFVIEGLKEADKDEFCRCELKLQKWYGDLRGKPFAIEAENSILDISGFSKQYNCAFIWQKDGVKKLNLYLIINYFKGGKLRFKKIKPEAFEANRFYTVINKKSGEIVPMEVNFNFDDPNLIILPLAFGKRQGREFIWNDLLSLETGSLKLANGRVIEKTLYNRRTRQDEPALFVALTFERREVLDSSNIKPMNLIGVDRGENIPAVIALTDPEGCPLSRFKDSLGNPTHILRIGESYKEKQRTIQAKKEVEQRRAGGYSRKYASKAKNLADDMVRNTARDLLYYAVTQDAMLIFENLSRGFGRQGKRTFMAERQYTRMEDWLTAKLAYEGLPSKTYLSKTLAQYTSKTCSNCGFTITSADYDRVLEKLKKTATGWMTTINGKELKVEGQITYYNRYKRQNVVKDLSVELDRLSEESVNNDISSWTKGRSGEALSLLKKRFSHRPVQEKFVCLNCGFETHADEQAALNIARSWLFLRSQEYKKYQTNKTTGNTDKRAFVETWQSFYRKKLKEVWKPAV

SEQ ID NO: 33797 - protein, 978 aa, synthetic construct
  REGION 1..978: note = engineered CasX variant
QEIKRINKIRRRLVKDSNTKKAGKTGPMKTLLVRVMTPDLRERLENLRKKPPNIPQPISNTSRANLNKLLTDYTEMKKAILHVYWEEFQKDPVGLMSRVAQPASKKIDQNKLKPEMDEKGNLTTAGFACSQCGQPLFVYKLEQVSEKGKAYTNYFGRCNVAEHEKLILLSQLKPEKDSDEAVTYSLGKFGQRALDFYSIHVTKESTHPVKPLAQIAGNRYASTPVGKALSDACMGTIASFLSKYQDIIIEHQKVVKGNQKRLESLRELAGKENLEYPSVTLPPQPHTKEGVDAYNEVIARVRMWVNLNLWQKLKLSRDDAKPLLRLKGFPSFPLVERQANEVDWWDMVCNVKKLINEKKEDGKVFWQNLAGYKRQEALRPYLSSEEDRKKGKKFARYQLGDLLLHLEKKHGEDWGKVYDEAWERIDKKVEGLSKHIKLEEERRSEDAQSKAALTDWLRAKASFVIEGLKEADKDEFCRCELKLQKWYGDLRGKPFAIEAENSILDISGFSKQYNCAFIWQKDGVKKLNLYLIINYFKGGKLRFKKIKPEAFEANRFYTVINKKSGEIVPMEVNFNFDDPNLIILPLAFGKRQGREFIWNDLLSLETGSLKLANGRVIEKTLYNRRTRQDEPALFVALTFERREVLDSSNIKPMNLIGVDRGENIPAVIALTDPEGCPLSRFKDSLGNPTHILRIGESYKEKQRTIQAKKEVEQRRAGGYSRKYASKAKNLADDMVRNTARDLLYYAVTQDAMLIFENLSRGFGRQGKRTFMAERQYTRMEDWLTAKLAYEGLPSKTYLSKTLAQYTSKTCSNCGFTITSADYDRVLEKLKKTATGWMTTINGKELKVEGQITYYNRYKRQNVVKDLSVELDRLSEESVNNDISSWTKGRSGEALSLLKKRFSHRPVQEKFVCLNCGFETHADEQAALNIARSWLFLRSQEYKKYQTNKTTGNTDKRAFVETWQSFYRKKLKEVWKPAV

SEQ ID NO: 33798 - protein, 978 aa, synthetic construct
  REGION 1..978: note = engineered CasX variant
QEIKRINKIRRRLVKDSNTKKAGKTGPMKTLLVRVMTPDLRERLENLRKKPPNIPQPISNTSRANLNKLLTDYTEMKKAILHVYWEEFQKDPVGLMSRVAQPASKKIDQNKLKPEMDEKGNLTTAGFACSQCGQPLFVYKLEQVSEKGKAYTNYFGRCNVAEHEKLILLSQLKPEKDSDEAVTYSLGKFGQRALDFYSIHVTKESTHPVKPLAQIAGNRYASAPVGKALSDACMGTIASFLSKYQDIIIEHQKVVKGNQKRLESLRELAGKENLEYPSVTLPPQPHTKEGVDAYNEVIARVRMWVNLNLWQKLKLSRDDAKPLLRLKGFPSFPLVERQANEVDWWDMVCNVKKLINEKKEDGKVFWQNLAGYKRQEALRPYLSSEEDRKKGKKFARYQLGDLLLHLEKKHGEDWGKVYDEAWERIDKKVEGLSKHIKLEEERRSEDAQSKAALTDWLRAKASFVIEGLKEADKDEFCRCELKLQKWYGDLRGKPFAIEAENSILDISGFSKQYNCAFIWQKDGVKKLNLYLIINYFKGGKLRFKKIKPEAFEANRFYTVINKKSGEIVPMEVNFNFDDPNLIILPLAFGKRQGREFIWNDLLSLETGSLKLANGRVIEKTLYNRRTRQDEPALFVALTFERREVLDSSNIKPMNLIGVDRGENIPAVIALTDPEGCPLSRFKDSLGNPTHILRIGESYKEKQRTIQAKKEVEQRRAGGYSRKYASKAKNLADDMVRNTARDLLYYAVTQDAMLIFENLSRGFGRQGKRTFMAERQYTRMEDWLTAKLAYEGLPSKTYLSKTLAQYTSKTCSNCGFTITSADYDRVLEKLKKTATGWMTTINGKELKVEGQITYYNRYKRQNVVKDLSVELDRLSEESVNNDISSWTKGRSGEALSLLKKRFSHRPVQEKFVCLNCGFETHADEQAALNIARSWLFLRSQEYKKYQTNKTTGNTDKRAFVETWQSFYRKKLKEVWKPAV

SEQ ID NO: 33799 - protein, 978 aa, synthetic construct
  REGION 1..978: note = engineered CasX variant
QEIKRINKIRRRLVKDSNTKKAGKTGPMKTLLVRVMTPDLRERLENLRKKPPNIPQPISNTSRANLNKLLTDYTEMKKAILHVYWEEFQKDPVGLMSRVAQPASKKIDQNKLKPEMDEKGNLTTAGFACSQCGQPLFVYKLEQVSEKGKAYTNYFGRCNVAEHEKLILLSQLKPEKDSDEAVTYSLGKFGQRALDFYSIHVTKESTHPVKPLAQIAGNRYASVPVGKALSDACMGTIASFLSKYQDIIIEHQKVVKGNQKRLESLRELAGKENLEYPSVTLPPQPHTKEGVDAYNEVIARVRMWVNLNLWQKLKLSRDDAKPLLRLKGFPSFPLVERQANEVDWWDMVCNVKKLINEKKEDGKVFWQNLAGYKRQEALRPYLSSEEDRKKGKKFARYQLGDLLLHLEKKHGEDWGKVYDEAWERIDKKVEGLSKHIKLEEERRSEDAQSKAALTDWLRAKASFVIEGLKEADKDEFCRCELKLQKWYGDLRGKPFAIEAENSILDISGFSKQYNCAFIWQKDGVKKLNLYLIINYFKGGKLRFKKIKPEAFEANRFYTVINKKSGEIVPMEVNFNFDDPNLIILPLAFGKRQGREFIWNDLLSLETGSLKLANGRVIEKTLYNRRTRQDEPALFVALTFERREVLDSSNIKPMNLIGVDRGENIPAVIALTDPEGCPLSRFKDSLGNPTHILRIGESYKEKQRTIQAKKEVEQRRAGGYSRKYASKAKNLADDMVRNTARDLLYYAVTQDAMLIFENLSRGFGRQGKRTFMAERQYTRMEDWLTAKLAYEGLPSKTYLSKTLAQYTSKTCSNCGFTITSADYDRVLEKLKKTATGWMTTINGKELKVEGQITYYNRYKRQNVVKDLSVELDRLSEESVNNDISSWTKGRSGEALSLLKKRFSHRPVQEKFVCLNCGFETHADEQAALNIARSWLFLRSQEYKKYQTNKTTGNTDKRAFVETWQSFYRKKLKEVWKPAV

SEQ ID NO: 33800 - protein, 978 aa, synthetic construct
  REGION 1..978: note = engineered CasX variant
QEIKRINKIRRRLVKDSNTKKAGKTGPMKTLLVRVMTPDLRERLENLRKKPPNIPQPISNTSRANLNKLLTDYTEMKKAILHVYWEEFQKDPVGLMSRVAQPASKKIDQNKLKPEMDEKGNLTTAGFACSQCGQPLFVYKLEQVSEKGKAYTNYFGRCNVAEHEKLIKLSQLKPEKDSDEAVTYSLGKFGQRALDFYSIHVTKESTHPVKPLAQIAGNRYASGPVGKALSDACMGTIASFLSKYQDIIIEHQKVVKGNQKRLESLRELAGKENLEYPSVTLPPQPHTKEGVDAYNEVIARVRMWVNLNLWQKLKLSRDDAKPLLRLKGFPSFPLVERQANEVDWWDMVCNVKKLINEKKEDGKVFWQNLAGYKRQEALRPYLSSEEDRKKGKKFARYQLGDLLLHLEKKHGEDWGKVYDEAWERIDKKVEGLSKHIKLEEERRSEDAQSKAALTDWLRAKASFVIEGLKEADKDEFCRCELKLQKWYGDLRGKPFAIEAENSILDISGFSKQYNCAFIWQKDGVKKLNLYLIINYFKGGKLRFKKIKPEAFEANRFYTVINKKSGEIVPMEVNFNFDDPNLIILPLAFGKRQGREFIWNDLLSLETGSLKLANGRVIEKTLYNRRTRQDEPALFVALTFERREVLDSSNIKPMNLIGVDRGENIPAVIALTDPEGCPLSRFKDSLGNPTHILRIGESYKEKQRTIQAKKEVEQRRAGGYSRKYASKAKNLADDMVRNTARDLLYYAVTQDAMLIFENLSRGFGRQGKRTFMAERQYTRMEDWLTAKLAYEGLPSKTYLSKTLAQYTSKTCSNCGFTITSADYDRVLEKLKKTATGWMTTINGKELKVEGQITYYNRYKRQNVVKDLSVELDRLSEESVNNDISSWTKGRSGEALSLLKKRFSHRPVQEKFVCLNCGFETHADEQAALNIARSWLFLRSQEYKKYQTNKTTGNTDKRAFVETWQSFYRKKLKEVWKPAV

SEQ ID NO: 33801 - protein, 977 aa, synthetic construct
  REGION 1..977: note = engineered CasX variant
QEIKRINKIRRRLVKDSNTKKAGKTGPMKTLLVRVMTPDLRERLENLRKKPPNIPQPISNTSRANLNKLLTDYTEMKKAILHVYWEEFQKDPVGLMSRVAQPASKKIDQNKLKPEMDEKGNLTTAGFACSQCGQPLFVYKLEQVSEKGKAYTNYFGRCNVAEHEKLILLSQLKPEKDSDEAVTYSLGKFGQRALDFYSIHVTKESTHPVKPLAQIAGNRYASPVGKALSDACMGTIASFLSKYQDIIIEHQKVVKGNQKRLESLRELAGKENLEYPSVTLPPQPHTKEGVDAYNEVIARVRMWVNLNLWQKLKLSRDDAKPLLRLKGFPSFPLVERQANEVDWWDMVCNVKKLINEKKEDGKVFWQNLAGYKRQEALRPYLSSEEDRKKGKKFARYQLGDLLLHLEKKHGEDWGKVYDEAWERIDKKVEGLSKHIKLEEERRSEDAQSKAALTDWLRAKASFVIEGLKEADKDEFCRCELKLQKWYGDLRGKPFAIEAENSILDISGFSKQYNCAFIWQKDGVKKLNLYLIINYFKGGKLRFKKIKPEAFEANRFYTVINKKSGEIVPMEVNFNFDDPNLIILPLAFGKRQGREFIWNDLLSLETGSLKLANGRVIEKTLYNRRTRQDEPALFVALTFERREVLDSSNIKPMNLIGVDRGENIPAVIALTDPEGCPLSRFKDSLGNPTHILRIGESYKEKQRTIQAKKEVEQRRAGGYSRKYASKAKNLADDMVRNTARDLLYYAVTQDAMLIFENLSRGFGRQGKRTFMAERQYTRMEDWLTAKLAYEGLPSKTYLSKTLAQYTSKTCSNCGFTITSADYDRVLEKLKKTATGWMTTINGKELKVEGQITYYNRYKRQNVVKDLSVELDRLSEESVNNDISSWTKGRSGEALSLLKKRFSHRPVQEKFVCLNCGFETHADEQAALNIARSWLFLRSQEYKKYQTNKTTGNTDKRAFVETWQSFYRKKLKEVWKPAV

SEQ ID NO: 33802 - protein, 978 aa, synthetic construct
  REGION 1..978: note = engineered CasX variant
QEIKRINKIRRRLVKDSNTKKAGKTGPMKTLLVRVMTPDLRERLENLRKKPPNIPQPISNTSRANLNKLLTDYTEMKKAILHVYWEEFQKDPVGLMSRVAQPASKKIDQNKLKPEMDEKGNLTTAGFACSQCGQPLFVYKLEQVSEKGKAYTNYFGRCNVAEHEKLILLAQLKPEKDSDEAVTYSLGKFGQRALDFYSIHVTKESTHPVKPLAQIAGNRYASYPVGKALSDACMGTIASFLSKYQDIIIEHQKVVKGNQKRLESLRELAGKENLEYPSVTLPPQPHTKEGVDAYNEVIARVRMWVNLNLWQKLKLSRDDAKPLLRLKGFPSFPLVERQANEVDWWDMVCNVKKLINEKKEDGKVFWQNLAGYKRQEALRPYLSSEEDRKKGKKFARYQLGDLLLHLEKKHGEDWGKVYDEAWERIDKKVEGLSKHIKLEEERRSEDAQSKAALTDWLRAKASFVIEGLKEADKDEFCRCELKLQKWYGDLRGKPFAIEAENSILDISGFSKQYNCAFIWQKDGVKKLNLYLIINYFKGGKLRFKKIKPEAFEANRFYTVINKKSGEIVPMEVNFNFDDPNLIILPLAFGKRQGREFIWNDLLSLETGSLKLANGRVIEKTLYNRRTRQDEPALFVALTFERREVLDSSNIKPMNLIGVDRGENIPAVIALTDPEGCPLSRFKDSLGNPTHILRIGESYKEKQRTIQAKKEVEQRRAGGYSRKYASKAKNLADDMVRNTARDLLYYAVTQDAMLIFENLSRGFGRQGKRTFMAERQYTRMEDWLTAKLAYEGLPSKTYLSKTLAQYTSKTCSNCGFTITSADYDRVLEKLKKTATGWMTTINGKELKVEGQITYYNRYKRQNVVKDLSVELDRLSEESVNNDISSWTKGRSGEALSLLKKRFSHRPVQEKFVCLNCGFETHADEQAALNIARSWLFLRSQEYKKYQTNKTTGNTDKRAFVETWQSFYRKKLKEVWKPAV

SEQ ID NO: 33803 - protein, 978 aa, synthetic construct
  REGION 1..978: note = engineered CasX variant
QEIKRINKIRRRLVKDSNTKKAGKTGPMKTLLVRVMTPDLRERLENLRKKPPNIPQPISNTSRANLNKLLTDYTEMKKAILHVYWEEFQKDPVGLMSRVAQPASKKIDQNKLKPEMDEKGNLTTAGFACSQCGQPLFVYKLEQVSEKGKAYTNYFGRCNVAEHEKLILLAQLKPEKDSDEAVTYSLGKFGQRALDFYSIHVTKESTHPVKPLAQIAGNRYASHPVGKALSDACMGTIASFLSKYQDIIIEHQKVVKGNQKRLESLRELAGKENLEYPSVTLPPQPHTKEGVDAYNEVIARVRMWVNLNLWQKLKLSRDDAKPLLRLKGFPSFPLVERQANEVDWWDMVCNVKKLINEKKEDGKVFWQNLAGYKRQEALRPYLSSEEDRKKGKKFARYQLGDLLLHLEKKHGEDWGKVYDEAWERIDKKVEGLSKHIKLEEERRSEDAQSKAALTDWLRAKASFVIEGLKEADKDEFCRCELKLQKWYGDLRGKPFAIEAENSILDISGFSKQYNCAFIWQKDGVKKLNLYLIINYFKGGKLRFKKIKPEAFEANRFYTVINKKSGEIVPMEVNFNFDDPNLIILPLAFGKRQGREFIWNDLLSLETGSLKLANGRVIEKTLYNRRTRQDEPALFVALTFERREVLDSSNIKPMNLIGVDRGENIPAVIALTDPEGCPLSRFKDSLGNPTHILRIGESYKEKQRTIQAKKEVEQRRAGGYSRKYASKAKNLADDMVRNTARDLLYYAVTQDAMLIFENLSRGFGRQGKRTFMAERQYTRMEDWLTAKLAYEGLPSKTYLSKTLAQYTSKTCSNCGFTITSADYDRVLEKLKKTATGWMTTINGKELKVEGQITYYNRYKRQNVVKDLSVELDRLSEESVNNDISSWTKGRSGEALSLLKKRFSHRPVQEKFVCLNCGFETHADEQAALNIARSWLFLRSQEYKKYQTNKTTGNTDKRAFVETWQSFYRKKLKEVWKPAV

SEQ ID NO: 33804 - protein, 978 aa, synthetic construct
  REGION 1..978: note = engineered CasX variant
QEIKRINKIRRRLVKDSNTKKAGKTGPMKTLLVRVMTPDLRERLENLRKKPPNIPQPISNTSRANLNKLLTDYTEMKKAILHVYWEEFQKDPVGLMSRVAQPASKKIDQNKLKPEMDEKGNLTTAGFACSQCGQPLFVYKLEQVSEKGKAYTNYFGRCNVAEHEKLILLAQLKPEKDSDEAVTYSLGKFGQRALDFYSIHVTKESTHPVKPLAQIAGNRYASTPVGKALSDACMGTIASFLSKYQDIIIEHQKVVKGNQKRLESLRELAGKENLEYPSVTLPPQPHTKEGVDAYNEVIARVRMWVNLNLWQKLKLSRDDAKPLLRLKGFPSFPLVERQANEVDWWDMVCNVKKLINEKKEDGKVFWQNLAGYKRQEALRPYLSSEEDRKKGKKFARYQLGDLLLHLEKKHGEDWGKVYDEAWERIDKKVEGLSKHIKLEEERRSEDAQSKAALTDWLRAKASFVIEGLKEADKDEFCRCELKLQKWYGDLRGKPFAIEAENSILDISGFSKQYNCAFIWQKDGVKKLNLYLIINYFKGGKLRFKKIKPEAFEANRFYTVINKKSGEIVPMEVNFNFDDPNLIILPLAFGKRQGREFIWNDLLSLETGSLKLANGRVIEKTLYNRRTRQDEPALFVALTFERREVLDSSNIKPMNLIGVDRGENIPAVIALTDPEGCPLSRFKDSLGNPTHILRIGESYKEKQRTIQAKKEVEQRRAGGYSRKYASKAKNLADDMVRNTARDLLYYAVTQDAMLIFENLSRGFGRQGKRTFMAERQYTRMEDWLTAKLAYEGLPSKTYLSKTLAQYTSKTCSNCGFTITSADYDRVLEKLKKTATGWMTTINGKELKVEGQITYYNRYKRQNVVKDLSVELDRLSEESVNNDISSWTKGRSGEALSLLKKRFSHRPVQEKFVCLNCGFETHADEQAALNIARSWLFLRSQEYKKYQTNKTTGNTDKRAFVETWQSFYRKKLKEVWKPAV

SEQ ID NO: 33805 - protein, 978 aa, synthetic construct
  REGION 1..978: note = engineered CasX variant
QEIKRINKIRRRLVKDSNTKKAGKTGPMKTLLVRVMTPDLRERLENLRKKPPNIPQPISNTSRANLNKLLTDYTEMKKAILHVYWEEFQKDPVGLMSRVAQPASKKIDQNKLKPEMDEKGNLTTAGFACSQCGQPLFVYKLEQVSEKGKAYTNYFGRCNVAEHEKLILLAQLKPEKDSDEAVTYSLGKFGQRALDFYSIHVTKESTHPVKPLAQIAGNRYASAPVGKALSDACMGTIASFLSKYQDIIIEHQKVVKGNQKRLESLRELAGKENLEYPSVTLPPQPHTKEGVDAYNEVIARVRMWVNLNLWQKLKLSRDDAKPLLRLKGFPSFPLVERQANEVDWWDMVCNVKKLINEKKEDGKVFWQNLAGYKRQEALRPYLSSEEDRKKGKKFARYQLGDLLLHLEKKHGEDWGKVYDEAWERIDKKVEGLSKHIKLEEERRSEDAQSKAALTDWLRAKASFVIEGLKEADKDEFCRCELKLQKWYGDLRGKPFAIEAENSILDISGFSKQYNCAFIWQKDGVKKLNLYLIINYFKGGKLRFKKIKPEAFEANRFYTVINKKSGEIVPMEVNFNFDDPNLIILPLAFGKRQGREFIWNDLLSLETGSLKLANGRVIEKTLYNRRTRQDEPALFVALTFERREVLDSSNIKPMNLIGVDRGENIPAVIALTDPEGCPLSRFKDSLGNPTHILRIGESYKEKQRTIQAKKEVEQRRAGGYSRKYASKAKNLADDMVRNTARDLLYYAVTQDAMLIFENLSRGFGRQGKRTFMAERQYTRMEDWLTAKLAYEGLPSKTYLSKTLAQYTSKTCSNCGFTITSADYDRVLEKLKKTATGWMTTINGKELKVEGQITYYNRYKRQNVVKDLSVELDRLSEESVNNDISSWTKGRSGEALSLLKKRFSHRPVQEKFVCLNCGFETHADEQAALNIARSWLFLRSQEYKKYQTNKTTGNTDKRAFVETWQSFYRKKLKEVWKPAV

SEQ ID NO: 33806 - protein, 978 aa, synthetic construct
  REGION 1..978: note = engineered CasX variant
QEIKRINKIRRRLVKDSNTKKAGKTGPMKTLLVRVMTPDLRERLENLRKKPPNIPQPISNTSRANLNKLLTDYTEMKKAILHVYWEEFQKDPVGLMSRVAQPASKKIDQNKLKPEMDEKGNLTTAGFACSQCGQPLFVYKLEQVSEKGKAYTNYFGRCNVAEHEKLILLAQLKPEKDSDEAVTYSLGKFGQRALDFYSIHVTKESTHPVKPLAQIAGNRYASVPVGKALSDACMGTIASFLSKYQDIIIEHQKVVKGNQKRLESLRELAGKENLEYPSVTLPPQPHTKEGVDAYNEVIARVRMWVNLNLWQKLKLSRDDAKPLLRLKGFPSFPLVERQANEVDWWDMVCNVKKLINEKKEDGKVFWQNLAGYKRQEALRPYLSSEEDRKKGKKFARYQLGDLLLHLEKKHGEDWGKVYDEAWERIDKKVEGLSKHIKLEEERRSEDAQSKAALTDWLRAKASFVIEGLKEADKDEFCRCELKLQKWYGDLRGKPFAIEAENSILDISGFSKQYNCAFIWQKDGVKKLNLYLIINYFKGGKLRFKKIKPEAFEANRFYTVINKKSGEIVPMEVNFNFDDPNLIILPLAFGKRQGREFIWNDLLSLETGSLKLANGRVIEKTLYNRRTRQDEPALFVALTFERREVLDSSNIKPMNLIGVDRGENIPAVIALTDPEGCPLSRFKDSLGNPTHILRIGESYKEKQRTIQAKKEVEQRRAGGYSRKYASKAKNLADDMVRNTARDLLYYAVTQDAMLIFENLSRGFGRQGKRTFMAERQYTRMEDWLTAKLAYEGLPSKTYLSKTLAQYTSKTCSNCGFTITSADYDRVLEKLKKTATGWMTTINGKELKVEGQITYYNRYKRQNVVKDLSVELDRLSEESVNNDISSWTKGRSGEALSLLKKRFSHRPVQEKFVCLNCGFETHADEQAALNIARSWLFLRSQEYKKYQTNKTTGNTDKRAFVETWQSFYRKKLKEVWKPAV

SEQ ID NO: 33807 - protein, 978 aa, synthetic construct
  REGION 1..978: note = engineered CasX variant
QEIKRINKIRRRLVKDSNTKKAGKTGPMKTLLVRVMTPDLRERLENLRKKPPNIPQPISNTSRANLNKLLTDYTEMKKAILHVYWEEFQKDPVGLMSRVAQPASKKIDQNKLKPEMDEKGNLTTAGFACSQCGQPLFVYKLEQVSEKGKAYTNYFGRCNVAEHEKLILLAQLKPEKDSDEAVTYSLGKFGQRALDFYSIHVTKESTHPVKPLAQIAGNRYASYPVGKALSDACMGTIASFLSKYQDIIIEHQKVVKGNQKRLESLRELAGKENLEYPSVTLPPQPHTSEGVDAYNEVIARVRMWVNLNLWQKLKLSRDDAKPLLRLKGFPSFPLVERQANEVDWWDMVCNVKKLINEKKEDGKVFWQNLAGYKRQEALRPYLSSEEDRKKGKKFARYQLGDLLLHLEKKHGEDWGKVYDEAWERIDKKVEGLSKHIKLEEERRSEDAQSKAALTDWLRAKASFVIEGLKEADKDEFCRCELKLQKWYGDLRGKPFAIEAENSILDISGFSKQYNCAFIWQKDGVKKLNLYLIINYFKGGKLRFKKIKPEAFEANRFYTVINKKSGEIVPMEVNFNFDDPNLIILPLAFGKRQGREFIWNDLLSLETGSLKLANGRVIEKTLYNRRTRQDEPALFVALTFERREVLDSSNIKPMNLIGVDRGENIPAVIALTDPEGCPLSRFKDSLGNPTHILRIGESYKEKQRTIQAKKEVEQRRAGGYSRKYASKAKNLADDMVRNTARDLLYYAVTQDAMLIFENLSRGFGRQGKRTFMAERQYTRMEDWLTAKLAYEGLPSKTYLSKTLAQYTSKTCSNCGFTITSADYDRVLEKLKKTATGWMTTINGKELKVEGQITYYNRYKRQNVVKDLSVELDRLSEESVNNDISSWTKGRSGEALSLLKKRFSHRPVQEKFVCLNCGFETHADEQAALNIARSWLFLRSQEYKKYQTNKTTGNTDKRAFVETWQSFYRKKLKEVWKPAV

SEQ ID NO: 33808 - protein, 978 aa, synthetic construct
  REGION 1..978: note = engineered CasX variant
QEIKRINKIRRRLVKDSNTKKAGKTGPMKTLLVRVMTPDLRERLENLRKKPPNIPQPISNTSRANLNKLLTDYTEMKKAILHVYWEEFQKDPVGLMSRVAQPASKKIDQNKLKPEMDEKGNLTTAGFACSQCGQPLFVYKLEQVSEKGKAYTNYFGRCNVAEHEKLILLAQLKPEKDSDEAVTYSLGKFGQRALDFYSIHVTKESTHPVKPLAQIAGNRYASHPVGKALSDACMGTIASFLSKYQDIIIEHQKVVKGNQKRLESLRELAGKENLEYPSVTLPPQPHTSEGVDAYNEVIARVRMWVNLNLWQKLKLSRDDAKPLLRLKGFPSFPLVERQANEVDWWDMVCNVKKLINEKKEDGKVFWQNLAGYKRQEALRPYLSSEEDRKKGKKFARYQLGDLLLHLEKKHGEDWGKVYDEAWERIDKKVEGLSKHIKLEEERRSEDAQSKAALTDWLRAKASFVIEGLKEADKDEFCRCELKLQKWYGDLRGKPFAIEAENSILDISGFSKQYNCAFIWQKDGVKKLNLYLIINYFKGGKLRFKKIKPEAFEANRFYTVINKKSGEIVPMEVNFNFDDPNLIILPLAFGKRQGREFIWNDLLSLETGSLKLANGRVIEKTLYNRRTRQDEPALFVALTFERREVLDSSNIKPMNLIGVDRGENIPAVIALTDPEGCPLSRFKDSLGNPTHILRIGESYKEKQRTIQAKKEVEQRRAGGYSRKYASKAKNLADDMVRNTARDLLYYAVTQDAMLIFENLSRGFGRQGKRTFMAERQYTRMEDWLTAKLAYEGLPSKTYLSKTLAQYTSKTCSNCGFTITSADYDRVLEKLKKTATGWMTTINGKELKVEGQITYYNRYKRQNVVKDLSVELDRLSEESVNNDISSWTKGRSGEALSLLKKRFSHRPVQEKFVCLNCGFETHADEQAALNIARSWLFLRSQEYKKYQTNKTTGNTDKRAFVETWQSFYRKKLKEVWKPAV

SEQ ID NO: 33809 - protein, 978 aa, synthetic construct
  REGION 1..978: note = engineered CasX variant
QEIKRINKIRRRLVKDSNTKKAGKTGPMKTLLVRVMTPDLRERLENLRKKPPNIPQPISNTSRANLNKLLTDYTEMKKAILHVYWEEFQKDPVGLMSRVAQPASKKIDQNKLKPEMDEKGNLTTAGFACSQCGQPLFVYKLEQVSEKGKAYTNYFGRCNVAEHEKLILLAQLKPEKDSDEAVTYSLGKFGQRALDFYSIHVTKESTHPVKPLAQIAGNRYASSPVGKALSDACMGTIASFLSKYQDIIIEHQKVVKGNQKRLESLRELAGKENLEYPSVTLPPQPHTSEGVDAYNEVIARVRMWVNLNLWQKLKLSRDDAKPLLRLKGFPSFPLVERQANEVDWWDMVCNVKKLINEKKEDGKVFWQNLAGYKRQEALRPYLSSEEDRKKGKKFARYQLGDLLLHLEKKHGEDWGKVYDEAWERIDKKVEGLSKHIKLEEERRSEDAQSKAALTDWLRAKASFVIEGLKEADKDEFCRCELKLQKWYGDLRGKPFAIEAENSILDISGFSKQYNCAFIWQKDGVKKLNLYLIINYFKGGKLRFKKIKPEAFEANRFYTVINKKSGEIVPMEVNFNFDDPNLIILPLAFGKRQGREFIWNDLLSLETGSLKLANGRVIEKTLYNRRTRQDEPALFVALTFERREVLDSSNIKPMNLIGVDRGENIPAVIALTDPEGCPLSRFKDSLGNPTHILRIGESYKEKQRTIQAKKEVEQRRAGGYSRKYASKAKNLADDMVRNTARDLLYYAVTQDAMLIFENLSRGFGRQGKRTFMAERQYTRMEDWLTAKLAYEGLPSKTYLSKTLAQYTSKTCSNCGFTITSADYDRVLEKLKKTATGWMTTINGKELKVEGQITYYNRYKRQNVVKDLSVELDRLSEESVNNDISSWTKGRSGEALSLLKKRFSHRPVQEKFVCLNCGFETHADEQAALNIARSWLFLRSQEYKKYQTNKTTGNTDKRAFVETWQSFYRKKLKEVWKPAV

SEQ ID NO: 33810 - protein, 978 aa, synthetic construct
  REGION 1..978: note = engineered CasX variant
QEIKRINKIRRRLVKDSNTKKAGKTGPMKTLLVRVMTPDLRERLENLRKKPPNIPQPISNTSRANLNKLLTDYTEMKKAILHVYWEEFQKDPVGLMSRVAQPASKKIDQNKLKPEMDEKGNLTTAGFACSQCGQPLFVYKLEQVSEKGKAYTNYFGRCNVAEHEKLILLAQLKPEKDSDEAVTYSLGKFGQRALDFYSIHVTKESTHPVKPLAQIAGNRYASTPVGKALSDACMGTIASFLSKYQDIIIEHQKVVKGNQKRLESLRELAGKENLEYPSVTLPPQPHTSEGVDAYNEVIARVRMWVNLNLWQKLKLSRDDAKPLLRLKGFPSFPLVERQANEVDWWDMVCNVKKLINEKKEDGKVFWQNLAGYKRQEALRPYLSSEEDRKKGKKFARYQLGDLLLHLEKKHGEDWGKVYDEAWERIDKKVEGLSKHIKLEEERRSEDAQSKAALTDWLRAKASFVIEGLKEADKDEFCRCELKLQKWYGDLRGKPFAIEAENSILDISGFSKQYNCAFIWQKDGVKKLNLYLIINYFKGGKLRFKKIKPEAFEANRFYTVINKKSGEIVPMEVNFNFDDPNLIILPLAFGKRQGREFIWNDLLSLETGSLKLANGRVIEKTLYNRRTRQDEPALFVALTFERREVLDSSNIKPMNLIGVDRGENIPAVIALTDPEGCPLSRFKDSLGNPTHILRIGESYKEKQRTIQAKKEVEQRRAGGYSRKYASKAKNLADDMVRNTARDLLYYAVTQDAMLIFENLSRGFGRQGKRTFMAERQYTRMEDWLTAKLAYEGLPSKTYLSKTLAQYTSKTCSNCGFTITSADYDRVLEKLKKTATGWMTTINGKELKVEGQITYYNRYKRQNVVKDLSVELDRLSEESVNNDISSWTKGRSGEALSLLKKRFSHRPVQEKFVCLNCGFETHADEQAALNIARSWLFLRSQEYKKYQTNKTTGNTDKRAFVETWQSFYRKKLKEVWKPAV

SEQ ID NO: 33811 - protein, 978 aa, synthetic construct
  REGION 1..978: note = engineered CasX variant
QEIKRINKIRRRLVKDSNTKKAGKTGPMKTLLVRVMTPDLRERLENLRKKPPNIPQPISNTSRANLNKLLTDYTEMKKAILHVYWEEFQKDPVGLMSRVAQPASKKIDQNKLKPEMDEKGNLTTAGFACSQCGQPLFVYKLEQVSEKGKAYTNYFGRCNVAEHEKLILLAQLKPEKDSDEAVTYSLGKFGQRALDFYSIHVTKESTHPVKPLAQIAGNRYASAPVGKALSDACMGTIASFLSKYQDIIIEHQKVVKGNQKRLESLRELAGKENLEYPSVTLPPQPHTSEGVDAYNEVIARVRMWVNLNLWQKLKLSRDDAKPLLRLKGFPSFPLVERQANEVDWWDMVCNVKKLINEKKEDGKVFWQNLAGYKRQEALRPYLSSEEDRKKGKKFARYQLGDLLLHLEKKHGEDWGKVYDEAWERIDKKVEGLSKHIKLEEERRSEDAQSKAALTDWLRAKASFVIEGLKEADKDEFCRCELKLQKWYGDLRGKPFAIEAENSILDISGFSKQYNCAFIWQKDGVKKLNLYLIINYFKGGKLRFKKIKPEAFEANRFYTVINKKSGEIVPMEVNFNFDDPNLIILPLAFGKRQGREFIWNDLLSLETGSLKLANGRVIEKTLYNRRTRQDEPALFVALTFERREVLDSSNIKPMNLIGVDRGENIPAVIALTDPEGCPLSRFKDSLGNPTHILRIGESYKEKQRTIQAKKEVEQRRAGGYSRKYASKAKNLADDMVRNTARDLLYYAVTQDAMLIFENLSRGFGRQGKRTFMAERQYTRMEDWLTAKLAYEGLPSKTYLSKTLAQYTSKTCSNCGFTITSADYDRVLEKLKKTATGWMTTINGKELKVEGQITYYNRYKRQNVVKDLSVELDRLSEESVNNDISSWTKGRSGEALSLLKKRFSHRPVQEKFVCLNCGFETHADEQAALNIARSWLFLRSQEYKKYQTNKTTGNTDKRAFVETWQSFYRKKLKEVWKPAV

SEQ ID NO: 33812 - protein, 978 aa, synthetic construct
  REGION 1..978: note = engineered CasX variant
QEIKRINKIRRRLVKDSNTKKAGKTGPMKTLLVRVMTPDLRERLENLRKKPPNIPQPISNTSRANLNKLLTDYTEMKKAILHVYWEEFQKDPVGLMSRVAQPASKKIDQNKLKPEMDEKGNLTTAGFACSQCGQPLFVYKLEQVSEKGKAYTNYFGRCNVAEHEKLILLAQLKPEKDSDEAVTYSLGKFGQRALDFYSIHVTKESTHPVKPLAQIAGNRYASVPVGKALSDACMGTIASFLSKYQDIIIEHQKVVKGNQKRLESLRELAGKENLEYPSVTLPPQPHTSEGVDAYNEVIARVRMWVNLNLWQKLKLSRDDAKPLLRLKGFPSFPLVERQANEVDWWDMVCNVKKLINEKKEDGKVFWQNLAGYKRQEALRPYLSSEEDRKKGKKFARYQLGDLLLHLEKKHGEDWGKVYDEAWERIDKKVEGLSKHIKLEEERRSEDAQSKAALTDWLRAKASFVIEGLKEADKDEFCRCELKLQKWYGDLRGKPFAIEAENSILDISGFSKQYNCAFIWQKDGVKKLNLYLIINYFKGGKLRFKKIKPEAFEANRFYTVINKKSGEIVPMEVNFNFDDPNLIILPLAFGKRQGREFIWNDLLSLETGSLKLANGRVIEKTLYNRRTRQDEPALFVALTFERREVLDSSNIKPMNLIGVDRGENIPAVIALTDPEGCPLSRFKDSLGNPTHILRIGESYKEKQRTIQAKKEVEQRRAGGYSRKYASKAKNLADDMVRNTARDLLYYAVTQDAMLIFENLSRGFGRQGKRTFMAERQYTRMEDWLTAKLAYEGLPSKTYLSKTLAQYTSKTCSNCGFTITSADYDRVLEKLKKTATGWMTTINGKELKVEGQITYYNRYKRQNVVKDLSVELDRLSEESVNNDISSWTKGRSGEALSLLKKRFSHRPVQEKFVCLNCGFETHADEQAALNIARSWLFLRSQEYKKYQTNKTTGNTDKRAFVETWQSFYRKKLKEVWKPAV

SEQ ID NO: 33813 - protein, 978 aa, synthetic construct
  REGION 1..978: note = engineered CasX variant
QEIKRINKIRRRLVKDSNTKKAGKTGPMKTLLVRVMTPDLRERLENLRKKPPNIPQPISNTSRANLNKLLTDYTEMKKAILHVYWEEFQKDPVGLMSRVAQPASKKIDQNKLKPEMDEKGNLTTAGFACSQCGQPLFVYKLEQVSEKGKAYTNYFGRCNVAEHEKLIKLAQLKPEKDSDEAVTYSLGKFGQRALDFYSIHVTKESTHPVKPLAQIAGNRYASGPVGKALSDACMGTIASFLSKYQDIIIEHQKVVKGNQKRLESLRELAGKENLEYPSVTLPPQPHTSEGVDAYNEVIARVRMWVNLNLWQKLKLSRDDAKPLLRLKGFPSFPLVERQANEVDWWDMVCNVKKLINEKKEDGKVFWQNLAGYKRQEALRPYLSSEEDRKKGKKFARYQLGDLLLHLEKKHGEDWGKVYDEAWERIDKKVEGLSKHIKLEEERRSEDAQSKAALTDWLRAKASFVIEGLKEADKDEFCRCELKLQKWYGDLRGKPFAIEAENSILDISGFSKQYNCAFIWQKDGVKKLNLYLIINYFKGGKLRFKKIKPEAFEANRFYTVINKKSGEIVPMEVNFNFDDPNLIILPLAFGKRQGREFIWNDLLSLETGSLKLANGRVIEKTLYNRRTRQDEPALFVALTFERREVLDSSNIKPMNLIGVDRGENIPAVIALTDPEGCPLSRFKDSLGNPTHILRIGESYKEKQRTIQAKKEVEQRRAGGYSRKYASKAKNLADDMVRNTARDLLYYAVTQDAMLIFENLSRGFGRQGKRTFMAERQYTRMEDWLTAKLAYEGLPSKTYLSKTLAQYTSKTCSNCGFTITSADYDRVLEKLKKTATGWMTTINGKELKVEGQITYYNRYKRQNVVKDLSVELDRLSEESVNNDISSWTKGRSGEALSLLKKRFSHRPVQEKFVCLNCGFETHADEQAALNIARSWLFLRSQEYKKYQTNKTTGNTDKRAFVETWQSFYRKKLKEVWKPAV

SEQ ID NO: 33814 - protein, 977 aa, synthetic construct
  REGION 1..977: note = engineered CasX variant
QEIKRINKIRRRLVKDSNTKKAGKTGPMKTLLVRVMTPDLRERLENLRKKPPNIPQPISNTSRANLNKLLTDYTEMKKAILHVYWEEFQKDPVGLMSRVAQPASKKIDQNKLKPEMDEKGNLTTAGFACSQCGQPLFVYKLEQVSEKGKAYTNYFGRCNVAEHEKLILLAQLKPEKDSDEAVTYSLGKFGQRALDFYSIHVTKESTHPVKPLAQIAGNRYASPVGKALSDACMGTIASFLSKYQDIIIEHQKVVKGNQKRLESLRELAGKENLEYPSVTLPPQPHTSEGVDAYNEVIARVRMWVNLNLWQKLKLSRDDAKPLLRLKGFPSFPLVERQANEVDWWDMVCNVKKLINEKKEDGKVFWQNLAGYKRQEALRPYLSSEEDRKKGKKFARYQLGDLLLHLEKKHGEDWGKVYDEAWERIDKKVEGLSKHIKLEEERRSEDAQSKAALTDWLRAKASFVIEGLKEADKDEFCRCELKLQKWYGDLRGKPFAIEAENSILDISGFSKQYNCAFIWQKDGVKKLNLYLIINYFKGGKLRFKKIKPEAFEANRFYTVINKKSGEIVPMEVNFNFDDPNLIILPLAFGKRQGREFIWNDLLSLETGSLKLANGRVIEKTLYNRRTRQDEPALFVALTFERREVLDSSNIKPMNLIGVDRGENIPAVIALTDPEGCPLSRFKDSLGNPTHILRIGESYKEKQRTIQAKKEVEQRRAGGYSRKYASKAKNLADDMVRNTARDLLYYAVTQDAMLIFENLSRGFGRQGKRTFMAERQYTRMEDWLTAKLAYEGLPSKTYLSKTLAQYTSKTCSNCGFTITSADYDRVLEKLKKTATGWMTTINGKELKVEGQITYYNRYKRQNVVKDLSVELDRLSEESVNNDISSWTKGRSGEALSLLKKRFSHRPVQEKFVCLNCGFETHADEQAALNIARSWLFLRSQEYKKYQTNKTTGNTDKRAFVETWQSFYRKKLKEVWKPAV

SEQ ID NO: 33815 - protein, 978 aa, synthetic construct
  REGION 1..978: note = engineered CasX variant
QEIKRINKIRRRLVKDSNTKKAGKTGPMKTLLVRVMTPDLRERLENLRKKPPNIPQPISNTSRANLNKLLTDYTEMKKAILHVYWEEFQKDPVGLMSRVAQPASKKIDQNKLKPEMDEKGNLTTAGFACSQCGQPLFVYKLEQVSEKGKAYTNYFGRCNVAEHEKLILLAQLKPEKDSDEAVTYSLGKFGQRALDFYSIHVTKESTHPVKPLAQIAGNRYASYPVGKALSDACMGTIASFLSKYQDIIIEHQKVVKGNQKRLESLRELAGKENLEYPSVTLPPQPHTKEGLDAYNEVIARVRMWVNLNLWQKLKLSRDDAKPLLRLKGFPSFPLVERQANEVDWWDMVCNVKKLINEKKEDGKVFWQNLAGYKRQEALRPYLSSEEDRKKGKKFARYQLGDLLLHLEKKHGEDWGKVYDEAWERIDKKVEGLSKHIKLEEERRSEDAQSKAALTDWLRAKASFVIEGLKEADKDEFCRCELKLQKWYGDLRGKPFAIEAENSILDISGFSKQYNCAFIWQKDGVKKLNLYLIINYFKGGKLRFKKIKPEAFEANRFYTVINKKSGEIVPMEVNFNFDDPNLIILPLAFGKRQGREFIWNDLLSLETGSLKLANGRVIEKTLYNRRTRQDEPALFVALTFERREVLDSSNIKPMNLIGVDRGENIPAVIALTDPEGCPLSRFKDSLGNPTHILRIGESYKEKQRTIQAKKEVEQRRAGGYSRKYASKAKNLADDMVRNTARDLLYYAVTQDAMLIFENLSRGFGRQGKRTFMAERQYTRMEDWLTAKLAYEGLPSKTYLSKTLAQYTSKTCSNCGFTITSADYDRVLEKLKKTATGWMTTINGKELKVEGQITYYNRYKRQNVVKDLSVELDRLSEESVNNDISSWTKGRSGEALSLLKKRFSHRPVQEKFVCLNCGFETHADEQAALNIARSWLFLRSQEYKKYQTNKTTGNTDKRAFVETWQSFYRKKLKEVWKPAV

SEQ ID NO: 33816 - protein, 978 aa, synthetic construct
  REGION 1..978: note = engineered CasX variant
QEIKRINKIRRRLVKDSNTKKAGKTGPMKTLLVRVMTPDLRERLENLRKKPPNIPQPISNTSRANLNKLLTDYTEMKKAILHVYWEEFQKDPVGLMSRVAQPASKKIDQNKLKPEMDEKGNLTTAGFACSQCGQPLFVYKLEQVSEKGKAYTNYFGRCNVAEHEKLILLAQLKPEKDSDEAVTYSLGKFGQRALDFYSIHVTKESTHPVKPLAQIAGNRYASHPVGKALSDACMGTIASFLSKYQDIIIEHQKVVKGNQKRLESLRELAGKENLEYPSVTLPPQPHTKEGLDAYNEVIARVRMWVNLNLWQKLKLSRDDAKPLLRLKGFPSFPLVERQANEVDWWDMVCNVKKLINEKKEDGKVFWQNLAGYKRQEALRPYLSSEEDRKKGKKFARYQLGDLLLHLEKKHGEDWGKVYDEAWERIDKKVEGLSKHIKLEEERRSEDAQSKAALTDWLRAKASFVIEGLKEADKDEFCRCELKLQKWYGDLRGKPFAIEAENSILDISGFSKQYNCAFIWQKDGVKKLNLYLIINYFKGGKLRFKKIKPEAFEANRFYTVINKKSGEIVPMEVNFNFDDPNLIILPLAFGKRQGREFIWNDLLSLETGSLKLANGRVIEKTLYNRRTRQDEPALFVALTFERREVLDSSNIKPMNLIGVDRGENIPAVIALTDPEGCPLSRFKDSLGNPTHILRIGESYKEKQRTIQAKKEVEQRRAGGYSRKYASKAKNLADDMVRNTARDLLYYAVTQDAMLIFENLSRGFGRQGKRTFMAERQYTRMEDWLTAKLAYEGLPSKTYLSKTLAQYTSKTCSNCGFTITSADYDRVLEKLKKTATGWMTTINGKELKVEGQITYYNRYKRQNVVKDLSVELDRLSEESVNNDISSWTKGRSGEALSLLKKRFSHRPVQEKFVCLNCGFETHADEQAALNIARSWLFLRSQEYKKYQTNKTTGNTDKRAFVETWQSFYRKKLKEVWKPAV

SEQ ID NO: 33817 - protein, 978 aa, synthetic construct
  REGION 1..978: note = engineered CasX variant
QEIKRINKIRRRLVKDSNTKKAGKTGPMKTLLVRVMTPDLRERLENLRKKPPNIPQPISNTSRANLNKLLTDYTEMKKAILHVYWEEFQKDPVGLMSRVAQPASKKIDQNKLKPEMDEKGNLTTAGFACSQCGQPLFVYKLEQVSEKGKAYTNYFGRCNVAEHEKLILLAQLKPEKDSDEAVTYSLGKFGQRALDFYSIHVTKESTHPVKPLAQIAGNRYASSPVGKALSDACMGTIASFLSKYQDIIIEHQKVVKGNQKRLESLRELAGKENLEYPSVTLPPQPHTKEGLDAYNEVIARVRMWVNLNLWQKLKLSRDDAKPLLRLKGFPSFPLVERQANEVDWWDMVCNVKKLINEKKEDGKVFWQNLAGYKRQEALRPYLSSEEDRKKGKKFARYQLGDLLLHLEKKHGEDWGKVYDEAWERIDKKVEGLSKHIKLEEERRSEDAQSKAALTDWLRAKASFVIEGLKEADKDEFCRCELKLQKWYGDLRGKPFAIEAENSILDISGFSKQYNCAFIWQKDGVKKLNLYLIINYFKGGKLRFKKIKPEAFEANRFYTVINKKSGEIVPMEVNFNFDDPNLIILPLAFGKRQGREFIWNDLLSLETGSLKLANGRVIEKTLYNRRTRQDEPALFVALTFERREVLDSSNIKPMNLIGVDRGENIPAVIALTDPEGCPLSRFKDSLGNPTHILRIGESYKEKQRTIQAKKEVEQRRAGGYSRKYASKAKNLADDMVRNTARDLLYYAVTQDAMLIFENLSRGFGRQGKRTFMAERQYTRMEDWLTAKLAYEGLPSKTYLSKTLAQYTSKTCSNCGFTITSADYDRVLEKLKKTATGWMTTINGKELKVEGQITYYNRYKRQNVVKDLSVELDRLSEESVNNDISSWTKGRSGEALSLLKKRFSHRPVQEKFVCLNCGFETHADEQAALNIARSWLFLRSQEYKKYQTNKTTGNTDKRAFVETWQSFYRKKLKEVWKPAV

SEQ ID NO: 33818 - protein, 978 aa, synthetic construct
  REGION 1..978: note = engineered CasX variant
QEIKRINKIRRRLVKDSNTKKAGKTGPMKTLLVRVMTPDLRERLENLRKKPPNIPQPISNTSRANLNKLLTDYTEMKKAILHVYWEEFQKDPVGLMSRVAQPASKKIDQNKLKPEMDEKGNLTTAGFACSQCGQPLFVYKLEQVSEKGKAYTNYFGRCNVAEHEKLILLAQLKPEKDSDEAVTYSLGKFGQRALDFYSIHVTKESTHPVKPLAQIAGNRYASTPVGKALSDACMGTIASFLSKYQDIIIEHQKVVKGNQKRLESLRELAGKENLEYPSVTLPPQPHTKEGLDAYNEVIARVRMWVNLNLWQKLKLSRDDAKPLLRLKGFPSFPLVERQANEVDWWDMVCNVKKLINEKKEDGKVFWQNLAGYKRQEALRPYLSSEEDRKKGKKFARYQLGDLLLHLEKKHGEDWGKVYDEAWERIDKKVEGLSKHIKLEEERRSEDAQSKAALTDWLRAKASFVIEGLKEADKDEFCRCELKLQKWYGDLRGKPFAIEAENSILDISGFSKQYNCAFIWQKDGVKKLNLYLIINYFKGGKLRFKKIKPEAFEANRFYTVINKKSGEIVPMEVNFNFDDPNLIILPLAFGKRQGREFIWNDLLSLETGSLKLANGRVIEKTLYNRRTRQDEPALFVALTFERREVLDSSNIKPMNLIGVDRGENIPAVIALTDPEGCPLSRFKDSLGNPTHILRIGESYKEKQRTIQAKKEVEQRRAGGYSRKYASKAKNLADDMVRNTARDLLYYAVTQDAMLIFENLSRGFGRQGKRTFMAERQYTRMEDWLTAKLAYEGLPSKTYLSKTLAQYTSKTCSNCGFTITSADYDRVLEKLKKTATGWMTTINGKELKVEGQITYYNRYKRQNVVKDLSVELDRLSEESVNNDISSWTKGRSGEALSLLKKRFSHRPVQEKFVCLNCGFETHADEQAALNIARSWLFLRSQEYKKYQTNKTTGNTDKRAFVETWQSFYRKKLKEVWKPAV

SEQ ID NO: 33819 - protein, 978 aa, synthetic construct
  REGION 1..978: note = engineered CasX variant
QEIKRINKIRRRLVKDSNTKKAGKTGPMKTLLVRVMTPDLRERLENLRKKPPNIPQPISNTSRANLNKLLTDYTEMKKAILHVYWEEFQKDPVGLMSRVAQPASKKIDQNKLKPEMDEKGNLTTAGFACSQCGQPLFVYKLEQVSEKGKAYTNYFGRCNVAEHEKLILLAQLKPEKDSDEAVTYSLGKFGQRALDFYSIHVTKESTHPVKPLAQIAGNRYASAPVGKALSDACMGTIASFLSKYQDIIIEHQKVVKGNQKRLESLRELAGKENLEYPSVTLPPQPHTKEGLDAYNEVIARVRMWVNLNLWQKLKLSRDDAKPLLRLKGFPSFPLVERQANEVDWWDMVCNVKKLINEKKEDGKVFWQNLAGYKRQEALRPYLSSEEDRKKGKKFARYQLGDLLLHLEKKHGEDWGKVYDEAWERIDKKVEGLSKHIKLEEERRSEDAQSKAALTDWLRAKASFVIEGLKEADKDEFCRCELKLQKWYGDLRGKPFAIEAENSILDISGFSKQYNCAFIWQKDGVKKLNLYLIINYFKGGKLRFKKIKPEAFEANRFYTVINKKSGEIVPMEVNFNFDDPNLIILPLAFGKRQGREFIWNDLLSLETGSLKLANGRVIEKTLYNRRTRQDEPALFVALTFERREVLDSSNIKPMNLIGVDRGENIPAVIALTDPEGCPLSRFKDSLGNPTHILRIGESYKEKQRTIQAKKEVEQRRAGGYSRKYASKAKNLADDMVRNTARDLLYYAVTQDAMLIFENLSRGFGRQGKRTFMAERQYTRMEDWLTAKLAYEGLPSKTYLSKTLAQYTSKTCSNCGFTITSADYDRVLEKLKKTATGWMTTINGKELKVEGQITYYNRYKRQNVVKDLSVELDRLSEESVNNDISSWTKGRSGEALSLLKKRFSHRPVQEKFVCLNCGFETHADEQAALNIARSWLFLRSQEYKKYQTNKTTGNTDKRAFVETWQSFYRKKLKEVWKPAV

SEQ ID NO: 33820 - protein, 978 aa, synthetic construct
  REGION 1..978: note = engineered CasX variant
QEIKRINKIRRRLVKDSNTKKAGKTGPMKTLLVRVMTPDLRERLENLRKKPPNIPQPISNTSRANLNKLLTDYTEMKKAILHVYWEEFQKDPVGLMSRVAQPASKKIDQNKLKPEMDEKGNLTTAGFACSQCGQPLFVYKLEQVSEKGKAYTNYFGRCNVAEHEKLILLAQLKPEKDSDEAVTYSLGKFGQRALDFYSIHVTKESTHPVKPLAQIAGNRYASVPVGKALSDACMGTIASFLSKYQDIIIEHQKVVKGNQKRLESLRELAGKENLEYPSVTLPPQPHTKEGLDAYNEVIARVRMWVNLNLWQKLKLSRDDAKPLLRLKGFPSFPLVERQANEVDWWDMVCNVKKLINEKKEDGKVFWQNLAGYKRQEALRPYLSSEEDRKKGKKFARYQLGDLLLHLEKKHGEDWGKVYDEAWERIDKKVEGLSKHIKLEEERRSEDAQSKAALTDWLRAKASFVIEGLKEADKDEFCRCELKLQKWYGDLRGKPFAIEAENSILDISGFSKQYNCAFIWQKDGVKKLNLYLIINYFKGGKLRFKKIKPEAFEANRFYTVINKKSGEIVPMEVNFNFDDPNLIILPLAFGKRQGREFIWNDLLSLETGSLKLANGRVIEKTLYNRRTRQDEPALFVALTFERREVLDSSNIKPMNLIGVDRGENIPAVIALTDPEGCPLSRFKDSLGNPTHILRIGESYKEKQRTIQAKKEVEQRRAGGYSRKYASKAKNLADDMVRNTARDLLYYAVTQDAMLIFENLSRGFGRQGKRTFMAERQYTRMEDWLTAKLAYEGLPSKTYLSKTLAQYTSKTCSNCGFTITSADYDRVLEKLKKTATGWMTTINGKELKVEGQITYYNRYKRQNVVKDLSVELDRLSEESVNNDISSWTKGRSGEALSLLKKRFSHRPVQEKFVCLNCGFETHADEQAALNIARSWLFLRSQEYKKYQTNKTTGNTDKRAFVETWQSFYRKKLKEVWKPAV

SEQ ID NO: 33821 - protein, 978 aa, synthetic construct
  REGION 1..978: note = engineered CasX variant
QEIKRINKIRRRLVKDSNTKKAGKTGPMKTLLVRVMTPDLRERLENLRKKPPNIPQPISNTSRANLNKLLTDYTEMKKAILHVYWEEFQKDPVGLMSRVAQPASKKIDQNKLKPEMDEKGNLTTAGFACSQCGQPLFVYKLEQVSEKGKAYTNYFGRCNVAEHEKLIKLAQLKPEKDSDEAVTYSLGKFGQRALDFYSIHVTKESTHPVKPLAQIAGNRYASGPVGKALSDACMGTIASFLSKYQDIIIEHQKVVKGNQKRLESLRELAGKENLEYPSVTLPPQPHTKEGLDAYNEVIARVRMWVNLNLWQKLKLSRDDAKPLLRLKGFPSFPLVERQANEVDWWDMVCNVKKLINEKKEDGKVFWQNLAGYKRQEALRPYLSSEEDRKKGKKFARYQLGDLLLHLEKKHGEDWGKVYDEAWERIDKKVEGLSKHIKLEEERRSEDAQSKAALTDWLRAKASFVIEGLKEADKDEFCRCELKLQKWYGDLRGKPFAIEAENSILDISGFSKQYNCAFIWQKDGVKKLNLYLIINYFKGGKLRFKKIKPEAFEANRFYTVINKKSGEIVPMEVNFNFDDPNLIILPLAFGKRQGREFIWNDLLSLETGSLKLANGRVIEKTLYNRRTRQDEPALFVALTFERREVLDSSNIKPMNLIGVDRGENIPAVIALTDPEGCPLSRFKDSLGNPTHILRIGESYKEKQRTIQAKKEVEQRRAGGYSRKYASKAKNLADDMVRNTARDLLYYAVTQDAMLIFENLSRGFGRQGKRTFMAERQYTRMEDWLTAKLAYEGLPSKTYLSKTLAQYTSKTCSNCGFTITSADYDRVLEKLKKTATGWMTTINGKELKVEGQITYYNRYKRQNVVKDLSVELDRLSEESVNNDISSWTKGRSGEALSLLKKRFSHRPVQEKFVCLNCGFETHADEQAALNIARSWLFLRSQEYKKYQTNKTTGNTDKRAFVETWQSFYRKKLKEVWKPAV

SEQ ID NO: 33822 - protein, 977 aa, synthetic construct
  REGION 1..977: note = engineered CasX variant
QEIKRINKIRRRLVKDSNTKKAGKTGPMKTLLVRVMTPDLRERLENLRKKPPNIPQPISNTSRANLNKLLTDYTEMKKAILHVYWEEFQKDPVGLMSRVAQPASKKIDQNKLKPEMDEKGNLTTAGFACSQCGQPLFVYKLEQVSEKGKAYTNYFGRCNVAEHEKLILLAQLKPEKDSDEAVTYSLGKFGQRALDFYSIHVTKESTHPVKPLAQIAGNRYASPVGKALSDACMGTIASFLSKYQDIIIEHQKVVKGNQKRLESLRELAGKENLEYPSVTLPPQPHTKEGLDAYNEVIARVRMWVNLNLWQKLKLSRDDAKPLLRLKGFPSFPLVERQANEVDWWDMVCNVKKLINEKKEDGKVFWQNLAGYKRQEALRPYLSSEEDRKKGKKFARYQLGDLLLHLEKKHGEDWGKVYDEAWERIDKKVEGLSKHIKLEEERRSEDAQSKAALTDWLRAKASFVIEGLKEADKDEFCRCELKLQKWYGDLRGKPFAIEAENSILDISGFSKQYNCAFIWQKDGVKKLNLYLIINYFKGGKLRFKKIKPEAFEANRFYTVINKKSGEIVPMEVNFNFDDPNLIILPLAFGKRQGREFIWNDLLSLETGSLKLANGRVIEKTLYNRRTRQDEPALFVALTFERREVLDSSNIKPMNLIGVDRGENIPAVIALTDPEGCPLSRFKDSLGNPTHILRIGESYKEKQRTIQAKKEVEQRRAGGYSRKYASKAKNLADDMVRNTARDLLYYAVTQDAMLIFENLSRGFGRQGKRTFMAERQYTRMEDWLTAKLAYEGLPSKTYLSKTLAQYTSKTCSNCGFTITSADYDRVLEKLKKTATGWMTTINGKELKVEGQITYYNRYKRQNVVKDLSVELDRLSEESVNNDISSWTKGRSGEALSLLKKRFSHRPVQEKFVCLNCGFETHADEQAALNIARSWLFLRSQEYKKYQTNKTTGNTDKRAFVETWQSFYRKKLKEVWKPAV

SEQ ID NO: 33823 - protein, 978 aa, synthetic construct
  REGION 1..978: note = engineered CasX variant
QEIKRINKIRRRLVKDSNTKKAGKTGPMKTLLVRVMTPDLRERLENLRKKPPNIPQPISNTSRANLNKLLTDYTEMKKAILHVYWEEFQKDPVGLMSRVAQPASKKIDQNKLKPEMDEKGNLTTAGFACSQCGQPLFVYKLEQVSEKGKAYTNYFGRCNVAEHEKLILLAQLKPEKDSDEAVTYSLGKFGQRALDFYSIHVTKESTHPVKPLAQIAGNRYASYPVGKALSDACMGTIASFLSKYQDIIIEHQKVVKGNQKRLESLRELAGKENLEYPSVTLPPQPHTKEGVDAYNEVIARVRTWVNLNLWQKLKLSRDDAKPLLRLKGFPSFPLVERQANEVDWWDMVCNVKKLINEKKEDGKVFWQNLAGYKRQEALRPYLSSEEDRKKGKKFARYQLGDLLLHLEKKHGEDWGKVYDEAWERIDKKVEGLSKHIKLEEERRSEDAQSKAALTDWLRAKASFVIEGLKEADKDEFCRCELKLQKWYGDLRGKPFAIEAENSILDISGFSKQYNCAFIWQKDGVKKLNLYLIINYFKGGKLRFKKIKPEAFEANRFYTVINKKSGEIVPMEVNFNFDDPNLIILPLAFGKRQGREFIWNDLLSLETGSLKLANGRVIEKTLYNRRTRQDEPALFVALTFERREVLDSSNIKPMNLIGVDRGENIPAVIALTDPEGCPLSRFKDSLGNPTHILRIGESYKEKQRTIQAKKEVEQRRAGGYSRKYASKAKNLADDMVRNTARDLLYYAVTQDAMLIFENLSRGFGRQGKRTFMAERQYTRMEDWLTAKLAYEGLPSKTYLSKTLAQYTSKTCSNCGFTITSADYDRVLEKLKKTATGWMTTINGKELKVEGQITYYNRYKRQNVVKDLSVELDRLSEESVNNDISSWTKGRSGEALSLLKKRFSHRPVQEKFVCLNCGFETHADEQAALNIARSWLFLRSQEYKKYQTNKTTGNTDKRAFVETWQSFYRKKLKEVWKPAV

SEQ ID NO: 33824 - protein, 978 aa, synthetic construct
  REGION 1..978: note = engineered CasX variant
QEIKRINKIRRRLVKDSNTKKAGKTGPMKTLLVRVMTPDLRERLENLRKKPPNIPQPISNTSRANLNKLLTDYTEMKKAILHVYWEEFQKDPVGLMSRVAQPASKKIDQNKLKPEMDEKGNLTTAGFACSQCGQPLFVYKLEQVSEKGKAYTNYFGRCNVAEHEKLILLAQLKPEKDSDEAVTYSLGKFGQRALDFYSIHVTKESTHPVKPLAQIAGNRYASHPVGKALSDACMGTIASFLSKYQDIIIEHQKVVKGNQKRLESLRELAGKENLEYPSVTLPPQPHTKEGVDAYNEVIARVRTWVNLNLWQKLKLSRDDAKPLLRLKGFPSFPLVERQANEVDWWDMVCNVKKLINEKKEDGKVFWQNLAGYKRQEALRPYLSSEEDRKKGKKFARYQLGDLLLHLEKKHGEDWGKVYDEAWERIDKKVEGLSKHIKLEEERRSEDAQSKAALTDWLRAKASFVIEGLKEADKDEFCRCELKLQKWYGDLRGKPFAIEAENSILDISGFSKQYNCAFIWQKDGVKKLNLYLIINYFKGGKLRFKKIKPEAFEANRFYTVINKKSGEIVPMEVNFNFDDPNLIILPLAFGKRQGREFIWNDLLSLETGSLKLANGRVIEKTLYNRRTRQDEPALFVALTFERREVLDSSNIKPMNLIGVDRGENIPAVIALTDPEGCPLSRFKDSLGNPTHILRIGESYKEKQRTIQAKKEVEQRRAGGYSRKYASKAKNLADDMVRNTARDLLYYAVTQDAMLIFENLSRGFGRQGKRTFMAERQYTRMEDWLTAKLAYEGLPSKTYLSKTLAQYTSKTCSNCGFTITSADYDRVLEKLKKTATGWMTTINGKELKVEGQITYYNRYKRQNVVKDLSVELDRLSEESVNNDISSWTKGRSGEALSLLKKRFSHRPVQEKFVCLNCGFETHADEQAALNIARSWLFLRSQEYKKYQTNKTTGNTDKRAFVETWQSFYRKKLKEVWKPAV

SEQ ID NO: 33825 - protein, 978 aa, synthetic construct
  REGION 1..978: note = engineered CasX variant
QEIKRINKIRRRLVKDSNTKKAGKTGPMKTLLVRVMTPDLRERLENLRKKPPNIPQPISNTSRANLNKLLTDYTEMKKAILHVYWEEFQKDPVGLMSRVAQPASKKIDQNKLKPEMDEKGNLTTAGFACSQCGQPLFVYKLEQVSEKGKAYTNYFGRCNVAEHEKLILLAQLKPEKDSDEAVTYSLGKFGQRALDFYSIHVTKESTHPVKPLAQIAGNRYASSPVGKALSDACMGTIASFLSKYQDIIIEHQKVVKGNQKRLESLRELAGKENLEYPSVTLPPQPHTKEGVDAYNEVIARVRTWVNLNLWQKLKLSRDDAKPLLRLKGFPSFPLVERQANEVDWWDMVCNVKKLINEKKEDGKVFWQNLAGYKRQEALRPYLSSEEDRKKGKKFARYQLGDLLLHLEKKHGEDWGKVYDEAWERIDKKVEGLSKHIKLEEERRSEDAQSKAALTDWLRAKASFVIEGLKEADKDEFCRCELKLQKWYGDLRGKPFAIEAENSILDISGFSKQYNCAFIWQKDGVKKLNLYLIINYFKGGKLRFKKIKPEAFEANRFYTVINKKSGEIVPMEVNFNFDDPNLIILPLAFGKRQGREFIWNDLLSLETGSLKLANGRVIEKTLYNRRTRQDEPALFVALTFERREVLDSSNIKPMNLIGVDRGENIPAVIALTDPEGCPLSRFKDSLGNPTHILRIGESYKEKQRTIQAKKEVEQRRAGGYSRKYASKAKNLADDMVRNTARDLLYYAVTQDAMLIFENLSRGFGRQGKRTFMAERQYTRMEDWLTAKLAYEGLPSKTYLSKTLAQYTSKTCSNCGFTITSADYDRVLEKLKKTATGWMTTINGKELKVEGQITYYNRYKRQNVVKDLSVELDRLSEESVNNDISSWTKGRSGEALSLLKKRFSHRPVQEKFVCLNCGFETHADEQAALNIARSWLFLRSQEYKKYQTNKTTGNTDKRAFVETWQSFYRKKLKEVWKPAV

SEQ ID NO: 33826 - protein, 978 aa, synthetic construct
  REGION 1..978: note = engineered CasX variant
QEIKRINKIRRRLVKDSNTKKAGKTGPMKTLLVRVMTPDLRERLENLRKKPPNIPQPISNTSRANLNKLLTDYTEMKKAILHVYWEEFQKDPVGLMSRVAQPASKKIDQNKLKPEMDEKGNLTTAGFACSQCGQPLFVYKLEQVSEKGKAYTNYFGRCNVAEHEKLILLAQLKPEKDSDEAVTYSLGKFGQRALDFYSIHVTKESTHPVKPLAQIAGNRYASTPVGKALSDACMGTIASFLSKYQDIIIEHQKVVKGNQKRLESLRELAGKENLEYPSVTLPPQPHTKEGVDAYNEVIARVRTWVNLNLWQKLKLSRDDAKPLLRLKGFPSFPLVERQANEVDWWDMVCNVKKLINEKKEDGKVFWQNLAGYKRQEALRPYLSSEEDRKKGKKFARYQLGDLLLHLEKKHGEDWGKVYDEAWERIDKKVEGLSKHIKLEEERRSEDAQSKAALTDWLRAKASFVIEGLKEADKDEFCRCELKLQKWYGDLRGKPFAIEAENSILDISGFSKQYNCAFIWQKDGVKKLNLYLIINYFKGGKLRFKKIKPEAFEANRFYTVINKKSGEIVPMEVNFNFDDPNLIILPLAFGKRQGREFIWNDLLSLETGSLKLANGRVIEKTLYNRRTRQDEPALFVALTFERREVLDSSNIKPMNLIGVDRGENIPAVIALTDPEGCPLSRFKDSLGNPTHILRIGESYKEKQRTIQAKKEVEQRRAGGYSRKYASKAKNLADDMVRNTARDLLYYAVTQDAMLIFENLSRGFGRQGKRTFMAERQYTRMEDWLTAKLAYEGLPSKTYLSKTLAQYTSKTCSNCGFTITSADYDRVLEKLKKTATGWMTTINGKELKVEGQITYYNRYKRQNVVKDLSVELDRLSEESVNNDISSWTKGRSGEALSLLKKRFSHRPVQEKFVCLNCGFETHADEQAALNIARSWLFLRSQEYKKYQTNKTTGNTDKRAFVETWQSFYRKKLKEVWKPAV

SEQ ID NO: 33827 - protein, 978 aa, synthetic construct
  REGION 1..978: note = engineered CasX variant
QEIKRINKIRRRLVKDSNTKKAGKTGPMKTLLVRVMTPDLRERLENLRKKPPNIPQPISNTSRANLNKLLTDYTEMKKAILHVYWEEFQKDPVGLMSRVAQPASKKIDQNKLKPEMDEKGNLTTAGFACSQCGQPLFVYKLEQVSEKGKAYTNYFGRCNVAEHEKLILLAQLKPEKDSDEAVTYSLGKFGQRALDFYSIHVTKESTHPVKPLAQIAGNRYASAPVGKALSDACMGTIASFLSKYQDIIIEHQKVVKGNQKRLESLRELAGKENLEYPSVTLPPQPHTKEGVDAYNEVIARVRTWVNLNLWQKLKLSRDDAKPLLRLKGFPSFPLVERQANEVDWWDMVCNVKKLINEKKEDGKVFWQNLAGYKRQEALRPYLSSEEDRKKGKKFARYQLGDLLLHLEKKHGEDWGKVYDEAWERIDKKVEGLSKHIKLEEERRSEDAQSKAALTDWLRAKASFVIEGLKEADKDEFCRCELKLQKWYGDLRGKPFAIEAENSILDISGFSKQYNCAFIWQKDGVKKLNLYLIINYFKGGKLRFKKIKPEAFEANRFYTVINKKSGEIVPMEVNFNFDDPNLIILPLAFGKRQGREFIWNDLLSLETGSLKLANGRVIEKTLYNRRTRQDEPALFVALTFERREVLDSSNIKPMNLIGVDRGENIPAVIALTDPEGCPLSRFKDSLGNPTHILRIGESYKEKQRTIQAKKEVEQRRAGGYSRKYASKAKNLADDMVRNTARDLLYYAVTQDAMLIFENLSRGFGRQGKRTFMAERQYTRMEDWLTAKLAYEGLPSKTYLSKTLAQYTSKTCSNCGFTITSADYDRVLEKLKKTATGWMTTINGKELKVEGQITYYNRYKRQNVVKDLSVELDRLSEESVNNDISSWTKGRSGEALSLLKKRFSHRPVQEKFVCLNCGFETHADEQAALNIARSWLFLRSQEYKKYQTNKTTGNTDKRAFVETWQSFYRKKLKEVWKPAV

SEQ ID NO: 33828 - protein, 978 aa, synthetic construct
  REGION 1..978: note = engineered CasX variant
QEIKRINKIRRRLVKDSNTKKAGKTGPMKTLLVRVMTPDLRERLENLRKKPPNIPQPISNTSRANLNKLLTDYTEMKKAILHVYWEEFQKDPVGLMSRVAQPASKKIDQNKLKPEMDEKGNLTTAGFACSQCGQPLFVYKLEQVSEKGKAYTNYFGRCNVAEHEKLILLAQLKPEKDSDEAVTYSLGKFGQRALDFYSIHVTKESTHPVKPLAQIAGNRYASVPVGKALSDACMGTIASFLSKYQDIIIEHQKVVKGNQKRLESLRELAGKENLEYPSVTLPPQPHTKEGVDAYNEVIARVRTWVNLNLWQKLKLSRDDAKPLLRLKGFPSFPLVERQANEVDWWDMVCNVKKLINEKKEDGKVFWQNLAGYKRQEALRPYLSSEEDRKKGKKFARYQLGDLLLHLEKKHGEDWGKVYDEAWERIDKKVEGLSKHIKLEEERRSEDAQSKAALTDWLRAKASFVIEGLKEADKDEFCRCELKLQKWYGDLRGKPFAIEAENSILDISGFSKQYNCAFIWQKDGVKKLNLYLIINYFKGGKLRFKKIKPEAFEANRFYTVINKKSGEIVPMEVNFNFDDPNLIILPLAFGKRQGREFIWNDLLSLETGSLKLANGRVIEKTLYNRRTRQDEPALFVALTFERREVLDSSNIKPMNLIGVDRGENIPAVIALTDPEGCPLSRFKDSLGNPTHILRIGESYKEKQRTIQAKKEVEQRRAGGYSRKYASKAKNLADDMVRNTARDLLYYAVTQDAMLIFENLSRGFGRQGKRTFMAERQYTRMEDWLTAKLAYEGLPSKTYLSKTLAQYTSKTCSNCGFTITSADYDRVLEKLKKTATGWMTTINGKELKVEGQITYYNRYKRQNVVKDLSVELDRLSEESVNNDISSWTKGRSGEALSLLKKRFSHRPVQEKFVCLNCGFETHADEQAALNIARSWLFLRSQEYKKYQTNKTTGNTDKRAFVETWQSFYRKKLKEVWKPAV

SEQ ID NO: 33829 - protein, 978 aa, synthetic construct
  REGION 1..978: note = engineered CasX variant
QEIKRINKIRRRLVKDSNTKKAGKTGPMKTLLVRVMTPDLRERLENLRKKPPNIPQPISNTSRANLNKLLTDYTEMKKAILHVYWEEFQKDPVGLMSRVAQPASKKIDQNKLKPEMDEKGNLTTAGFACSQCGQPLFVYKLEQVSEKGKAYTNYFGRCNVAEHEKLIKLAQLKPEKDSDEAVTYSLGKFGQRALDFYSIHVTKESTHPVKPLAQIAGNRYASGPVGKALSDACMGTIASFLSKYQDIIIEHQKVVKGNQKRLESLRELAGKENLEYPSVTLPPQPHTKEGVDAYNEVIARVRTWVNLNLWQKLKLSRDDAKPLLRLKGFPSFPLVERQANEVDWWDMVCNVKKLINEKKEDGKVFWQNLAGYKRQEALRPYLSSEEDRKKGKKFARYQLGDLLLHLEKKHGEDWGKVYDEAWERIDKKVEGLSKHIKLEEERRSEDAQSKAALTDWLRAKASFVIEGLKEADKDEFCRCELKLQKWYGDLRGKPFAIEAENSILDISGFSKQYNCAFIWQKDGVKKLNLYLIINYFKGGKLRFKKIKPEAFEANRFYTVINKKSGEIVPMEVNFNFDDPNLIILPLAFGKRQGREFIWNDLLSLETGSLKLANGRVIEKTLYNRRTRQDEPALFVALTFERREVLDSSNIKPMNLIGVDRGENIPAVIALTDPEGCPLSRFKDSLGNPTHILRIGESYKEKQRTIQAKKEVEQRRAGGYSRKYASKAKNLADDMVRNTARDLLYYAVTQDAMLIFENLSRGFGRQGKRTFMAERQYTRMEDWLTAKLAYEGLPSKTYLSKTLAQYTSKTCSNCGFTITSADYDRVLEKLKKTATGWMTTINGKELKVEGQITYYNRYKRQNVVKDLSVELDRLSEESVNNDISSWTKGRSGEALSLLKKRFSHRPVQEKFVCLNCGFETHADEQAALNIARSWLFLRSQEYKKYQTNKTTGNTDKRAFVETWQSFYRKKLKEVWKPAV

SEQ ID NO: 33830 - protein, 977 aa, synthetic construct
  REGION 1..977: note = engineered CasX variant
QEIKRINKIRRRLVKDSNTKKAGKTGPMKTLLVRVMTPDLRERLENLRKKPPNIPQPISNTSRANLNKLLTDYTEMKKAILHVYWEEFQKDPVGLMSRVAQPASKKIDQNKLKPEMDEKGNLTTAGFACSQCGQPLFVYKLEQVSEKGKAYTNYFGRCNVAEHEKLILLAQLKPEKDSDEAVTYSLGKFGQRALDFYSIHVTKESTHPVKPLAQIAGNRYASPVGKALSDACMGTIASFLSKYQDIIIEHQKVVKGNQKRLESLRELAGKENLEYPSVTLPPQPHTKEGVDAYNEVIARVRTWVNLNLWQKLKLSRDDAKPLLRLKGFPSFPLVERQANEVDWWDMVCNVKKLINEKKEDGKVFWQNLAGYKRQEALRPYLSSEEDRKKGKKFARYQLGDLLLHLEKKHGEDWGKVYDEAWERIDKKVEGLSKHIKLEEERRSEDAQSKAALTDWLRAKASFVIEGLKEADKDEFCRCELKLQKWYGDLRGKPFAIEAENSILDISGFSKQYNCAFIWQKDGVKKLNLYLIINYFKGGKLRFKKIKPEAFEANRFYTVINKKSGEIVPMEVNFNFDDPNLIILPLAFGKRQGREFIWNDLLSLETGSLKLANGRVIEKTLYNRRTRQDEPALFVALTFERREVLDSSNIKPMNLIGVDRGENIPAVIALTDPEGCPLSRFKDSLGNPTHILRIGESYKEKQRTIQAKKEVEQRRAGGYSRKYASKAKNLADDMVRNTARDLLYYAVTQDAMLIFENLSRGFGRQGKRTFMAERQYTRMEDWLTAKLAYEGLPSKTYLSKTLAQYTSKTCSNCGFTITSADYDRVLEKLKKTATGWMTTINGKELKVEGQITYYNRYKRQNVVKDLSVELDRLSEESVNNDISSWTKGRSGEALSLLKKRFSHRPVQEKFVCLNCGFETHADEQAALNIARSWLFLRSQEYKKYQTNKTTGNTDKRAFVETWQSFYRKKLKEVWKPAV

SEQ ID NO: 33831 - protein, 978 aa, synthetic construct
  REGION 1..978: note = engineered CasX variant
QEIKRINKIRRRLVKDSNTKKAGKTGPMKTLLVRVMTPDLRERLENLRKKPPNIPQPISNTSRANLNKLLTDYTEMKKAILHVYWEEFQKDPVGLMSRVAQPASKKIDQNKLKPEMDEKGNLTTAGFACSQCGQPLFVYKLEQVSEKGKAYTNYFGRCNVAEHEKLILLAQLKPEKDSDEAVTYSLGKFGQRALDFYSIHVTKESTHPVKPLAQIAGNRYASYPVGKALSDACMGTIASFLSKYQDIIIEHQKVVKGNQKRLESLRELAGKENLEYPSVTLPPQPHTKEGVDAYNEVIARVRWWVNLNLWQKLKLSRDDAKPLLRLKGFPSFPLVERQANEVDWWDMVCNVKKLINEKKEDGKVFWQNLAGYKRQEALRPYLSSEEDRKKGKKFARYQLGDLLLHLEKKHGEDWGKVYDEAWERIDKKVEGLSKHIKLEEERRSEDAQSKAALTDWLRAKASFVIEGLKEADKDEFCRCELKLQKWYGDLRGKPFAIEAENSILDISGFSKQYNCAFIWQKDGVKKLNLYLIINYFKGGKLRFKKIKPEAFEANRFYTVINKKSGEIVPMEVNFNFDDPNLIILPLAFGKRQGREFIWNDLLSLETGSLKLANGRVIEKTLYNRRTRQDEPALFVALTFERREVLDSSNIKPMNLIGVDRGENIPAVIALTDPEGCPLSRFKDSLGNPTHILRIGESYKEKQRTIQAKKEVEQRRAGGYSRKYASKAKNLADDMVRNTARDLLYYAVTQDAMLIFENLSRGFGRQGKRTFMAERQYTRMEDWLTAKLAYEGLPSKTYLSKTLAQYTSKTCSNCGFTITSADYDRVLEKLKKTATGWMTTINGKELKVEGQITYYNRYKRQNVVKDLSVELDRLSEESVNNDISSWTKGRSGEALSLLKKRFSHRPVQEKFVCLNCGFETHADEQAALNIARSWLFLRSQEYKKYQTNKTTGNTDKRAFVETWQSFYRKKLKEVWKPAV

SEQ ID NO: 33832 - protein, 978 aa, synthetic construct
  REGION 1..978: note = engineered CasX variant
QEIKRINKIRRRLVKDSNTKKAGKTGPMKTLLVRVMTPDLRERLENLRKKPPNIPQPISNTSRANLNKLLTDYTEMKKAILHVYWEEFQKDPVGLMSRVAQPASKKIDQNKLKPEMDEKGNLTTAGFACSQCGQPLFVYKLEQVSEKGKAYTNYFGRCNVAEHEKLILLAQLKPEKDSDEAVTYSLGKFGQRALDFYSIHVTKESTHPVKPLAQIAGNRYASHPVGKALSDACMGTIASFLSKYQDIIIEHQKVVKGNQKRLESLRELAGKENLEYPSVTLPPQPHTKEGVDAYNEVIARVRWWVNLNLWQKLKLSRDDAKPLLRLKGFPSFPLVERQANEVDWWDMVCNVKKLINEKKEDGKVFWQNLAGYKRQEALRPYLSSEEDRKKGKKFARYQLGDLLLHLEKKHGEDWGKVYDEAWERIDKKVEGLSKHIKLEEERRSEDAQSKAALTDWLRAKASFVIEGLKEADKDEFCRCELKLQKWYGDLRGKPFAIEAENSILDISGFSKQYNCAFIWQKDGVKKLNLYLIINYFKGGKLRFKKIKPEAFEANRFYTVINKKSGEIVPMEVNFNFDDPNLIILPLAFGKRQGREFIWNDLLSLETGSLKLANGRVIEKTLYNRRTRQDEPALFVALTFERREVLDSSNIKPMNLIGVDRGENIPAVIALTDPEGCPLSRFKDSLGNPTHILRIGESYKEKQRTIQAKKEVEQRRAGGYSRKYASKAKNLADDMVRNTARDLLYYAVTQDAMLIFENLSRGFGRQGKRTFMAERQYTRMEDWLTAKLAYEGLPSKTYLSKTLAQYTSKTCSNCGFTITSADYDRVLEKLKKTATGWMTTINGKELKVEGQITYYNRYKRQNVVKDLSVELDRLSEESVNNDISSWTKGRSGEALSLLKKRFSHRPVQEKFVCLNCGFETHADEQAALNIARSWLFLRSQEYKKYQTNKTTGNTDKRAFVETWQSFYRKKLKEVWKPAV

SEQ ID NO: 33833 - protein, 978 aa, synthetic construct
  REGION 1..978: note = engineered CasX variant
QEIKRINKIRRRLVKDSNTKKAGKTGPMKTLLVRVMTPDLRERLENLRKKPPNIPQPISNTSRANLNKLLTDYTEMKKAILHVYWEEFQKDPVGLMSRVAQPASKKIDQNKLKPEMDEKGNLTTAGFACSQCGQPLFVYKLEQVSEKGKAYTNYFGRCNVAEHEKLILLAQLKPEKDSDEAVTYSLGKFGQRALDFYSIHVTKESTHPVKPLAQIAGNRYASSPVGKALSDACMGTIASFLSKYQDIIIEHQKVVKGNQKRLESLRELAGKENLEYPSVTLPPQPHTKEGVDAYNEVIARVRWWVNLNLWQKLKLSRDDAKPLLRLKGFPSFPLVERQANEVDWWDMVCNVKKLINEKKEDGKVFWQNLAGYKRQEALRPYLSSEEDRKKGKKFARYQLGDLLLHLEKKHGEDWGKVYDEAWERIDKKVEGLSKHIKLEEERRSEDAQSKAALTDWLRAKASFVIEGLKEADKDEFCRCELKLQKWYGDLRGKPFAIEAENSILDISGFSKQYNCAFIWQKDGVKKLNLYLIINYFKGGKLRFKKIKPEAFEANRFYTVINKKSGEIVPMEVNFNFDDPNLIILPLAFGKRQGREFIWNDLLSLETGSLKLANGRVIEKTLYNRRTRQDEPALFVALTFERREVLDSSNIKPMNLIGVDRGENIPAVIALTDPEGCPLSRFKDSLGNPTHILRIGESYKEKQRTIQAKKEVEQRRAGGYSRKYASKAKNLADDMVRNTARDLLYYAVTQDAMLIFENLSRGFGRQGKRTFMAERQYTRMEDWLTAKLAYEGLPSKTYLSKTLAQYTSKTCSNCGFTITSADYDRVLEKLKKTATGWMTTINGKELKVEGQITYYNRYKRQNVVKDLSVELDRLSEESVNNDISSWTKGRSGEALSLLKKRFSHRPVQEKFVCLNCGFETHADEQAALNIARSWLFLRSQEYKKYQTNKTTGNTDKRAFVETWQSFYRKKLKEVWKPAV

SEQ ID NO: 33834 - protein, 978 aa, synthetic construct
  REGION 1..978: note = engineered CasX variant
QEIKRINKIRRRLVKDSNTKKAGKTGPMKTLLVRVMTPDLRERLENLRKKPPNIPQPISNTSRANLNKLLTDYTEMKKAILHVYWEEFQKDPVGLMSRVAQPASKKIDQNKLKPEMDEKGNLTTAGFACSQCGQPLFVYKLEQVSEKGKAYTNYFGRCNVAEHEKLILLAQLKPEKDSDEAVTYSLGKFGQRALDFYSIHVTKESTHPVKPLAQIAGNRYASTPVGKALSDACMGTIASFLSKYQDIIIEHQKVVKGNQKRLESLRELAGKENLEYPSVTLPPQPHTKEGVDAYNEVIARVRWWVNLNLWQKLKLSRDDAKPLLRLKGFPSFPLVERQANEVDWWDMVCNVKKLINEKKEDGKVFWQNLAGYKRQEALRPYLSSEEDRKKGKKFARYQLGDLLLHLEKKHGEDWGKVYDEAWERIDKKVEGLSKHIKLEEERRSEDAQSKAALTDWLRAKASFVIEGLKEADKDEFCRCELKLQKWYGDLRGKPFAIEAENSILDISGFSKQYNCAFIWQKDGVKKLNLYLIINYFKGGKLRFKKIKPEAFEANRFYTVINKKSGEIVPMEVNFNFDDPNLIILPLAFGKRQGREFIWNDLLSLETGSLKLANGRVIEKTLYNRRTRQDEPALFVALTFERREVLDSSNIKPMNLIGVDRGENIPAVIALTDPEGCPLSRFKDSLGNPTHILRIGESYKEKQRTIQAKKEVEQRRAGGYSRKYASKAKNLADDMVRNTARDLLYYAVTQDAMLIFENLSRGFGRQGKRTFMAERQYTRMEDWLTAKLAYEGLPSKTYLSKTLAQYTSKTCSNCGFTITSADYDRVLEKLKKTATGWMTTINGKELKVEGQITYYNRYKRQNVVKDLSVELDRLSEESVNNDISSWTKGRSGEALSLLKKRFSHRPVQEKFVCLNCGFETHADEQAALNIARSWLFLRSQEYKKYQTNKTTGNTDKRAFVETWQSFYRKKLKEVWKPAV

SEQ ID NO: 33835 - protein, 978 aa, synthetic construct
  REGION 1..978: note = engineered CasX variant
QEIKRINKIRRRLVKDSNTKKAGKTGPMKTLLVRVMTPDLRERLENLRKKPPNIPQPISNTSRANLNKLLTDYTEMKKAILHVYWEEFQKDPVGLMSRVAQPASKKIDQNKLKPEMDEKGNLTTAGFACSQCGQPLFVYKLEQVSEKGKAYTNYFGRCNVAEHEKLILLAQLKPEKDSDEAVTYSLGKFGQRALDFYSIHVTKESTHPVKPLAQIAGNRYASAPVGKALSDACMGTIASFLSKYQDIIIEHQKVVKGNQKRLESLRELAGKENLEYPSVTLPPQPHTKEGVDAYNEVIARVRWWVNLNLWQKLKLSRDDAKPLLRLKGFPSFPLVERQANEVDWWDMVCNVKKLINEKKEDGKVFWQNLAGYKRQEALRPYLSSEEDRKKGKKFARYQLGDLLLHLEKKHGEDWGKVYDEAWERIDKKVEGLSKHIKLEEERRSEDAQSKAALTDWLRAKASFVIEGLKEADKDEFCRCELKLQKWYGDLRGKPFAIEAENSILDISGFSKQYNCAFIWQKDGVKKLNLYLIINYFKGGKLRFKKIKPEAFEANRFYTVINKKSGEIVPMEVNFNFDDPNLIILPLAFGKRQGREFIWNDLLSLETGSLKLANGRVIEKTLYNRRTRQDEPALFVALTFERREVLDSSNIKPMNLIGVDRGENIPAVIALTDPEGCPLSRFKDSLGNPTHILRIGESYKEKQRTIQAKKEVEQRRAGGYSRKYASKAKNLADDMVRNTARDLLYYAVTQDAMLIFENLSRGFGRQGKRTFMAERQYTRMEDWLTAKLAYEGLPSKTYLSKTLAQYTSKTCSNCGFTITSADYDRVLEKLKKTATGWMTTINGKELKVEGQITYYNRYKRQNVVKDLSVELDRLSEESVNNDISSWTKGRSGEALSLLKKRFSHRPVQEKFVCLNCGFETHADEQAALNIARSWLFLRSQEYKKYQTNKTTGNTDKRAFVETWQSFYRKKLKEVWKPAV

SEQ ID NO: 33836 - protein, 978 aa, synthetic construct
  REGION 1..978: note = engineered CasX variant
QEIKRINKIRRRLVKDSNTKKAGKTGPMKTLLVRVMTPDLRERLENLRKKPPNIPQPISNTSRANLNKLLTDYTEMKKAILHVYWEEFQKDPVGLMSRVAQPASKKIDQNKLKPEMDEKGNLTTAGFACSQCGQPLFVYKLEQVSEKGKAYTNYFGRCNVAEHEKLILLAQLKPEKDSDEAVTYSLGKFGQRALDFYSIHVTKESTHPVKPLAQIAGNRYASVPVGKALSDACMGTIASFLSKYQDIIIEHQKVVKGNQKRLESLRELAGKENLEYPSVTLPPQPHTKEGVDAYNEVIARVRWWVNLNLWQKLKLSRDDAKPLLRLKGFPSFPLVERQANEVDWWDMVCNVKKLINEKKEDGKVFWQNLAGYKRQEALRPYLSSEEDRKKGKKFARYQLGDLLLHLEKKHGEDWGKVYDEAWERIDKKVEGLSKHIKLEEERRSEDAQSKAALTDWLRAKASFVIEGLKEADKDEFCRCELKLQKWYGDLRGKPFAIEAENSILDISGFSKQYNCAFIWQKDGVKKLNLYLIINYFKGGKLRFKKIKPEAFEANRFYTVINKKSGEIVPMEVNFNFDDPNLIILPLAFGKRQGREFIWNDLLSLETGSLKLANGRVIEKTLYNRRTRQDEPALFVALTFERREVLDSSNIKPMNLIGVDRGENIPAVIALTDPEGCPLSRFKDSLGNPTHILRIGESYKEKQRTIQAKKEVEQRRAGGYSRKYASKAKNLADDMVRNTARDLLYYAVTQDAMLIFENLSRGFGRQGKRTFMAERQYTRMEDWLTAKLAYEGLPSKTYLSKTLAQYTSKTCSNCGFTITSADYDRVLEKLKKTATGWMTTINGKELKVEGQITYYNRYKRQNVVKDLSVELDRLSEESVNNDISSWTKGRSGEALSLLKKRFSHRPVQEKFVCLNCGFETHADEQAALNIARSWLFLRSQEYKKYQTNKTTGNTDKRAFVETWQSFYRKKLKEVWKPAV

SEQ ID NO: 33837 - protein, 978 aa, synthetic construct
  REGION 1..978: note = engineered CasX variant
QEIKRINKIRRRLVKDSNTKKAGKTGPMKTLLVRVMTPDLRERLENLRKKPPNIPQPISNTSRANLNKLLTDYTEMKKAILHVYWEEFQKDPVGLMSRVAQPASKKIDQNKLKPEMDEKGNLTTAGFACSQCGQPLFVYKLEQVSEKGKAYTNYFGRCNVAEHEKLIKLAQLKPEKDSDEAVTYSLGKFGQRALDFYSIHVTKESTHPVKPLAQIAGNRYASGPVGKALSDACMGTIASFLSKYQDIIIEHQKVVKGNQKRLESLRELAGKENLEYPSVTLPPQPHTKEGVDAYNEVIARVRWWVNLNLWQKLKLSRDDAKPLLRLKGFPSFPLVERQANEVDWWDMVCNVKKLINEKKEDGKVFWQNLAGYKRQEALRPYLSSEEDRKKGKKFARYQLGDLLLHLEKKHGEDWGKVYDEAWERIDKKVEGLSKHIKLEEERRSEDAQSKAALTDWLRAKASFVIEGLKEADKDEFCRCELKLQKWYGDLRGKPFAIEAENSILDISGFSKQYNCAFIWQKDGVKKLNLYLIINYFKGGKLRFKKIKPEAFEANRFYTVINKKSGEIVPMEVNFNFDDPNLIILPLAFGKRQGREFIWNDLLSLETGSLKLANGRVIEKTLYNRRTRQDEPALFVALTFERREVLDSSNIKPMNLIGVDRGENIPAVIALTDPEGCPLSRFKDSLGNPTHILRIGESYKEKQRTIQAKKEVEQRRAGGYSRKYASKAKNLADDMVRNTARDLLYYAVTQDAMLIFENLSRGFGRQGKRTFMAERQYTRMEDWLTAKLAYEGLPSKTYLSKTLAQYTSKTCSNCGFTITSADYDRVLEKLKKTATGWMTTINGKELKVEGQITYYNRYKRQNVVKDLSVELDRLSEESVNNDISSWTKGRSGEALSLLKKRFSHRPVQEKFVCLNCGFETHADEQAALNIARSWLFLRSQEYKKYQTNKTTGNTDKRAFVETWQSFYRKKLKEVWKPAV

SEQ ID NO: 33838 - protein, 977 aa, synthetic construct
  REGION 1..977: note = engineered CasX variant
QEIKRINKIRRRLVKDSNTKKAGKTGPMKTLLVRVMTPDLRERLENLRKKPPNIPQPISNTSRANLNKLLTDYTEMKKAILHVYWEEFQKDPVGLMSRVAQPASKKIDQNKLKPEMDEKGNLTTAGFACSQCGQPLFVYKLEQVSEKGKAYTNYFGRCNVAEHEKLILLAQLKPEKDSDEAVTYSLGKFGQRALDFYSIHVTKESTHPVKPLAQIAGNRYASPVGKALSDACMGTIASFLSKYQDIIIEHQKVVKGNQKRLESLRELAGKENLEYPSVTLPPQPHTKEGVDAYNEVIARVRWWVNLNLWQKLKLSRDDAKPLLRLKGFPSFPLVERQANEVDWWDMVCNVKKLINEKKEDGKVFWQNLAGYKRQEALRPYLSSEEDRKKGKKFARYQLGDLLLHLEKKHGEDWGKVYDEAWERIDKKVEGLSKHIKLEEERRSEDAQSKAALTDWLRAKASFVIEGLKEADKDEFCRCELKLQKWYGDLRGKPFAIEAENSILDISGFSKQYNCAFIWQKDGVKKLNLYLIINYFKGGKLRFKKIKPEAFEANRFYTVINKKSGEIVPMEVNFNFDDPNLIILPLAFGKRQGREFIWNDLLSLETGSLKLANGRVIEKTLYNRRTRQDEPALFVALTFERREVLDSSNIKPMNLIGVDRGENIPAVIALTDPEGCPLSRFKDSLGNPTHILRIGESYKEKQRTIQAKKEVEQRRAGGYSRKYASKAKNLADDMVRNTARDLLYYAVTQDAMLIFENLSRGFGRQGKRTFMAERQYTRMEDWLTAKLAYEGLPSKTYLSKTLAQYTSKTCSNCGFTITSADYDRVLEKLKKTATGWMTTINGKELKVEGQITYYNRYKRQNVVKDLSVELDRLSEESVNNDISSWTKGRSGEALSLLKKRFSHRPVQEKFVCLNCGFETHADEQAALNIARSWLFLRSQEYKKYQTNKTTGNTDKRAFVETWQSFYRKKLKEVWKPAV

SEQ ID NO: 33839 - protein, 979 aa, synthetic construct
  REGION 1..979: note = engineered CasX variant
QEIKRINKIRRRLVKDSNTKKAGKTGPMKTLLVRVMTPDLRERLENLRKKPPNIPQPISNTSRANLNKLLTDYTEMKKAILHVYWEEFQKDPVGLMSRVAQPASKKIDQNKLKPEMDEKGNLTTAGFACSQCGQPLFVYKLEQVSEKGKAYTNYFGRCNVAEHEKLILLAQLKPEKDSDEAVTYSLGKFGQRALDFYSIHVTKESTHPVKPLAQIAGNRYASYPVGKALSDACMGTIASFLSKYQDIIIEHQKVVKGNQKRLESLRELAGKENLEYPSVTLPPQPHTKEGVDAYNEVIARVRMWVNLNLWQKLKLSRDDAKPLLRLKGFPSFPLVERQQANEVDWWDMVCNVKKLINEKKEDGKVFWQNLAGYKRQEALRPYLSSEEDRKKGKKFARYQLGDLLLHLEKKHGEDWGKVYDEAWERIDKKVEGLSKHIKLEEERRSEDAQSKAALTDWLRAKASFVIEGLKEADKDEFCRCELKLQKWYGDLRGKPFAIEAENSILDISGFSKQYNCAFIWQKDGVKKLNLYLIINYFKGGKLRFKKIKPEAFEANRFYTVINKKSGEIVPMEVNFNFDDPNLIILPLAFGKRQGREFIWNDLLSLETGSLKLANGRVIEKTLYNRRTRQDEPALFVALTFERREVLDSSNIKPMNLIGVDRGENIPAVIALTDPEGCPLSRFKDSLGNPTHILRIGESYKEKQRTIQAKKEVEQRRAGGYSRKYASKAKNLADDMVRNTARDLLYYAVTQDAMLIFENLSRGFGRQGKRTFMAERQYTRMEDWLTAKLAYEGLPSKTYLSKTLAQYTSKTCSNCGFTITSADYDRVLEKLKKTATGWMTTINGKELKVEGQITYYNRYKRQNVVKDLSVELDRLSEESVNNDISSWTKGRSGEALSLLKKRFSHRPVQEKFVCLNCGFETHADEQAALNIARSWLFLRSQEYKKYQTNKTTGNTDKRAFVETWQSFYRKKLKEVWKPAV

SEQ ID NO: 33840 - protein, 979 aa, synthetic construct
  REGION 1..979: note = engineered CasX variant
QEIKRINKIRRRLVKDSNTKKAGKTGPMKTLLVRVMTPDLRERLENLRKKPPNIPQPISNTSRANLNKLLTDYTEMKKAILHVYWEEFQKDPVGLMSRVAQPASKKIDQNKLKPEMDEKGNLTTAGFACSQCGQPLFVYKLEQVSEKGKAYTNYFGRCNVAEHEKLILLAQLKPEKDSDEAVTYSLGKFGQRALDFYSIHVTKESTHPVKPLAQIAGNRYASHPVGKALSDACMGTIASFLSKYQDIIIEHQKVVKGNQKRLESLRELAGKENLEYPSVTLPPQPHTKEGVDAYNEVIARVRMWVNLNLWQKLKLSRDDAKPLLRLKGFPSFPLVERQQANEVDWWDMVCNVKKLINEKKEDGKVFWQNLAGYKRQEALRPYLSSEEDRKKGKKFARYQLGDLLLHLEKKHGEDWGKVYDEAWERIDKKVEGLSKHIKLEEERRSEDAQSKAALTDWLRAKASFVIEGLKEADKDEFCRCELKLQKWYGDLRGKPFAIEAENSILDISGFSKQYNCAFIWQKDGVKKLNLYLIINYFKGGKLRFKKIKPEAFEANRFYTVINKKSGEIVPMEVNFNFDDPNLIILPLAFGKRQGREFIWNDLLSLETGSLKLANGRVIEKTLYNRRTRQDEPALFVALTFERREVLDSSNIKPMNLIGVDRGENIPAVIALTDPEGCPLSRFKDSLGNPTHILRIGESYKEKQRTIQAKKEVEQRRAGGYSRKYASKAKNLADDMVRNTARDLLYYAVTQDAMLIFENLSRGFGRQGKRTFMAERQYTRMEDWLTAKLAYEGLPSKTYLSKTLAQYTSKTCSNCGFTITSADYDRVLEKLKKTATGWMTTINGKELKVEGQITYYNRYKRQNVVKDLSVELDRLSEESVNNDISSWTKGRSGEALSLLKKRFSHRPVQEKFVCLNCGFETHADEQAALNIARSWLFLRSQEYKKYQTNKTTGNTDKRAFVETWQSFYRKKLKEVWKPAV

SEQ ID NO: 33841 - protein, 979 aa, synthetic construct
  REGION 1..979: note = engineered CasX variant
QEIKRINKIRRRLVKDSNTKKAGKTGPMKTLLVRVMTPDLRERLENLRKKPPNIPQPISNTSRANLNKLLTDYTEMKKAILHVYWEEFQKDPVGLMSRVAQPASKKIDQNKLKPEMDEKGNLTTAGFACSQCGQPLFVYKLEQVSEKGKAYTNYFGRCNVAEHEKLILLAQLKPEKDSDEAVTYSLGKFGQRALDFYSIHVTKESTHPVKPLAQIAGNRYASSPVGKALSDACMGTIASFLSKYQDIIIEHQKVVKGNQKRLESLRELAGKENLEYPSVTLPPQPHTKEGVDAYNEVIARVRMWVNLNLWQKLKLSRDDAKPLLRLKGFPSFPLVERQQANEVDWWDMVCNVKKLINEKKEDGKVFWQNLAGYKRQEALRPYLSSEEDRKKGKKFARYQLGDLLLHLEKKHGEDWGKVYDEAWERIDKKVEGLSKHIKLEEERRSEDAQSKAALTDWLRAKASFVIEGLKEADKDEFCRCELKLQKWYGDLRGKPFAIEAENSILDISGFSKQYNCAFIWQKDGVKKLNLYLIINYFKGGKLRFKKIKPEAFEANRFYTVINKKSGEIVPMEVNFNFDDPNLIILPLAFGKRQGREFIWNDLLSLETGSLKLANGRVIEKTLYNRRTRQDEPALFVALTFERREVLDSSNIKPMNLIGVDRGENIPAVIALTDPEGCPLSRFKDSLGNPTHILRIGESYKEKQRTIQAKKEVEQRRAGGYSRKYASKAKNLADDMVRNTARDLLYYAVTQDAMLIFENLSRGFGRQGKRTFMAERQYTRMEDWLTAKLAYEGLPSKTYLSKTLAQYTSKTCSNCGFTITSADYDRVLEKLKKTATGWMTTINGKELKVEGQITYYNRYKRQNVVKDLSVELDRLSEESVNNDISSWTKGRSGEALSLLKKRFSHRPVQEKFVCLNCGFETHADEQAALNIARSWLFLRSQEYKKYQTNKTTGNTDKRAFVETWQSFYRKKLKEVWKPAV

SEQ ID NO: 33842 - protein, 979 aa, synthetic construct
  REGION 1..979: note = engineered CasX variant
QEIKRINKIRRRLVKDSNTKKAGKTGPMKTLLVRVMTPDLRERLENLRKKPPNIPQPISNTSRANLNKLLTDYTEMKKAILHVYWEEFQKDPVGLMSRVAQPASKKIDQNKLKPEMDEKGNLTTAGFACSQCGQPLFVYKLEQVSEKGKAYTNYFGRCNVAEHEKLILLAQLKPEKDSDEAVTYSLGKFGQRALDFYSIHVTKESTHPVKPLAQIAGNRYASTPVGKALSDACMGTIASFLSKYQDIIIEHQKVVKGNQKRLESLRELAGKENLEYPSVTLPPQPHTKEGVDAYNEVIARVRMWVNLNLWQKLKLSRDDAKPLLRLKGFPSFPLVERQQANEVDWWDMVCNVKKLINEKKEDGKVFWQNLAGYKRQEALRPYLSSEEDRKKGKKFARYQLGDLLLHLEKKHGEDWGKVYDEAWERIDKKVEGLSKHIKLEEERRSEDAQSKAALTDWLRAKASFVIEGLKEADKDEFCRCELKLQKWYGDLRGKPFAIEAENSILDISGFSKQYNCAFIWQKDGVKKLNLYLIINYFKGGKLRFKKIKPEAFEANRFYTVINKKSGEIVPMEVNFNFDDPNLIILPLAFGKRQGREFIWNDLLSLETGSLKLANGRVIEKTLYNRRTRQDEPALFVALTFERREVLDSSNIKPMNLIGVDRGENIPAVIALTDPEGCPLSRFKDSLGNPTHILRIGESYKEKQRTIQAKKEVEQRRAGGYSRKYASKAKNLADDMVRNTARDLLYYAVTQDAMLIFENLSRGFGRQGKRTFMAERQYTRMEDWLTAKLAYEGLPSKTYLSKTLAQYTSKTCSNCGFTITSADYDRVLEKLKKTATGWMTTINGKELKVEGQITYYNRYKRQNVVKDLSVELDRLSEESVNNDISSWTKGRSGEALSLLKKRFSHRPVQEKFVCLNCGFETHADEQAALNIARSWLFLRSQEYKKYQTNKTTGNTDKRAFVETWQSFYRKKLKEVWKPAV

SEQ ID NO: 33843 - protein, 979 aa, synthetic construct
  REGION 1..979: note = engineered CasX variant
QEIKRINKIRRRLVKDSNTKKAGKTGPMKTLLVRVMTPDLRERLENLRKKPPNIPQPISNTSRANLNKLLTDYTEMKKAILHVYWEEFQKDPVGLMSRVAQPASKKIDQNKLKPEMDEKGNLTTAGFACSQCGQPLFVYKLEQVSEKGKAYTNYFGRCNVAEHEKLILLAQLKPEKDSDEAVTYSLGKFGQRALDFYSIHVTKESTHPVKPLAQIAGNRYASAPVGKALSDACMGTIASFLSKYQDIIIEHQKVVKGNQKRLESLRELAGKENLEYPSVTLPPQPHTKEGVDAYNEVIARVRMWVNLNLWQKLKLSRDDAKPLLRLKGFPSFPLVERQQANEVDWWDMVCNVKKLINEKKEDGKVFWQNLAGYKRQEALRPYLSSEEDRKKGKKFARYQLGDLLLHLEKKHGEDWGKVYDEAWERIDKKVEGLSKHIKLEEERRSEDAQSKAALTDWLRAKASFVIEGLKEADKDEFCRCELKLQKWYGDLRGKPFAIEAENSILDISGFSKQYNCAFIWQKDGVKKLNLYLIINYFKGGKLRFKKIKPEAFEANRFYTVINKKSGEIVPMEVNFNFDDPNLIILPLAFGKRQGREFIWNDLLSLETGSLKLANGRVIEKTLYNRRTRQDEPALFVALTFERREVLDSSNIKPMNLIGVDRGENIPAVIALTDPEGCPLSRFKDSLGNPTHILRIGESYKEKQRTIQAKKEVEQRRAGGYSRKYASKAKNLADDMVRNTARDLLYYAVTQDAMLIFENLSRGFGRQGKRTFMAERQYTRMEDWLTAKLAYEGLPSKTYLSKTLAQYTSKTCSNCGFTITSADYDRVLEKLKKTATGWMTTINGKELKVEGQITYYNRYKRQNVVKDLSVELDRLSEESVNNDISSWTKGRSGEALSLLKKRFSHRPVQEKFVCLNCGFETHADEQAALNIARSWLFLRSQEYKKYQTNKTTGNTDKRAFVETWQSFYRKKLKEVWKPAV

SEQ ID NO: 33844 - protein, 979 aa, synthetic construct
  REGION 1..979: note = engineered CasX variant
QEIKRINKIRRRLVKDSNTKKAGKTGPMKTLLVRVMTPDLRERLENLRKKPPNIPQPISNTSRANLNKLLTDYTEMKKAILHVYWEEFQKDPVGLMSRVAQPASKKIDQNKLKPEMDEKGNLTTAGFACSQCGQPLFVYKLEQVSEKGKAYTNYFGRCNVAEHEKLILLAQLKPEKDSDEAVTYSLGKFGQRALDFYSIHVTKESTHPVKPLAQIAGNRYASVPVGKALSDACMGTIASFLSKYQDIIIEHQKVVKGNQKRLESLRELAGKENLEYPSVTLPPQPHTKEGVDAYNEVIARVRMWVNLNLWQKLKLSRDDAKPLLRLKGFPSFPLVERQQANEVDWWDMVCNVKKLINEKKEDGKVFWQNLAGYKRQEALRPYLSSEEDRKKGKKFARYQLGDLLLHLEKKHGEDWGKVYDEAWERIDKKVEGLSKHIKLEEERRSEDAQSKAALTDWLRAKASFVIEGLKEADKDEFCRCELKLQKWYGDLRGKPFAIEAENSILDISGFSKQYNCAFIWQKDGVKKLNLYLIINYFKGGKLRFKKIKPEAFEANRFYTVINKKSGEIVPMEVNFNFDDPNLIILPLAFGKRQGREFIWNDLLSLETGSLKLANGRVIEKTLYNRRTRQDEPALFVALTFERREVLDSSNIKPMNLIGVDRGENIPAVIALTDPEGCPLSRFKDSLGNPTHILRIGESYKEKQRTIQAKKEVEQRRAGGYSRKYASKAKNLADDMVRNTARDLLYYAVTQDAMLIFENLSRGFGRQGKRTFMAERQYTRMEDWLTAKLAYEGLPSKTYLSKTLAQYTSKTCSNCGFTITSADYDRVLEKLKKTATGWMTTINGKELKVEGQITYYNRYKRQNVVKDLSVELDRLSEESVNNDISSWTKGRSGEALSLLKKRFSHRPVQEKFVCLNCGFETHADEQAALNIARSWLFLRSQEYKKYQTNKTTGNTDKRAFVETWQSFYRKKLKEVWKPAV

SEQ ID NO: 33845 - protein, 979 aa, synthetic construct
  REGION 1..979: note = engineered CasX variant
QEIKRINKIRRRLVKDSNTKKAGKTGPMKTLLVRVMTPDLRERLENLRKKPPNIPQPISNTSRANLNKLLTDYTEMKKAILHVYWEEFQKDPVGLMSRVAQPASKKIDQNKLKPEMDEKGNLTTAGFACSQCGQPLFVYKLEQVSEKGKAYTNYFGRCNVAEHEKLIKLAQLKPEKDSDEAVTYSLGKFGQRALDFYSIHVTKESTHPVKPLAQIAGNRYASGPVGKALSDACMGTIASFLSKYQDIIIEHQKVVKGNQKRLESLRELAGKENLEYPSVTLPPQPHTKEGVDAYNEVIARVRMWVNLNLWQKLKLSRDDAKPLLRLKGFPSFPLVERQQANEVDWWDMVCNVKKLINEKKEDGKVFWQNLAGYKRQEALRPYLSSEEDRKKGKKFARYQLGDLLLHLEKKHGEDWGKVYDEAWERIDKKVEGLSKHIKLEEERRSEDAQSKAALTDWLRAKASFVIEGLKEADKDEFCRCELKLQKWYGDLRGKPFAIEAENSILDISGFSKQYNCAFIWQKDGVKKLNLYLIINYFKGGKLRFKKIKPEAFEANRFYTVINKKSGEIVPMEVNFNFDDPNLIILPLAFGKRQGREFIWNDLLSLETGSLKLANGRVIEKTLYNRRTRQDEPALFVALTFERREVLDSSNIKPMNLIGVDRGENIPAVIALTDPEGCPLSRFKDSLGNPTHILRIGESYKEKQRTIQAKKEVEQRRAGGYSRKYASKAKNLADDMVRNTARDLLYYAVTQDAMLIFENLSRGFGRQGKRTFMAERQYTRMEDWLTAKLAYEGLPSKTYLSKTLAQYTSKTCSNCGFTITSADYDRVLEKLKKTATGWMTTINGKELKVEGQITYYNRYKRQNVVKDLSVELDRLSEESVNNDISSWTKGRSGEALSLLKKRFSHRPVQEKFVCLNCGFETHADEQAALNIARSWLFLRSQEYKKYQTNKTTGNTDKRAFVETWQSFYRKKLKEVWKPAV

SEQ ID NO: 33846 - protein, 978 aa, synthetic construct
  REGION 1..978: note = engineered CasX variant
QEIKRINKIRRRLVKDSNTKKAGKTGPMKTLLVRVMTPDLRERLENLRKKPPNIPQPISNTSRANLNKLLTDYTEMKKAILHVYWEEFQKDPVGLMSRVAQPASKKIDQNKLKPEMDEKGNLTTAGFACSQCGQPLFVYKLEQVSEKGKAYTNYFGRCNVAEHEKLILLAQLKPEKDSDEAVTYSLGKFGQRALDFYSIHVTKESTHPVKPLAQIAGNRYASPVGKALSDACMGTIASFLSKYQDIIIEHQKVVKGNQKRLESLRELAGKENLEYPSVTLPPQPHTKEGVDAYNEVIARVRMWVNLNLWQKLKLSRDDAKPLLRLKGFPSFPLVERQQANEVDWWDMVCNVKKLINEKKEDGKVFWQNLAGYKRQEALRPYLSSEEDRKKGKKFARYQLGDLLLHLEKKHGEDWGKVYDEAWERIDKKVEGLSKHIKLEEERRSEDAQSKAALTDWLRAKASFVIEGLKEADKDEFCRCELKLQKWYGDLRGKPFAIEAENSILDISGFSKQYNCAFIWQKDGVKKLNLYLIINYFKGGKLRFKKIKPEAFEANRFYTVINKKSGEIVPMEVNFNFDDPNLIILPLAFGKRQGREFIWNDLLSLETGSLKLANGRVIEKTLYNRRTRQDEPALFVALTFERREVLDSSNIKPMNLIGVDRGENIPAVIALTDPEGCPLSRFKDSLGNPTHILRIGESYKEKQRTIQAKKEVEQRRAGGYSRKYASKAKNLADDMVRNTARDLLYYAVTQDAMLIFENLSRGFGRQGKRTFMAERQYTRMEDWLTAKLAYEGLPSKTYLSKTLAQYTSKTCSNCGFTITSADYDRVLEKLKKTATGWMTTINGKELKVEGQITYYNRYKRQNVVKDLSVELDRLSEESVNNDISSWTKGRSGEALSLLKKRFSHRPVQEKFVCLNCGFETHADEQAALNIARSWLFLRSQEYKKYQTNKTTGNTDKRAFVETWQSFYRKKLKEVWKPAV

SEQ ID NO: 33847 - protein, 979 aa, synthetic construct
  REGION 1..979: note = engineered CasX variant
QEIKRINKIRRRLVKDSNTKKAGKTGPMKTLLVRVMTPDLRERLENLRKKPPNIPQPISNTSRANLNKLLTDYTEMKKAILHVYWEEFQKDPVGLMSRVAQPASKKIDQNKLKPEMDEKGNLTTAGFACSQCGQPLFVYKLEQVSEKGKAYTNYFGRCNVAEHEKLILLAQLKPEKDSDEAVTYSLGKFGQRALDFYSIHVTKESTHPVKPLAQIAGNRYASYPVGKALSDACMGTIASFLSKYQDIIIEHQKVVKGNQKRLESLRELAGKENLEYPSVTLPPQPHTKEGVDAYNEVIARVRMWVNLNLWQKLKLSRDDAKPLLRLKGFPSFPLVERQANAEVDWWDMVCNVKKLINEKKEDGKVFWQNLAGYKRQEALRPYLSSEEDRKKGKKFARYQLGDLLLHLEKKHGEDWGKVYDEAWERIDKKVEGLSKHIKLEEERRSEDAQSKAALTDWLRAKASFVIEGLKEADKDEFCRCELKLQKWYGDLRGKPFAIEAENSILDISGFSKQYNCAFIWQKDGVKKLNLYLIINYFKGGKLRFKKIKPEAFEANRFYTVINKKSGEIVPMEVNFNFDDPNLIILPLAFGKRQGREFIWNDLLSLETGSLKLANGRVIEKTLYNRRTRQDEPALFVALTFERREVLDSSNIKPMNLIGVDRGENIPAVIALTDPEGCPLSRFKDSLGNPTHILRIGESYKEKQRTIQAKKEVEQRRAGGYSRKYASKAKNLADDMVRNTARDLLYYAVTQDAMLIFENLSRGFGRQGKRTFMAERQYTRMEDWLTAKLAYEGLPSKTYLSKTLAQYTSKTCSNCGFTITSADYDRVLEKLKKTATGWMTTINGKELKVEGQITYYNRYKRQNVVKDLSVELDRLSEESVNNDISSWTKGRSGEALSLLKKRFSHRPVQEKFVCLNCGFETHADEQAALNIARSWLFLRSQEYKKYQTNKTTGNTDKRAFVETWQSFYRKKLKEVWKPAV

SEQ ID NO: 33848 - protein, 979 aa, synthetic construct
  REGION 1..979: note = engineered CasX variant
QEIKRINKIRRRLVKDSNTKKAGKTGPMKTLLVRVMTPDLRERLENLRKKPPNIPQPISNTSRANLNKLLTDYTEMKKAILHVYWEEFQKDPVGLMSRVAQPASKKIDQNKLKPEMDEKGNLTTAGFACSQCGQPLFVYKLEQVSEKGKAYTNYFGRCNVAEHEKLILLAQLKPEKDSDEAVTYSLGKFGQRALDFYSIHVTKESTHPVKPLAQIAGNRYASHPVGKALSDACMGTIASFLSKYQDIIIEHQKVVKGNQKRLESLRELAGKENLEYPSVTLPPQPHTKEGVDAYNEVIARVRMWVNLNLWQKLKLSRDDAKPLLRLKGFPSFPLVERQANAEVDWWDMVCNVKKLINEKKEDGKVFWQNLAGYKRQEALRPYLSSEEDRKKGKKFARYQLGDLLLHLEKKHGEDWGKVYDEAWERIDKKVEGLSKHIKLEEERRSEDAQSKAALTDWLRAKASFVIEGLKEADKDEFCRCELKLQKWYGDLRGKPFAIEAENSILDISGFSKQYNCAFIWQKDGVKKLNLYLIINYFKGGKLRFKKIKPEAFEANRFYTVINKKSGEIVPMEVNFNFDDPNLIILPLAFGKRQGREFIWNDLLSLETGSLKLANGRVIEKTLYNRRTRQDEPALFVALTFERREVLDSSNIKPMNLIGVDRGENIPAVIALTDPEGCPLSRFKDSLGNPTHILRIGESYKEKQRTIQAKKEVEQRRAGGYSRKYASKAKNLADDMVRNTARDLLYYAVTQDAMLIFENLSRGFGRQGKRTFMAERQYTRMEDWLTAKLAYEGLPSKTYLSKTLAQYTSKTCSNCGFTITSADYDRVLEKLKKTATGWMTTINGKELKVEGQITYYNRYKRQNVVKDLSVELDRLSEESVNNDISSWTKGRSGEALSLLKKRFSHRPVQEKFVCLNCGFETHADEQAALNIARSWLFLRSQEYKKYQTNKTTGNTDKRAFVETWQSFYRKKLKEVWKPAV

SEQ ID NO: 33849 - protein, 979 aa, synthetic construct
  REGION 1..979: note = engineered CasX variant
QEIKRINKIRRRLVKDSNTKKAGKTGPMKTLLVRVMTPDLRERLENLRKKPPNIPQPISNTSRANLNKLLTDYTEMKKAILHVYWEEFQKDPVGLMSRVAQPASKKIDQNKLKPEMDEKGNLTTAGFACSQCGQPLFVYKLEQVSEKGKAYTNYFGRCNVAEHEKLILLAQLKPEKDSDEAVTYSLGKFGQRALDFYSIHVTKESTHPVKPLAQIAGNRYASSPVGKALSDACMGTIASFLSKYQDIIIEHQKVVKGNQKRLESLRELAGKENLEYPSVTLPPQPHTKEGVDAYNEVIARVRMWVNLNLWQKLKLSRDDAKPLLRLKGFPSFPLVERQANAEVDWWDMVCNVKKLINEKKEDGKVFWQNLAGYKRQEALRPYLSSEEDRKKGKKFARYQLGDLLLHLEKKHGEDWGKVYDEAWERIDKKVEGLSKHIKLEEERRSEDAQSKAALTDWLRAKASFVIEGLKEADKDEFCRCELKLQKWYGDLRGKPFAIEAENSILDISGFSKQYNCAFIWQKDGVKKLNLYLIINYFKGGKLRFKKIKPEAFEANRFYTVINKKSGEIVPMEVNFNFDDPNLIILPLAFGKRQGREFIWNDLLSLETGSLKLANGRVIEKTLYNRRTRQDEPALFVALTFERREVLDSSNIKPMNLIGVDRGENIPAVIALTDPEGCPLSRFKDSLGNPTHILRIGESYKEKQRTIQAKKEVEQRRAGGYSRKYASKAKNLADDMVRNTARDLLYYAVTQDAMLIFENLSRGFGRQGKRTFMAERQYTRMEDWLTAKLAYEGLPSKTYLSKTLAQYTSKTCSNCGFTITSADYDRVLEKLKKTATGWMTTINGKELKVEGQITYYNRYKRQNVVKDLSVELDRLSEESVNNDISSWTKGRSGEALSLLKKRFSHRPVQEKFVCLNCGFETHADEQAALNIARSWLFLRSQEYKKYQTNKTTGNTDKRAFVETWQSFYRKKLKEVWKPAV

SEQ ID NO: 33850 - protein, 979 aa, synthetic construct
  REGION 1..979: note = engineered CasX variant
QEIKRINKIRRRLVKDSNTKKAGKTGPMKTLLVRVMTPDLRERLENLRKKPPNIPQPISNTSRANLNKLLTDYTEMKKAILHVYWEEFQKDPVGLMSRVAQPASKKIDQNKLKPEMDEKGNLTTAGFACSQCGQPLFVYKLEQVSEKGKAYTNYFGRCNVAEHEKLILLAQLKPEKDSDEAVTYSLGKFGQRALDFYSIHVTKESTHPVKPLAQIAGNRYASTPVGKALSDACMGTIASFLSKYQDIIIEHQKVVKGNQKRLESLRELAGKENLEYPSVTLPPQPHTKEGVDAYNEVIARVRMWVNLNLWQKLKLSRDDAKPLLRLKGFPSFPLVERQANAEVDWWDMVCNVKKLINEKKEDGKVFWQNLAGYKRQEALRPYLSSEEDRKKGKKFARYQLGDLLLHLEKKHGEDWGKVYDEAWERIDKKVEGLSKHIKLEEERRSEDAQSKAALTDWLRAKASFVIEGLKEADKDEFCRCELKLQKWYGDLRGKPFAIEAENSILDISGFSKQYNCAFIWQKDGVKKLNLYLIINYFKGGKLRFKKIKPEAFEANRFYTVINKKSGEIVPMEVNFNFDDPNLIILPLAFGKRQGREFIWNDLLSLETGSLKLANGRVIEKTLYNRRTRQDEPALFVALTFERREVLDSSNIKPMNLIGVDRGENIPAVIALTDPEGCPLSRFKDSLGNPTHILRIGESYKEKQRTIQAKKEVEQRRAGGYSRKYASKAKNLADDMVRNTARDLLYYAVTQDAMLIFENLSRGFGRQGKRTFMAERQYTRMEDWLTAKLAYEGLPSKTYLSKTLAQYTSKTCSNCGFTITSADYDRVLEKLKKTATGWMTTINGKELKVEGQITYYNRYKRQNVVKDLSVELDRLSEESVNNDISSWTKGRSGEALSLLKKRFSHRPVQEKFVCLNCGFETHADEQAALNIARSWLFLRSQEYKKYQTNKTTGNTDKRAFVETWQSFYRKKLKEVWKPAV

SEQ ID NO: 33851 - protein, 979 aa, synthetic construct
  REGION 1..979: note = engineered CasX variant
QEIKRINKIRRRLVKDSNTKKAGKTGPMKTLLVRVMTPDLRERLENLRKKPPNIPQPISNTSRANLNKLLTDYTEMKKAILHVYWEEFQKDPVGLMSRVAQPASKKIDQNKLKPEMDEKGNLTTAGFACSQCGQPLFVYKLEQVSEKGKAYTNYFGRCNVAEHEKLILLAQLKPEKDSDEAVTYSLGKFGQRALDFYSIHVTKESTHPVKPLAQIAGNRYASAPVGKALSDACMGTIASFLSKYQDIIIEHQKVVKGNQKRLESLRELAGKENLEYPSVTLPPQPHTKEGVDAYNEVIARVRMWVNLNLWQKLKLSRDDAKPLLRLKGFPSFPLVERQANAEVDWWDMVCNVKKLINEKKEDGKVFWQNLAGYKRQEALRPYLSSEEDRKKGKKFARYQLGDLLLHLEKKHGEDWGKVYDEAWERIDKKVEGLSKHIKLEEERRSEDAQSKAALTDWLRAKASFVIEGLKEADKDEFCRCELKLQKWYGDLRGKPFAIEAENSILDISGFSKQYNCAFIWQKDGVKKLNLYLIINYFKGGKLRFKKIKPEAFEANRFYTVINKKSGEIVPMEVNFNFDDPNLIILPLAFGKRQGREFIWNDLLSLETGSLKLANGRVIEKTLYNRRTRQDEPALFVALTFERREVLDSSNIKPMNLIGVDRGENIPAVIALTDPEGCPLSRFKDSLGNPTHILRIGESYKEKQRTIQAKKEVEQRRAGGYSRKYASKAKNLADDMVRNTARDLLYYAVTQDAMLIFENLSRGFGRQGKRTFMAERQYTRMEDWLTAKLAYEGLPSKTYLSKTLAQYTSKTCSNCGFTITSADYDRVLEKLKKTATGWMTTINGKELKVEGQITYYNRYKRQNVVKDLSVELDRLSEESVNNDISSWTKGRSGEALSLLKKRFSHRPVQEKFVCLNCGFETHADEQAALNIARSWLFLRSQEYKKYQTNKTTGNTDKRAFVETWQSFYRKKLKEVWKPAV

SEQ ID NO: 33852 - protein, 979 aa, synthetic construct
  REGION 1..979: note = engineered CasX variant
QEIKRINKIRRRLVKDSNTKKAGKTGPMKTLLVRVMTPDLRERLENLRKKPPNIPQPISNTSRANLNKLLTDYTEMKKAILHVYWEEFQKDPVGLMSRVAQPASKKIDQNKLKPEMDEKGNLTTAGFACSQCGQPLFVYKLEQVSEKGKAYTNYFGRCNVAEHEKLILLAQLKPEKDSDEAVTYSLGKFGQRALDFYSIHVTKESTHPVKPLAQIAGNRYASVPVGKALSDACMGTIASFLSKYQDIIIEHQKVVKGNQKRLESLRELAGKENLEYPSVTLPPQPHTKEGVDAYNEVIARVRMWVNLNLWQKLKLSRDDAKPLLRLKGFPSFPLVERQANAEVDWWDMVCNVKKLINEKKEDGKVFWQNLAGYKRQEALRPYLSSEEDRKKGKKFARYQLGDLLLHLEKKHGEDWGKVYDEAWERIDKKVEGLSKHIKLEEERRSEDAQSKAALTDWLRAKASFVIEGLKEADKDEFCRCELKLQKWYGDLRGKPFAIEAENSILDISGFSKQYNCAFIWQKDGVKKLNLYLIINYFKGGKLRFKKIKPEAFEANRFYTVINKKSGEIVPMEVNFNFDDPNLIILPLAFGKRQGREFIWNDLLSLETGSLKLANGRVIEKTLYNRRTRQDEPALFVALTFERREVLDSSNIKPMNLIGVDRGENIPAVIALTDPEGCPLSRFKDSLGNPTHILRIGESYKEKQRTIQAKKEVEQRRAGGYSRKYASKAKNLADDMVRNTARDLLYYAVTQDAMLIFENLSRGFGRQGKRTFMAERQYTRMEDWLTAKLAYEGLPSKTYLSKTLAQYTSKTCSNCGFTITSADYDRVLEKLKKTATGWMTTINGKELKVEGQITYYNRYKRQNVVKDLSVELDRLSEESVNNDISSWTKGRSGEALSLLKKRFSHRPVQEKFVCLNCGFETHADEQAALNIARSWLFLRSQEYKKYQTNKTTGNTDKRAFVETWQSFYRKKLKEVWKPAV

SEQ ID NO: 33853 - protein, 979 aa, synthetic construct
  REGION 1..979: note = engineered CasX variant
QEIKRINKIRRRLVKDSNTKKAGKTGPMKTLLVRVMTPDLRERLENLRKKPPNIPQPISNTSRANLNKLLTDYTEMKKAILHVYWEEFQKDPVGLMSRVAQPASKKIDQNKLKPEMDEKGNLTTAGFACSQCGQPLFVYKLEQVSEKGKAYTNYFGRCNVAEHEKLIKLAQLKPEKDSDEAVTYSLGKFGQRALDFYSIHVTKESTHPVKPLAQIAGNRYASGPVGKALSDACMGTIASFLSKYQDIIIEHQKVVKGNQKRLESLRELAGKENLEYPSVTLPPQPHTKEGVDAYNEVIARVRMWVNLNLWQKLKLSRDDAKPLLRLKGFPSFPLVERQANAEVDWWDMVCNVKKLINEKKEDGKVFWQNLAGYKRQEALRPYLSSEEDRKKGKKFARYQLGDLLLHLEKKHGEDWGKVYDEAWERIDKKVEGLSKHIKLEEERRSEDAQSKAALTDWLRAKASFVIEGLKEADKDEFCRCELKLQKWYGDLRGKPFAIEAENSILDISGFSKQYNCAFIWQKDGVKKLNLYLIINYFKGGKLRFKKIKPEAFEANRFYTVINKKSGEIVPMEVNFNFDDPNLIILPLAFGKRQGREFIWNDLLSLETGSLKLANGRVIEKTLYNRRTRQDEPALFVALTFERREVLDSSNIKPMNLIGVDRGENIPAVIALTDPEGCPLSRFKDSLGNPTHILRIGESYKEKQRTIQAKKEVEQRRAGGYSRKYASKAKNLADDMVRNTARDLLYYAVTQDAMLIFENLSRGFGRQGKRTFMAERQYTRMEDWLTAKLAYEGLPSKTYLSKTLAQYTSKTCSNCGFTITSADYDRVLEKLKKTATGWMTTINGKELKVEGQITYYNRYKRQNVVKDLSVELDRLSEESVNNDISSWTKGRSGEALSLLKKRFSHRPVQEKFVCLNCGFETHADEQAALNIARSWLFLRSQEYKKYQTNKTTGNTDKRAFVETWQSFYRKKLKEVWKPAV

SEQ ID NO: 33854 - protein, 978 aa, synthetic construct
  REGION 1..978: note = engineered CasX variant
QEIKRINKIRRRLVKDSNTKKAGKTGPMKTLLVRVMTPDLRERLENLRKKPPNIPQPISNTSRANLNKLLTDYTEMKKAILHVYWEEFQKDPVGLMSRVAQPASKKIDQNKLKPEMDEKGNLTTAGFACSQCGQPLFVYKLEQVSEKGKAYTNYFGRCNVAEHEKLILLAQLKPEKDSDEAVTYSLGKFGQRALDFYSIHVTKESTHPVKPLAQIAGNRYASPVGKALSDACMGTIASFLSKYQDIIIEHQKVVKGNQKRLESLRELAGKENLEYPSVTLPPQPHTKEGVDAYNEVIARVRMWVNLNLWQKLKLSRDDAKPLLRLKGFPSFPLVERQANAEVDWWDMVCNVKKLINEKKEDGKVFWQNLAGYKRQEALRPYLSSEEDRKKGKKFARYQLGDLLLHLEKKHGEDWGKVYDEAWERIDKKVEGLSKHIKLEEERRSEDAQSKAALTDWLRAKASFVIEGLKEADKDEFCRCELKLQKWYGDLRGKPFAIEAENSILDISGFSKQYNCAFIWQKDGVKKLNLYLIINYFKGGKLRFKKIKPEAFEANRFYTVINKKSGEIVPMEVNFNFDDPNLIILPLAFGKRQGREFIWNDLLSLETGSLKLANGRVIEKTLYNRRTRQDEPALFVALTFERREVLDSSNIKPMNLIGVDRGENIPAVIALTDPEGCPLSRFKDSLGNPTHILRIGESYKEKQRTIQAKKEVEQRRAGGYSRKYASKAKNLADDMVRNTARDLLYYAVTQDAMLIFENLSRGFGRQGKRTFMAERQYTRMEDWLTAKLAYEGLPSKTYLSKTLAQYTSKTCSNCGFTITSADYDRVLEKLKKTATGWMTTINGKELKVEGQITYYNRYKRQNVVKDLSVELDRLSEESVNNDISSWTKGRSGEALSLLKKRFSHRPVQEKFVCLNCGFETHADEQAALNIARSWLFLRSQEYKKYQTNKTTGNTDKRAFVETWQSFYRKKLKEVWKPAV

SEQ ID NO: 33855 - protein, 978 aa, synthetic construct
  REGION 1..978: note = engineered CasX variant
QEIKRINKIRRRLVKDSNTKKAGKTGPMKTLLVRVMTPDLRERLENLRKKPPNIPQPISNTSRANLNKLLTDYTEMKKAILHVYWEEFQKDPVGLMSRVAQPASKKIDQNKLKPEMDEKGNLTTAGFACSQCGQPLFVYKLEQVSEKGKAYTNYFGRCNVAEHEKLILLAQLKPEKDSDEAVTYSLGKFGQRALDFYSIHVTKESTHPVKPLAQIAGNRYASYPVGKALSDACMGTIASFLSKYQDIIIEHQKVVKGNQKRLESLRELAGKENLEYPSVTLPPQPHTKEGVDAYNEVIARVRMWVNLNLWQKLKLSRDDAKPLLRLKGFPSFPLVERQANEVDWWDMVCNVKKLINEKKEDGKVFWQNLAGYKRQEALRPYLSSEEDRKKGKKFARTQLGDLLLHLEKKHGEDWGKVYDEAWERIDKKVEGLSKHIKLEEERRSEDAQSKAALTDWLRAKASFVIEGLKEADKDEFCRCELKLQKWYGDLRGKPFAIEAENSILDISGFSKQYNCAFIWQKDGVKKLNLYLIINYFKGGKLRFKKIKPEAFEANRFYTVINKKSGEIVPMEVNFNFDDPNLIILPLAFGKRQGREFIWNDLLSLETGSLKLANGRVIEKTLYNRRTRQDEPALFVALTFERREVLDSSNIKPMNLIGVDRGENIPAVIALTDPEGCPLSRFKDSLGNPTHILRIGESYKEKQRTIQAKKEVEQRRAGGYSRKYASKAKNLADDMVRNTARDLLYYAVTQDAMLIFENLSRGFGRQGKRTFMAERQYTRMEDWLTAKLAYEGLPSKTYLSKTLAQYTSKTCSNCGFTITSADYDRVLEKLKKTATGWMTTINGKELKVEGQITYYNRYKRQNVVKDLSVELDRLSEESVNNDISSWTKGRSGEALSLLKKRFSHRPVQEKFVCLNCGFETHADEQAALNIARSWLFLRSQEYKKYQTNKTTGNTDKRAFVETWQSFYRKKLKEVWKPAV

SEQ ID NO: 33856 - protein, 978 aa, synthetic construct
  REGION 1..978: note = engineered CasX variant
QEIKRINKIRRRLVKDSNTKKAGKTGPMKTLLVRVMTPDLRERLENLRKKPPNIPQPISNTSRANLNKLLTDYTEMKKAILHVYWEEFQKDPVGLMSRVAQPASKKIDQNKLKPEMDEKGNLTTAGFACSQCGQPLFVYKLEQVSEKGKAYTNYFGRCNVAEHEKLILLAQLKPEKDSDEAVTYSLGKFGQRALDFYSIHVTKESTHPVKPLAQIAGNRYASHPVGKALSDACMGTIASFLSKYQDIIIEHQKVVKGNQKRLESLRELAGKENLEYPSVTLPPQPHTKEGVDAYNEVIARVRMWVNLNLWQKLKLSRDDAKPLLRLKGFPSFPLVERQANEVDWWDMVCNVKKLINEKKEDGKVFWQNLAGYKRQEALRPYLSSEEDRKKGKKFARTQLGDLLLHLEKKHGEDWGKVYDEAWERIDKKVEGLSKHIKLEEERRSEDAQSKAALTDWLRAKASFVIEGLKEADKDEFCRCELKLQKWYGDLRGKPFAIEAENSILDISGFSKQYNCAFIWQKDGVKKLNLYLIINYFKGGKLRFKKIKPEAFEANRFYTVINKKSGEIVPMEVNFNFDDPNLIILPLAFGKRQGREFIWNDLLSLETGSLKLANGRVIEKTLYNRRTRQDEPALFVALTFERREVLDSSNIKPMNLIGVDRGENIPAVIALTDPEGCPLSRFKDSLGNPTHILRIGESYKEKQRTIQAKKEVEQRRAGGYSRKYASKAKNLADDMVRNTARDLLYYAVTQDAMLIFENLSRGFGRQGKRTFMAERQYTRMEDWLTAKLAYEGLPSKTYLSKTLAQYTSKTCSNCGFTITSADYDRVLEKLKKTATGWMTTINGKELKVEGQITYYNRYKRQNVVKDLSVELDRLSEESVNNDISSWTKGRSGEALSLLKKRFSHRPVQEKFVCLNCGFETHADEQAALNIARSWLFLRSQEYKKYQTNKTTGNTDKRAFVETWQSFYRKKLKEVWKPAV

SEQ ID NO: 33857 - protein, 978 aa, synthetic construct
  REGION 1..978: note = engineered CasX variant
QEIKRINKIRRRLVKDSNTKKAGKTGPMKTLLVRVMTPDLRERLENLRKKPPNIPQPISNTSRANLNKLLTDYTEMKKAILHVYWEEFQKDPVGLMSRVAQPASKKIDQNKLKPEMDEKGNLTTAGFACSQCGQPLFVYKLEQVSEKGKAYTNYFGRCNVAEHEKLILLAQLKPEKDSDEAVTYSLGKFGQRALDFYSIHVTKESTHPVKPLAQIAGNRYASSPVGKALSDACMGTIASFLSKYQDIIIEHQKVVKGNQKRLESLRELAGKENLEYPSVTLPPQPHTKEGVDAYNEVIARVRMWVNLNLWQKLKLSRDDAKPLLRLKGFPSFPLVERQANEVDWWDMVCNVKKLINEKKEDGKVFWQNLAGYKRQEALRPYLSSEEDRKKGKKFARTQLGDLLLHLEKKHGEDWGKVYDEAWERIDKKVEGLSKHIKLEEERRSEDAQSKAALTDWLRAKASFVIEGLKEADKDEFCRCELKLQKWYGDLRGKPFAIEAENSILDISGFSKQYNCAFIWQKDGVKKLNLYLIINYFKGGKLRFKKIKPEAFEANRFYTVINKKSGEIVPMEVNFNFDDPNLIILPLAFGKRQGREFIWNDLLSLETGSLKLANGRVIEKTLYNRRTRQDEPALFVALTFERREVLDSSNIKPMNLIGVDRGENIPAVIALTDPEGCPLSRFKDSLGNPTHILRIGESYKEKQRTIQAKKEVEQRRAGGYSRKYASKAKNLADDMVRNTARDLLYYAVTQDAMLIFENLSRGFGRQGKRTFMAERQYTRMEDWLTAKLAYEGLPSKTYLSKTLAQYTSKTCSNCGFTITSADYDRVLEKLKKTATGWMTTINGKELKVEGQITYYNRYKRQNVVKDLSVELDRLSEESVNNDISSWTKGRSGEALSLLKKRFSHRPVQEKFVCLNCGFETHADEQAALNIARSWLFLRSQEYKKYQTNKTTGNTDKRAFVETWQSFYRKKLKEVWKPAV

SEQ ID NO: 33858 - protein, 978 aa, synthetic construct
  REGION 1..978: note = engineered CasX variant
QEIKRINKIRRRLVKDSNTKKAGKTGPMKTLLVRVMTPDLRERLENLRKKPPNIPQPISNTSRANLNKLLTDYTEMKKAILHVYWEEFQKDPVGLMSRVAQPASKKIDQNKLKPEMDEKGNLTTAGFACSQCGQPLFVYKLEQVSEKGKAYTNYFGRCNVAEHEKLILLAQLKPEKDSDEAVTYSLGKFGQRALDFYSIHVTKESTHPVKPLAQIAGNRYASTPVGKALSDACMGTIASFLSKYQDIIIEHQKVVKGNQKRLESLRELAGKENLEYPSVTLPPQPHTKEGVDAYNEVIARVRMWVNLNLWQKLKLSRDDAKPLLRLKGFPSFPLVERQANEVDWWDMVCNVKKLINEKKEDGKVFWQNLAGYKRQEALRPYLSSEEDRKKGKKFARTQLGDLLLHLEKKHGEDWGKVYDEAWERIDKKVEGLSKHIKLEEERRSEDAQSKAALTDWLRAKASFVIEGLKEADKDEFCRCELKLQKWYGDLRGKPFAIEAENSILDISGFSKQYNCAFIWQKDGVKKLNLYLIINYFKGGKLRFKKIKPEAFEANRFYTVINKKSGEIVPMEVNFNFDDPNLIILPLAFGKRQGREFIWNDLLSLETGSLKLANGRVIEKTLYNRRTRQDEPALFVALTFERREVLDSSNIKPMNLIGVDRGENIPAVIALTDPEGCPLSRFKDSLGNPTHILRIGESYKEKQRTIQAKKEVEQRRAGGYSRKYASKAKNLADDMVRNTARDLLYYAVTQDAMLIFENLSRGFGRQGKRTFMAERQYTRMEDWLTAKLAYEGLPSKTYLSKTLAQYTSKTCSNCGFTITSADYDRVLEKLKKTATGWMTTINGKELKVEGQITYYNRYKRQNVVKDLSVELDRLSEESVNNDISSWTKGRSGEALSLLKKRFSHRPVQEKFVCLNCGFETHADEQAALNIARSWLFLRSQEYKKYQTNKTTGNTDKRAFVETWQSFYRKKLKEVWKPAV

SEQ ID NO: 33859 - protein, 978 aa, synthetic construct
  REGION 1..978: note = engineered CasX variant
QEIKRINKIRRRLVKDSNTKKAGKTGPMKTLLVRVMTPDLRERLENLRKKPPNIPQPISNTSRANLNKLLTDYTEMKKAILHVYWEEFQKDPVGLMSRVAQPASKKIDQNKLKPEMDEKGNLTTAGFACSQCGQPLFVYKLEQVSEKGKAYTNYFGRCNVAEHEKLILLAQLKPEKDSDEAVTYSLGKFGQRALDFYSIHVTKESTHPVKPLAQIAGNRYASAPVGKALSDACMGTIASFLSKYQDIIIEHQKVVKGNQKRLESLRELAGKENLEYPSVTLPPQPHTKEGVDAYNEVIARVRMWVNLNLWQKLKLSRDDAKPLLRLKGFPSFPLVERQANEVDWWDMVCNVKKLINEKKEDGKVFWQNLAGYKRQEALRPYLSSEEDRKKGKKFARTQLGDLLLHLEKKHGEDWGKVYDEAWERIDKKVEGLSKHIKLEEERRSEDAQSKAALTDWLRAKASFVIEGLKEADKDEFCRCELKLQKWYGDLRGKPFAIEAENSILDISGFSKQYNCAFIWQKDGVKKLNLYLIINYFKGGKLRFKKIKPEAFEANRFYTVINKKSGEIVPMEVNFNFDDPNLIILPLAFGKRQGREFIWNDLLSLETGSLKLANGRVIEKTLYNRRTRQDEPALFVALTFERREVLDSSNIKPMNLIGVDRGENIPAVIALTDPEGCPLSRFKDSLGNPTHILRIGESYKEKQRTIQAKKEVEQRRAGGYSRKYASKAKNLADDMVRNTARDLLYYAVTQDAMLIFENLSRGFGRQGKRTFMAERQYTRMEDWLTAKLAYEGLPSKTYLSKTLAQYTSKTCSNCGFTITSADYDRVLEKLKKTATGWMTTINGKELKVEGQITYYNRYKRQNVVKDLSVELDRLSEESVNNDISSWTKGRSGEALSLLKKRFSHRPVQEKFVCLNCGFETHADEQAALNIARSWLFLRSQEYKKYQTNKTTGNTDKRAFVETWQSFYRKKLKEVWKPAV

SEQ ID NO: 33860 - protein, 978 aa, synthetic construct
  REGION 1..978: note = engineered CasX variant
QEIKRINKIRRRLVKDSNTKKAGKTGPMKTLLVRVMTPDLRERLENLRKKPPNIPQPISNTSRANLNKLLTDYTEMKKAILHVYWEEFQKDPVGLMSRVAQPASKKIDQNKLKPEMDEKGNLTTAGFACSQCGQPLFVYKLEQVSEKGKAYTNYFGRCNVAEHEKLILLAQLKPEKDSDEAVTYSLGKFGQRALDFYSIHVTKESTHPVKPLAQIAGNRYASVPVGKALSDACMGTIASFLSKYQDIIIEHQKVVKGNQKRLESLRELAGKENLEYPSVTLPPQPHTKEGVDAYNEVIARVRMWVNLNLWQKLKLSRDDAKPLLRLKGFPSFPLVERQANEVDWWDMVCNVKKLINEKKEDGKVFWQNLAGYKRQEALRPYLSSEEDRKKGKKFARTQLGDLLLHLEKKHGEDWGKVYDEAWERIDKKVEGLSKHIKLEEERRSEDAQSKAALTDWLRAKASFVIEGLKEADKDEFCRCELKLQKWYGDLRGKPFAIEAENSILDISGFSKQYNCAFIWQKDGVKKLNLYLIINYFKGGKLRFKKIKPEAFEANRFYTVINKKSGEIVPMEVNFNFDDPNLIILPLAFGKRQGREFIWNDLLSLETGSLKLANGRVIEKTLYNRRTRQDEPALFVALTFERREVLDSSNIKPMNLIGVDRGENIPAVIALTDPEGCPLSRFKDSLGNPTHILRIGESYKEKQRTIQAKKEVEQRRAGGYSRKYASKAKNLADDMVRNTARDLLYYAVTQDAMLIFENLSRGFGRQGKRTFMAERQYTRMEDWLTAKLAYEGLPSKTYLSKTLAQYTSKTCSNCGFTITSADYDRVLEKLKKTATGWMTTINGKELKVEGQITYYNRYKRQNVVKDLSVELDRLSEESVNNDISSWTKGRSGEALSLLKKRFSHRPVQEKFVCLNCGFETHADEQAALNIARSWLFLRSQEYKKYQTNKTTGNTDKRAFVETWQSFYRKKLKEVWKPAV

SEQ ID NO: 33861 - protein, 978 aa, synthetic construct
  REGION 1..978: note = engineered CasX variant
QEIKRINKIRRRLVKDSNTKKAGKTGPMKTLLVRVMTPDLRERLENLRKKPPNIPQPISNTSRANLNKLLTDYTEMKKAILHVYWEEFQKDPVGLMSRVAQPASKKIDQNKLKPEMDEKGNLTTAGFACSQCGQPLFVYKLEQVSEKGKAYTNYFGRCNVAEHEKLIKLAQLKPEKDSDEAVTYSLGKFGQRALDFYSIHVTKESTHPVKPLAQIAGNRYASGPVGKALSDACMGTIASFLSKYQDIIIEHQKVVKGNQKRLESLRELAGKENLEYPSVTLPPQPHTKEGVDAYNEVIARVRMWVNLNLWQKLKLSRDDAKPLLRLKGFPSFPLVERQANEVDWWDMVCNVKKLINEKKEDGKVFWQNLAGYKRQEALRPYLSSEEDRKKGKKFARTQLGDLLLHLEKKHGEDWGKVYDEAWERIDKKVEGLSKHIKLEEERRSEDAQSKAALTDWLRAKASFVIEGLKEADKDEFCRCELKLQKWYGDLRGKPFAIEAENSILDISGFSKQYNCAFIWQKDGVKKLNLYLIINYFKGGKLRFKKIKPEAFEANRFYTVINKKSGEIVPMEVNFNFDDPNLIILPLAFGKRQGREFIWNDLLSLETGSLKLANGRVIEKTLYNRRTRQDEPALFVALTFERREVLDSSNIKPMNLIGVDRGENIPAVIALTDPEGCPLSRFKDSLGNPTHILRIGESYKEKQRTIQAKKEVEQRRAGGYSRKYASKAKNLADDMVRNTARDLLYYAVTQDAMLIFENLSRGFGRQGKRTFMAERQYTRMEDWLTAKLAYEGLPSKTYLSKTLAQYTSKTCSNCGFTITSADYDRVLEKLKKTATGWMTTINGKELKVEGQITYYNRYKRQNVVKDLSVELDRLSEESVNNDISSWTKGRSGEALSLLKKRFSHRPVQEKFVCLNCGFETHADEQAALNIARSWLFLRSQEYKKYQTNKTTGNTDKRAFVETWQSFYRKKLKEVWKPAV

SEQ ID NO: 33862 - protein, 977 aa, synthetic construct
  REGION 1..977: note = engineered CasX variant
QEIKRINKIRRRLVKDSNTKKAGKTGPMKTLLVRVMTPDLRERLENLRKKPPNIPQPISNTSRANLNKLLTDYTEMKKAILHVYWEEFQKDPVGLMSRVAQPASKKIDQNKLKPEMDEKGNLTTAGFACSQCGQPLFVYKLEQVSEKGKAYTNYFGRCNVAEHEKLILLAQLKPEKDSDEAVTYSLGKFGQRALDFYSIHVTKESTHPVKPLAQIAGNRYASPVGKALSDACMGTIASFLSKYQDIIIEHQKVVKGNQKRLESLRELAGKENLEYPSVTLPPQPHTKEGVDAYNEVIARVRMWVNLNLWQKLKLSRDDAKPLLRLKGFPSFPLVERQANEVDWWDMVCNVKKLINEKKEDGKVFWQNLAGYKRQEALRPYLSSEEDRKKGKKFARTQLGDLLLHLEKKHGEDWGKVYDEAWERIDKKVEGLSKHIKLEEERRSEDAQSKAALTDWLRAKASFVIEGLKEADKDEFCRCELKLQKWYGDLRGKPFAIEAENSILDISGFSKQYNCAFIWQKDGVKKLNLYLIINYFKGGKLRFKKIKPEAFEANRFYTVINKKSGEIVPMEVNFNFDDPNLIILPLAFGKRQGREFIWNDLLSLETGSLKLANGRVIEKTLYNRRTRQDEPALFVALTFERREVLDSSNIKPMNLIGVDRGENIPAVIALTDPEGCPLSRFKDSLGNPTHILRIGESYKEKQRTIQAKKEVEQRRAGGYSRKYASKAKNLADDMVRNTARDLLYYAVTQDAMLIFENLSRGFGRQGKRTFMAERQYTRMEDWLTAKLAYEGLPSKTYLSKTLAQYTSKTCSNCGFTITSADYDRVLEKLKKTATGWMTTINGKELKVEGQITYYNRYKRQNVVKDLSVELDRLSEESVNNDISSWTKGRSGEALSLLKKRFSHRPVQEKFVCLNCGFETHADEQAALNIARSWLFLRSQEYKKYQTNKTTGNTDKRAFVETWQSFYRKKLKEVWKPAV

SEQ ID NO: 33863 - protein, 979 aa, synthetic construct
  REGION 1..979: note = engineered CasX variant
QEIKRINKIRRRLVKDSNTKKAGKTGPMKTLLVRVMTPDLRERLENLRKKPPNIPQPISNTSRANLNKLLTDYTEMKKAILHVYWEEFQKDPVGLMSRVAQPASKKIDQNKLKPEMDEKGNLTTAGFACSQCGQPLFVYKLEQVSEKGKAYTNYFGRCNVAEHEKLILLAQLKPEKDSDEAVTYSLGKFGQRALDFYSIHVTKESTHPVKPLAQIAGNRYASYPVGKALSDACMGTIASFLSKYQDIIIEHQKVVKGNQKRLESLRELAGKENLEYPSVTLPPQPHTKEGVDAYNEVIARVRMWVNLNLWQKLKLSRDDAKPLLRLKGFPSFPLVERQANEVDWWDMVCNVKKLINEKKEDGKVFWQNLAGYKRQEALRPYLSSEEDRKKGKKFARYQLGDLLLHLEKKHEGEDWGKVYDEAWERIDKKVEGLSKHIKLEEERRSEDAQSKAALTDWLRAKASFVIEGLKEADKDEFCRCELKLQKWYGDLRGKPFAIEAENSILDISGFSKQYNCAFIWQKDGVKKLNLYLIINYFKGGKLRFKKIKPEAFEANRFYTVINKKSGEIVPMEVNFNFDDPNLIILPLAFGKRQGREFIWNDLLSLETGSLKLANGRVIEKTLYNRRTRQDEPALFVALTFERREVLDSSNIKPMNLIGVDRGENIPAVIALTDPEGCPLSRFKDSLGNPTHILRIGESYKEKQRTIQAKKEVEQRRAGGYSRKYASKAKNLADDMVRNTARDLLYYAVTQDAMLIFENLSRGFGRQGKRTFMAERQYTRMEDWLTAKLAYEGLPSKTYLSKTLAQYTSKTCSNCGFTITSADYDRVLEKLKKTATGWMTTINGKELKVEGQITYYNRYKRQNVVKDLSVELDRLSEESVNNDISSWTKGRSGEALSLLKKRFSHRPVQEKFVCLNCGFETHADEQAALNIARSWLFLRSQEYKKYQTNKTTGNTDKRAFVETWQSFYRKKLKEVWKPAV

SEQ ID NO: 33864 - protein, 979 aa, synthetic construct
  REGION 1..979: note = engineered CasX variant
QEIKRINKIRRRLVKDSNTKKAGKTGPMKTLLVRVMTPDLRERLENLRKKPPNIPQPISNTSRANLNKLLTDYTEMKKAILHVYWEEFQKDPVGLMSRVAQPASKKIDQNKLKPEMDEKGNLTTAGFACSQCGQPLFVYKLEQVSEKGKAYTNYFGRCNVAEHEKLILLAQLKPEKDSDEAVTYSLGKFGQRALDFYSIHVTKESTHPVKPLAQIAGNRYASHPVGKALSDACMGTIASFLSKYQDIIIEHQKVVKGNQKRLESLRELAGKENLEYPSVTLPPQPHTKEGVDAYNEVIARVRMWVNLNLWQKLKLSRDDAKPLLRLKGFPSFPLVERQANEVDWWDMVCNVKKLINEKKEDGKVFWQNLAGYKRQEALRPYLSSEEDRKKGKKFARYQLGDLLLHLEKKHEGEDWGKVYDEAWERIDKKVEGLSKHIKLEEERRSEDAQSKAALTDWLRAKASFVIEGLKEADKDEFCRCELKLQKWYGDLRGKPFAIEAENSILDISGFSKQYNCAFIWQKDGVKKLNLYLIINYFKGGKLRFKKIKPEAFEANRFYTVINKKSGEIVPMEVNFNFDDPNLIILPLAFGKRQGREFIWNDLLSLETGSLKLANGRVIEKTLYNRRTRQDEPALFVALTFERREVLDSSNIKPMNLIGVDRGENIPAVIALTDPEGCPLSRFKDSLGNPTHILRIGESYKEKQRTIQAKKEVEQRRAGGYSRKYASKAKNLADDMVRNTARDLLYYAVTQDAMLIFENLSRGFGRQGKRTFMAERQYTRMEDWLTAKLAYEGLPSKTYLSKTLAQYTSKTCSNCGFTITSADYDRVLEKLKKTATGWMTTINGKELKVEGQITYYNRYKRQNVVKDLSVELDRLSEESVNNDISSWTKGRSGEALSLLKKRFSHRPVQEKFVCLNCGFETHADEQAALNIARSWLFLRSQEYKKYQTNKTTGNTDKRAFVETWQSFYRKKLKEVWKPAV

SEQ ID NO: 33865 - protein, 979 aa, synthetic construct
  REGION 1..979: note = engineered CasX variant
QEIKRINKIRRRLVKDSNTKKAGKTGPMKTLLVRVMTPDLRERLENLRKKPPNIPQPISNTSRANLNKLLTDYTEMKKAILHVYWEEFQKDPVGLMSRVAQPASKKIDQNKLKPEMDEKGNLTTAGFACSQCGQPLFVYKLEQVSEKGKAYTNYFGRCNVAEHEKLILLAQLKPEKDSDEAVTYSLGKFGQRALDFYSIHVTKESTHPVKPLAQIAGNRYASSPVGKALSDACMGTIASFLSKYQDIIIEHQKVVKGNQKRLESLRELAGKENLEYPSVTLPPQPHTKEGVDAYNEVIARVRMWVNLNLWQKLKLSRDDAKPLLRLKGFPSFPLVERQANEVDWWDMVCNVKKLINEKKEDGKVFWQNLAGYKRQEALRPYLSSEEDRKKGKKFARYQLGDLLLHLEKKHEGEDWGKVYDEAWERIDKKVEGLSKHIKLEEERRSEDAQSKAALTDWLRAKASFVIEGLKEADKDEFCRCELKLQKWYGDLRGKPFAIEAENSILDISGFSKQYNCAFIWQKDGVKKLNLYLIINYFKGGKLRFKKIKPEAFEANRFYTVINKKSGEIVPMEVNFNFDDPNLIILPLAFGKRQGREFIWNDLLSLETGSLKLANGRVIEKTLYNRRTRQDEPALFVALTFERREVLDSSNIKPMNLIGVDRGENIPAVIALTDPEGCPLSRFKDSLGNPTHILRIGESYKEKQRTIQAKKEVEQRRAGGYSRKYASKAKNLADDMVRNTARDLLYYAVTQDAMLIFENLSRGFGRQGKRTFMAERQYTRMEDWLTAKLAYEGLPSKTYLSKTLAQYTSKTCSNCGFTITSADYDRVLEKLKKTATGWMTTINGKELKVEGQITYYNRYKRQNVVKDLSVELDRLSEESVNNDISSWTKGRSGEALSLLKKRFSHRPVQEKFVCLNCGFETHADEQAALNIARSWLFLRSQEYKKYQTNKTTGNTDKRAFVETWQSFYRKKLKEVWKPAV

SEQ ID NO: 33866 - protein, 979 aa, synthetic construct
  REGION 1..979: note = engineered CasX variant
QEIKRINKIRRRLVKDSNTKKAGKTGPMKTLLVRVMTPDLRERLENLRKKPPNIPQPISNTSRANLNKLLTDYTEMKKAILHVYWEEFQKDPVGLMSRVAQPASKKIDQNKLKPEMDEKGNLTTAGFACSQCGQPLFVYKLEQVSEKGKAYTNYFGRCNVAEHEKLILLAQLKPEKDSDEAVTYSLGKFGQRALDFYSIHVTKESTHPVKPLAQIAGNRYASTPVGKALSDACMGTIASFLSKYQDIIIEHQKVVKGNQKRLESLRELAGKENLEYPSVTLPPQPHTKEGVDAYNEVIARVRMWVNLNLWQKLKLSRDDAKPLLRLKGFPSFPLVERQANEVDWWDMVCNVKKLINEKKEDGKVFWQNLAGYKRQEALRPYLSSEEDRKKGKKFARYQLGDLLLHLEKKHEGEDWGKVYDEAWERIDKKVEGLSKHIKLEEERRSEDAQSKAALTDWLRAKASFVIEGLKEADKDEFCRCELKLQKWYGDLRGKPFAIEAENSILDISGFSKQYNCAFIWQKDGVKKLNLYLIINYFKGGKLRFKKIKPEAFEANRFYTVINKKSGEIVPMEVNFNFDDPNLIILPLAFGKRQGREFIWNDLLSLETGSLKLANGRVIEKTLYNRRTRQDEPALFVALTFERREVLDSSNIKPMNLIGVDRGENIPAVIALTDPEGCPLSRFKDSLGNPTHILRIGESYKEKQRTIQAKKEVEQRRAGGYSRKYASKAKNLADDMVRNTARDLLYYAVTQDAMLIFENLSRGFGRQGKRTFMAERQYTRMEDWLTAKLAYEGLPSKTYLSKTLAQYTSKTCSNCGFTITSADYDRVLEKLKKTATGWMTTINGKELKVEGQITYYNRYKRQNVVKDLSVELDRLSEESVNNDISSWTKGRSGEALSLLKKRFSHRPVQEKFVCLNCGFETHADEQAALNIARSWLFLRSQEYKKYQTNKTTGNTDKRAFVETWQSFYRKKLKEVWKPAV

SEQ ID NO: 33867 - protein, 979 aa, synthetic construct
  REGION 1..979: note = engineered CasX variant
QEIKRINKIRRRLVKDSNTKKAGKTGPMKTLLVRVMTPDLRERLENLRKKPPNIPQPISNTSRANLNKLLTDYTEMKKAILHVYWEEFQKDPVGLMSRVAQPASKKIDQNKLKPEMDEKGNLTTAGFACSQCGQPLFVYKLEQVSEKGKAYTNYFGRCNVAEHEKLILLAQLKPEKDSDEAVTYSLGKFGQRALDFYSIHVTKESTHPVKPLAQIAGNRYASAPVGKALSDACMGTIASFLSKYQDIIIEHQKVVKGNQKRLESLRELAGKENLEYPSVTLPPQPHTKEGVDAYNEVIARVRMWVNLNLWQKLKLSRDDAKPLLRLKGFPSFPLVERQANEVDWWDMVCNVKKLINEKKEDGKVFWQNLAGYKRQEALRPYLSSEEDRKKGKKFARYQLGDLLLHLEKKHEGEDWGKVYDEAWERIDKKVEGLSKHIKLEEERRSEDAQSKAALTDWLRAKASFVIEGLKEADKDEFCRCELKLQKWYGDLRGKPFAIEAENSILDISGFSKQYNCAFIWQKDGVKKLNLYLIINYFKGGKLRFKKIKPEAFEANRFYTVINKKSGEIVPMEVNFNFDDPNLIILPLAFGKRQGREFIWNDLLSLETGSLKLANGRVIEKTLYNRRTRQDEPALFVALTFERREVLDSSNIKPMNLIGVDRGENIPAVIALTDPEGCPLSRFKDSLGNPTHILRIGESYKEKQRTIQAKKEVEQRRAGGYSRKYASKAKNLADDMVRNTARDLLYYAVTQDAMLIFENLSRGFGRQGKRTFMAERQYTRMEDWLTAKLAYEGLPSKTYLSKTLAQYTSKTCSNCGFTITSADYDRVLEKLKKTATGWMTTINGKELKVEGQITYYNRYKRQNVVKDLSVELDRLSEESVNNDISSWTKGRSGEALSLLKKRFSHRPVQEKFVCLNCGFETHADEQAALNIARSWLFLRSQEYKKYQTNKTTGNTDKRAFVETWQSFYRKKLKEVWKPAV

SEQ ID NO: 33868 - protein, 979 aa, synthetic construct
  REGION 1..979: note = engineered CasX variant
QEIKRINKIRRRLVKDSNTKKAGKTGPMKTLLVRVMTPDLRERLENLRKKPPNIPQPISNTSRANLNKLLTDYTEMKKAILHVYWEEFQKDPVGLMSRVAQPASKKIDQNKLKPEMDEKGNLTTAGFACSQCGQPLFVYKLEQVSEKGKAYTNYFGRCNVAEHEKLILLAQLKPEKDSDEAVTYSLGKFGQRALDFYSIHVTKESTHPVKPLAQIAGNRYASVPVGKALSDACMGTIASFLSKYQDIIIEHQKVVKGNQKRLESLRELAGKENLEYPSVTLPPQPHTKEGVDAYNEVIARVRMWVNLNLWQKLKLSRDDAKPLLRLKGFPSFPLVERQANEVDWWDMVCNVKKLINEKKEDGKVFWQNLAGYKRQEALRPYLSSEEDRKKGKKFARYQLGDLLLHLEKKHEGEDWGKVYDEAWERIDKKVEGLSKHIKLEEERRSEDAQSKAALTDWLRAKASFVIEGLKEADKDEFCRCELKLQKWYGDLRGKPFAIEAENSILDISGFSKQYNCAFIWQKDGVKKLNLYLIINYFKGGKLRFKKIKPEAFEANRFYTVINKKSGEIVPMEVNFNFDDPNLIILPLAFGKRQGREFIWNDLLSLETGSLKLANGRVIEKTLYNRRTRQDEPALFVALTFERREVLDSSNIKPMNLIGVDRGENIPAVIALTDPEGCPLSRFKDSLGNPTHILRIGESYKEKQRTIQAKKEVEQRRAGGYSRKYASKAKNLADDMVRNTARDLLYYAVTQDAMLIFENLSRGFGRQGKRTFMAERQYTRMEDWLTAKLAYEGLPSKTYLSKTLAQYTSKTCSNCGFTITSADYDRVLEKLKKTATGWMTTINGKELKVEGQITYYNRYKRQNVVKDLSVELDRLSEESVNNDISSWTKGRSGEALSLLKKRFSHRPVQEKFVCLNCGFETHADEQAALNIARSWLFLRSQEYKKYQTNKTTGNTDKRAFVETWQSFYRKKLKEVWKPAV

SEQ ID NO: 33869 - protein, 979 aa, synthetic construct
  REGION 1..979: note = engineered CasX variant
QEIKRINKIRRRLVKDSNTKKAGKTGPMKTLLVRVMTPDLRERLENLRKKPPNIPQPISNTSRANLNKLLTDYTEMKKAILHVYWEEFQKDPVGLMSRVAQPASKKIDQNKLKPEMDEKGNLTTAGFACSQCGQPLFVYKLEQVSEKGKAYTNYFGRCNVAEHEKLIKLAQLKPEKDSDEAVTYSLGKFGQRALDFYSIHVTKESTHPVKPLAQIAGNRYASGPVGKALSDACMGTIASFLSKYQDIIIEHQKVVKGNQKRLESLRELAGKENLEYPSVTLPPQPHTKEGVDAYNEVIARVRMWVNLNLWQKLKLSRDDAKPLLRLKGFPSFPLVERQANEVDWWDMVCNVKKLINEKKEDGKVFWQNLAGYKRQEALRPYLSSEEDRKKGKKFARYQLGDLLLHLEKKHEGEDWGKVYDEAWERIDKKVEGLSKHIKLEEERRSEDAQSKAALTDWLRAKASFVIEGLKEADKDEFCRCELKLQKWYGDLRGKPFAIEAENSILDISGFSKQYNCAFIWQKDGVKKLNLYLIINYFKGGKLRFKKIKPEAFEANRFYTVINKKSGEIVPMEVNFNFDDPNLIILPLAFGKRQGREFIWNDLLSLETGSLKLANGRVIEKTLYNRRTRQDEPALFVALTFERREVLDSSNIKPMNLIGVDRGENIPAVIALTDPEGCPLSRFKDSLGNPTHILRIGESYKEKQRTIQAKKEVEQRRAGGYSRKYASKAKNLADDMVRNTARDLLYYAVTQDAMLIFENLSRGFGRQGKRTFMAERQYTRMEDWLTAKLAYEGLPSKTYLSKTLAQYTSKTCSNCGFTITSADYDRVLEKLKKTATGWMTTINGKELKVEGQITYYNRYKRQNVVKDLSVELDRLSEESVNNDISSWTKGRSGEALSLLKKRFSHRPVQEKFVCLNCGFETHADEQAALNIARSWLFLRSQEYKKYQTNKTTGNTDKRAFVETWQSFYRKKLKEVWKPAV

SEQ ID NO: 33870 - protein, 978 aa, synthetic construct
  REGION 1..978: note = engineered CasX variant
QEIKRINKIRRRLVKDSNTKKAGKTGPMKTLLVRVMTPDLRERLENLRKKPPNIPQPISNTSRANLNKLLTDYTEMKKAILHVYWEEFQKDPVGLMSRVAQPASKKIDQNKLKPEMDEKGNLTTAGFACSQCGQPLFVYKLEQVSEKGKAYTNYFGRCNVAEHEKLILLAQLKPEKDSDEAVTYSLGKFGQRALDFYSIHVTKESTHPVKPLAQIAGNRYASPVGKALSDACMGTIASFLSKYQDIIIEHQKVVKGNQKRLESLRELAGKENLEYPSVTLPPQPHTKEGVDAYNEVIARVRMWVNLNLWQKLKLSRDDAKPLLRLKGFPSFPLVERQANEVDWWDMVCNVKKLINEKKEDGKVFWQNLAGYKRQEALRPYLSSEEDRKKGKKFARYQLGDLLLHLEKKHEGEDWGKVYDEAWERIDKKVEGLSKHIKLEEERRSEDAQSKAALTDWLRAKASFVIEGLKEADKDEFCRCELKLQKWYGDLRGKPFAIEAENSILDISGFSKQYNCAFIWQKDGVKKLNLYLIINYFKGGKLRFKKIKPEAFEANRFYTVINKKSGEIVPMEVNFNFDDPNLIILPLAFGKRQGREFIWNDLLSLETGSLKLANGRVIEKTLYNRRTRQDEPALFVALTFERREVLDSSNIKPMNLIGVDRGENIPAVIALTDPEGCPLSRFKDSLGNPTHILRIGESYKEKQRTIQAKKEVEQRRAGGYSRKYASKAKNLADDMVRNTARDLLYYAVTQDAMLIFENLSRGFGRQGKRTFMAERQYTRMEDWLTAKLAYEGLPSKTYLSKTLAQYTSKTCSNCGFTITSADYDRVLEKLKKTATGWMTTINGKELKVEGQITYYNRYKRQNVVKDLSVELDRLSEESVNNDISSWTKGRSGEALSLLKKRFSHRPVQEKFVCLNCGFETHADEQAALNIARSWLFLRSQEYKKYQTNKTTGNTDKRAFVETWQSFYRKKLKEVWKPAV

SEQ ID NO: 33871 - protein, 978 aa, synthetic construct
  REGION 1..978: note = engineered CasX variant
QEIKRINKIRRRLVKDSNTKKAGKTGPMKTLLVRVMTPDLRERLENLRKKPPNIPQPISNTSRANLNKLLTDYTEMKKAILHVYWEEFQKDPVGLMSRVAQPASKKIDQNKLKPEMDEKGNLTTAGFACSQCGQPLFVYKLEQVSEKGKAYTNYFGRCNVAEHEKLILLAQLKPEKDSDEAVTYSLGKFGQRALDFYSIHVTKESTHPVKPLAQIAGNRYASYPVGKALSDACMGTIASFLSKYQDIIIEHQKVVKGNQKRLESLRELAGKENLEYPSVTLPPQPHTKEGVDAYNEVIARVRMWVNLNLWQKLKLSRDDAKPLLRLKGFPSFPLVERQANEVDWWDMVCNVKKLINEKKEDGKVFWQNLAGYKRQEALRPYLSSEEDRKKGKKFARYQLGDLLLHLEKKHGEDWGKVYDEAWERIDKKVEGLSKHIKLEEERRSEDAQSKAALTDWLRAKASFVIEGLKEADKDEFCRCDLKLQKWYGDLRGKPFAIEAENSILDISGFSKQYNCAFIWQKDGVKKLNLYLIINYFKGGKLRFKKIKPEAFEANRFYTVINKKSGEIVPMEVNFNFDDPNLIILPLAFGKRQGREFIWNDLLSLETGSLKLANGRVIEKTLYNRRTRQDEPALFVALTFERREVLDSSNIKPMNLIGVDRGENIPAVIALTDPEGCPLSRFKDSLGNPTHILRIGESYKEKQRTIQAKKEVEQRRAGGYSRKYASKAKNLADDMVRNTARDLLYYAVTQDAMLIFENLSRGFGRQGKRTFMAERQYTRMEDWLTAKLAYEGLPSKTYLSKTLAQYTSKTCSNCGFTITSADYDRVLEKLKKTATGWMTTINGKELKVEGQITYYNRYKRQNVVKDLSVELDRLSEESVNNDISSWTKGRSGEALSLLKKRFSHRPVQEKFVCLNCGFETHADEQAALNIARSWLFLRSQEYKKYQTNKTTGNTDKRAFVETWQSFYRKKLKEVWKPAV

SEQ ID NO: 33872 - protein, 978 aa, synthetic construct
  REGION 1..978: note = engineered CasX variant
QEIKRINKIRRRLVKDSNTKKAGKTGPMKTLLVRVMTPDLRERLENLRKKPPNIPQPISNTSRANLNKLLTDYTEMKKAILHVYWEEFQKDPVGLMSRVAQPASKKIDQNKLKPEMDEKGNLTTAGFACSQCGQPLFVYKLEQVSEKGKAYTNYFGRCNVAEHEKLILLAQLKPEKDSDEAVTYSLGKFGQRALDFYSIHVTKESTHPVKPLAQIAGNRYASHPVGKALSDACMGTIASFLSKYQDIIIEHQKVVKGNQKRLESLRELAGKENLEYPSVTLPPQPHTKEGVDAYNEVIARVRMWVNLNLWQKLKLSRDDAKPLLRLKGFPSFPLVERQANEVDWWDMVCNVKKLINEKKEDGKVFWQNLAGYKRQEALRPYLSSEEDRKKGKKFARYQLGDLLLHLEKKHGEDWGKVYDEAWERIDKKVEGLSKHIKLEEERRSEDAQSKAALTDWLRAKASFVIEGLKEADKDEFCRCDLKLQKWYGDLRGKPFAIEAENSILDISGFSKQYNCAFIWQKDGVKKLNLYLIINYFKGGKLRFKKIKPEAFEANRFYTVINKKSGEIVPMEVNFNFDDPNLIILPLAFGKRQGREFIWNDLLSLETGSLKLANGRVIEKTLYNRRTRQDEPALFVALTFERREVLDSSNIKPMNLIGVDRGENIPAVIALTDPEGCPLSRFKDSLGNPTHILRIGESYKEKQRTIQAKKEVEQRRAGGYSRKYASKAKNLADDMVRNTARDLLYYAVTQDAMLIFENLSRGFGRQGKRTFMAERQYTRMEDWLTAKLAYEGLPSKTYLSKTLAQYTSKTCSNCGFTITSADYDRVLEKLKKTATGWMTTINGKELKVEGQITYYNRYKRQNVVKDLSVELDRLSEESVNNDISSWTKGRSGEALSLLKKRFSHRPVQEKFVCLNCGFETHADEQAALNIARSWLFLRSQEYKKYQTNKTTGNTDKRAFVETWQSFYRKKLKEVWKPAV

SEQ ID NO: 33873 - protein, 978 aa, synthetic construct
  REGION 1..978: note = engineered CasX variant
QEIKRINKIRRRLVKDSNTKKAGKTGPMKTLLVRVMTPDLRERLENLRKKPPNIPQPISNTSRANLNKLLTDYTEMKKAILHVYWEEFQKDPVGLMSRVAQPASKKIDQNKLKPEMDEKGNLTTAGFACSQCGQPLFVYKLEQVSEKGKAYTNYFGRCNVAEHEKLILLAQLKPEKDSDEAVTYSLGKFGQRALDFYSIHVTKESTHPVKPLAQIAGNRYASSPVGKALSDACMGTIASFLSKYQDIIIEHQKVVKGNQKRLESLRELAGKENLEYPSVTLPPQPHTKEGVDAYNEVIARVRMWVNLNLWQKLKLSRDDAKPLLRLKGFPSFPLVERQANEVDWWDMVCNVKKLINEKKEDGKVFWQNLAGYKRQEALRPYLSSEEDRKKGKKFARYQLGDLLLHLEKKHGEDWGKVYDEAWERIDKKVEGLSKHIKLEEERRSEDAQSKAALTDWLRAKASFVIEGLKEADKDEFCRCDLKLQKWYGDLRGKPFAIEAENSILDISGFSKQYNCAFIWQKDGVKKLNLYLIINYFKGGKLRFKKIKPEAFEANRFYTVINKKSGEIVPMEVNFNFDDPNLIILPLAFGKRQGREFIWNDLLSLETGSLKLANGRVIEKTLYNRRTRQDEPALFVALTFERREVLDSSNIKPMNLIGVDRGENIPAVIALTDPEGCPLSRFKDSLGNPTHILRIGESYKEKQRTIQAKKEVEQRRAGGYSRKYASKAKNLADDMVRNTARDLLYYAVTQDAMLIFENLSRGFGRQGKRTFMAERQYTRMEDWLTAKLAYEGLPSKTYLSKTLAQYTSKTCSNCGFTITSADYDRVLEKLKKTATGWMTTINGKELKVEGQITYYNRYKRQNVVKDLSVELDRLSEESVNNDISSWTKGRSGEALSLLKKRFSHRPVQEKFVCLNCGFETHADEQAALNIARSWLFLRSQEYKKYQTNKTTGNTDKRAFVETWQSFYRKKLKEVWKPAV

SEQ ID NO: 33874 - protein, 978 aa, synthetic construct
  REGION 1..978: note = engineered CasX variant
QEIKRINKIRRRLVKDSNTKKAGKTGPMKTLLVRVMTPDLRERLENLRKKPPNIPQPISNTSRANLNKLLTDYTEMKKAILHVYWEEFQKDPVGLMSRVAQPASKKIDQNKLKPEMDEKGNLTTAGFACSQCGQPLFVYKLEQVSEKGKAYTNYFGRCNVAEHEKLILLAQLKPEKDSDEAVTYSLGKFGQRALDFYSIHVTKESTHPVKPLAQIAGNRYASTPVGKALSDACMGTIASFLSKYQDIIIEHQKVVKGNQKRLESLRELAGKENLEYPSVTLPPQPHTKEGVDAYNEVIARVRMWVNLNLWQKLKLSRDDAKPLLRLKGFPSFPLVERQANEVDWWDMVCNVKKLINEKKEDGKVFWQNLAGYKRQEALRPYLSSEEDRKKGKKFARYQLGDLLLHLEKKHGEDWGKVYDEAWERIDKKVEGLSKHIKLEEERRSEDAQSKAALTDWLRAKASFVIEGLKEADKDEFCRCDLKLQKWYGDLRGKPFAIEAENSILDISGFSKQYNCAFIWQKDGVKKLNLYLIINYFKGGKLRFKKIKPEAFEANRFYTVINKKSGEIVPMEVNFNFDDPNLIILPLAFGKRQGREFIWNDLLSLETGSLKLANGRVIEKTLYNRRTRQDEPALFVALTFERREVLDSSNIKPMNLIGVDRGENIPAVIALTDPEGCPLSRFKDSLGNPTHILRIGESYKEKQRTIQAKKEVEQRRAGGYSRKYASKAKNLADDMVRNTARDLLYYAVTQDAMLIFENLSRGFGRQGKRTFMAERQYTRMEDWLTAKLAYEGLPSKTYLSKTLAQYTSKTCSNCGFTITSADYDRVLEKLKKTATGWMTTINGKELKVEGQITYYNRYKRQNVVKDLSVELDRLSEESVNNDISSWTKGRSGEALSLLKKRFSHRPVQEKFVCLNCGFETHADEQAALNIARSWLFLRSQEYKKYQTNKTTGNTDKRAFVETWQSFYRKKLKEVWKPAV

SEQ ID NO: 33875 - protein, 978 aa, synthetic construct
  REGION 1..978: note = engineered CasX variant
QEIKRINKIRRRLVKDSNTKKAGKTGPMKTLLVRVMTPDLRERLENLRKKPPNIPQPISNTSRANLNKLLTDYTEMKKAILHVYWEEFQKDPVGLMSRVAQPASKKIDQNKLKPEMDEKGNLTTAGFACSQCGQPLFVYKLEQVSEKGKAYTNYFGRCNVAEHEKLILLAQLKPEKDSDEAVTYSLGKFGQRALDFYSIHVTKESTHPVKPLAQIAGNRYASAPVGKALSDACMGTIASFLSKYQDIIIEHQKVVKGNQKRLESLRELAGKENLEYPSVTLPPQPHTKEGVDAYNEVIARVRMWVNLNLWQKLKLSRDDAKPLLRLKGFPSFPLVERQANEVDWWDMVCNVKKLINEKKEDGKVFWQNLAGYKRQEALRPYLSSEEDRKKGKKFARYQLGDLLLHLEKKHGEDWGKVYDEAWERIDKKVEGLSKHIKLEEERRSEDAQSKAALTDWLRAKASFVIEGLKEADKDEFCRCDLKLQKWYGDLRGKPFAIEAENSILDISGFSKQYNCAFIWQKDGVKKLNLYLIINYFKGGKLRFKKIKPEAFEANRFYTVINKKSGEIVPMEVNFNFDDPNLIILPLAFGKRQGREFIWNDLLSLETGSLKLANGRVIEKTLYNRRTRQDEPALFVALTFERREVLDSSNIKPMNLIGVDRGENIPAVIALTDPEGCPLSRFKDSLGNPTHILRIGESYKEKQRTIQAKKEVEQRRAGGYSRKYASKAKNLADDMVRNTARDLLYYAVTQDAMLIFENLSRGFGRQGKRTFMAERQYTRMEDWLTAKLAYEGLPSKTYLSKTLAQYTSKTCSNCGFTITSADYDRVLEKLKKTATGWMTTINGKELKVEGQITYYNRYKRQNVVKDLSVELDRLSEESVNNDISSWTKGRSGEALSLLKKRFSHRPVQEKFVCLNCGFETHADEQAALNIARSWLFLRSQEYKKYQTNKTTGNTDKRAFVETWQSFYRKKLKEVWKPAV

SEQ ID NO: 33876 - protein, 978 aa, synthetic construct
  REGION 1..978: note = engineered CasX variant
QEIKRINKIRRRLVKDSNTKKAGKTGPMKTLLVRVMTPDLRERLENLRKKPPNIPQPISNTSRANLNKLLTDYTEMKKAILHVYWEEFQKDPVGLMSRVAQPASKKIDQNKLKPEMDEKGNLTTAGFACSQCGQPLFVYKLEQVSEKGKAYTNYFGRCNVAEHEKLILLAQLKPEKDSDEAVTYSLGKFGQRALDFYSIHVTKESTHPVKPLAQIAGNRYASVPVGKALSDACMGTIASFLSKYQDIIIEHQKVVKGNQKRLESLRELAGKENLEYPSVTLPPQPHTKEGVDAYNEVIARVRMWVNLNLWQKLKLSRDDAKPLLRLKGFPSFPLVERQANEVDWWDMVCNVKKLINEKKEDGKVFWQNLAGYKRQEALRPYLSSEEDRKKGKKFARYQLGDLLLHLEKKHGEDWGKVYDEAWERIDKKVEGLSKHIKLEEERRSEDAQSKAALTDWLRAKASFVIEGLKEADKDEFCRCDLKLQKWYGDLRGKPFAIEAENSILDISGFSKQYNCAFIWQKDGVKKLNLYLIINYFKGGKLRFKKIKPEAFEANRFYTVINKKSGEIVPMEVNFNFDDPNLIILPLAFGKRQGREFIWNDLLSLETGSLKLANGRVIEKTLYNRRTRQDEPALFVALTFERREVLDSSNIKPMNLIGVDRGENIPAVIALTDPEGCPLSRFKDSLGNPTHILRIGESYKEKQRTIQAKKEVEQRRAGGYSRKYASKAKNLADDMVRNTARDLLYYAVTQDAMLIFENLSRGFGRQGKRTFMAERQYTRMEDWLTAKLAYEGLPSKTYLSKTLAQYTSKTCSNCGFTITSADYDRVLEKLKKTATGWMTTINGKELKVEGQITYYNRYKRQNVVKDLSVELDRLSEESVNNDISSWTKGRSGEALSLLKKRFSHRPVQEKFVCLNCGFETHADEQAALNIARSWLFLRSQEYKKYQTNKTTGNTDKRAFVETWQSFYRKKLKEVWKPAV

SEQ ID NO: 33877 - protein, 978 aa, synthetic construct
  REGION 1..978: note = engineered CasX variant
QEIKRINKIRRRLVKDSNTKKAGKTGPMKTLLVRVMTPDLRERLENLRKKPPNIPQPISNTSRANLNKLLTDYTEMKKAILHVYWEEFQKDPVGLMSRVAQPASKKIDQNKLKPEMDEKGNLTTAGFACSQCGQPLFVYKLEQVSEKGKAYTNYFGRCNVAEHEKLIKLAQLKPEKDSDEAVTYSLGKFGQRALDFYSIHVTKESTHPVKPLAQIAGNRYASGPVGKALSDACMGTIASFLSKYQDIIIEHQKVVKGNQKRLESLRELAGKENLEYPSVTLPPQPHTKEGVDAYNEVIARVRMWVNLNLWQKLKLSRDDAKPLLRLKGFPSFPLVERQANEVDWWDMVCNVKKLINEKKEDGKVFWQNLAGYKRQEALRPYLSSEEDRKKGKKFARYQLGDLLLHLEKKHGEDWGKVYDEAWERIDKKVEGLSKHIKLEEERRSEDAQSKAALTDWLRAKASFVIEGLKEADKDEFCRCDLKLQKWYGDLRGKPFAIEAENSILDISGFSKQYNCAFIWQKDGVKKLNLYLIINYFKGGKLRFKKIKPEAFEANRFYTVINKKSGEIVPMEVNFNFDDPNLIILPLAFGKRQGREFIWNDLLSLETGSLKLANGRVIEKTLYNRRTRQDEPALFVALTFERREVLDSSNIKPMNLIGVDRGENIPAVIALTDPEGCPLSRFKDSLGNPTHILRIGESYKEKQRTIQAKKEVEQRRAGGYSRKYASKAKNLADDMVRNTARDLLYYAVTQDAMLIFENLSRGFGRQGKRTFMAERQYTRMEDWLTAKLAYEGLPSKTYLSKTLAQYTSKTCSNCGFTITSADYDRVLEKLKKTATGWMTTINGKELKVEGQITYYNRYKRQNVVKDLSVELDRLSEESVNNDISSWTKGRSGEALSLLKKRFSHRPVQEKFVCLNCGFETHADEQAALNIARSWLFLRSQEYKKYQTNKTTGNTDKRAFVETWQSFYRKKLKEVWKPAV

SEQ ID NO: 33878 - protein, 977 aa, synthetic construct
  REGION 1..977: note = engineered CasX variant
QEIKRINKIRRRLVKDSNTKKAGKTGPMKTLLVRVMTPDLRERLENLRKKPPNIPQPISNTSRANLNKLLTDYTEMKKAILHVYWEEFQKDPVGLMSRVAQPASKKIDQNKLKPEMDEKGNLTTAGFACSQCGQPLFVYKLEQVSEKGKAYTNYFGRCNVAEHEKLILLAQLKPEKDSDEAVTYSLGKFGQRALDFYSIHVTKESTHPVKPLAQIAGNRYASPVGKALSDACMGTIASFLSKYQDIIIEHQKVVKGNQKRLESLRELAGKENLEYPSVTLPPQPHTKEGVDAYNEVIARVRMWVNLNLWQKLKLSRDDAKPLLRLKGFPSFPLVERQANEVDWWDMVCNVKKLINEKKEDGKVFWQNLAGYKRQEALRPYLSSEEDRKKGKKFARYQLGDLLLHLEKKHGEDWGKVYDEAWERIDKKVEGLSKHIKLEEERRSEDAQSKAALTDWLRAKASFVIEGLKEADKDEFCRCDLKLQKWYGDLRGKPFAIEAENSILDISGFSKQYNCAFIWQKDGVKKLNLYLIINYFKGGKLRFKKIKPEAFEANRFYTVINKKSGEIVPMEVNFNFDDPNLIILPLAFGKRQGREFIWNDLLSLETGSLKLANGRVIEKTLYNRRTRQDEPALFVALTFERREVLDSSNIKPMNLIGVDRGENIPAVIALTDPEGCPLSRFKDSLGNPTHILRIGESYKEKQRTIQAKKEVEQRRAGGYSRKYASKAKNLADDMVRNTARDLLYYAVTQDAMLIFENLSRGFGRQGKRTFMAERQYTRMEDWLTAKLAYEGLPSKTYLSKTLAQYTSKTCSNCGFTITSADYDRVLEKLKKTATGWMTTINGKELKVEGQITYYNRYKRQNVVKDLSVELDRLSEESVNNDISSWTKGRSGEALSLLKKRFSHRPVQEKFVCLNCGFETHADEQAALNIARSWLFLRSQEYKKYQTNKTTGNTDKRAFVETWQSFYRKKLKEVWKPAV

SEQ ID NO: 33879 - protein, 978 aa, synthetic construct
  REGION 1..978: note = engineered CasX variant
QEIKRINKIRRRLVKDSNTKKAGKTGPMKTLLVRVMTPDLRERLENLRKKPPNIPQPISNTSRANLNKLLTDYTEMKKAILHVYWEEFQKDPVGLMSRVAQPASKKIDQNKLKPEMDEKGNLTTAGFACSQCGQPLFVYKLEQVSEKGKAYTNYFGRCNVAEHEKLILLAQLKPEKDSDEAVTYSLGKFGQRALDFYSIHVTKESTHPVKPLAQIAGNRYASYPVGKALSDACMGTIASFLSKYQDIIIEHQKVVKGNQKRLESLRELAGKENLEYPSVTLPPQPHTKEGVDAYNEVIARVRMWVNLNLWQKLKLSRDDAKPLLRLKGFPSFPLVERQANEVDWWDMVCNVKKLINEKKEDGKVFWQNLAGYKRQEALRPYLSSEEDRKKGKKFARYQLGDLLLHLEKKHGEDWGKVYDEAWERIDKKVEGLSKHIKLEEERRSEDAQSKAALTDWLRAKASFVIEGLKEADKDEFCRCELKLQKWYGDLRGKPFAIEAENSILDISGFSKQYNCAFIWQKDGVKKLNLYLIINYFKGGKLRFKKIKPEAFEANRFYTVINKKSGEIVPMEVNFNFDDPNLIILPLAFGKRFGREFIWNDLLSLETGSLKLANGRVIEKTLYNRRTRQDEPALFVALTFERREVLDSSNIKPMNLIGVDRGENIPAVIALTDPEGCPLSRFKDSLGNPTHILRIGESYKEKQRTIQAKKEVEQRRAGGYSRKYASKAKNLADDMVRNTARDLLYYAVTQDAMLIFENLSRGFGRQGKRTFMAERQYTRMEDWLTAKLAYEGLPSKTYLSKTLAQYTSKTCSNCGFTITSADYDRVLEKLKKTATGWMTTINGKELKVEGQITYYNRYKRQNVVKDLSVELDRLSEESVNNDISSWTKGRSGEALSLLKKRFSHRPVQEKFVCLNCGFETHADEQAALNIARSWLFLRSQEYKKYQTNKTTGNTDKRAFVETWQSFYRKKLKEVWKPAV

SEQ ID NO: 33880 - protein, 978 aa, synthetic construct
  REGION 1..978: note = engineered CasX variant
QEIKRINKIRRRLVKDSNTKKAGKTGPMKTLLVRVMTPDLRERLENLRKKPPNIPQPISNTSRANLNKLLTDYTEMKKAILHVYWEEFQKDPVGLMSRVAQPASKKIDQNKLKPEMDEKGNLTTAGFACSQCGQPLFVYKLEQVSEKGKAYTNYFGRCNVAEHEKLILLAQLKPEKDSDEAVTYSLGKFGQRALDFYSIHVTKESTHPVKPLAQIAGNRYASHPVGKALSDACMGTIASFLSKYQDIIIEHQKVVKGNQKRLESLRELAGKENLEYPSVTLPPQPHTKEGVDAYNEVIARVRMWVNLNLWQKLKLSRDDAKPLLRLKGFPSFPLVERQANEVDWWDMVCNVKKLINEKKEDGKVFWQNLAGYKRQEALRPYLSSEEDRKKGKKFARYQLGDLLLHLEKKHGEDWGKVYDEAWERIDKKVEGLSKHIKLEEERRSEDAQSKAALTDWLRAKASFVIEGLKEADKDEFCRCELKLQKWYGDLRGKPFAIEAENSILDISGFSKQYNCAFIWQKDGVKKLNLYLIINYFKGGKLRFKKIKPEAFEANRFYTVINKKSGEIVPMEVNFNFDDPNLIILPLAFGKRFGREFIWNDLLSLETGSLKLANGRVIEKTLYNRRTRQDEPALFVALTFERREVLDSSNIKPMNLIGVDRGENIPAVIALTDPEGCPLSRFKDSLGNPTHILRIGESYKEKQRTIQAKKEVEQRRAGGYSRKYASKAKNLADDMVRNTARDLLYYAVTQDAMLIFENLSRGFGRQGKRTFMAERQYTRMEDWLTAKLAYEGLPSKTYLSKTLAQYTSKTCSNCGFTITSADYDRVLEKLKKTATGWMTTINGKELKVEGQITYYNRYKRQNVVKDLSVELDRLSEESVNNDISSWTKGRSGEALSLLKKRFSHRPVQEKFVCLNCGFETHADEQAALNIARSWLFLRSQEYKKYQTNKTTGNTDKRAFVETWQSFYRKKLKEVWKPAV

SEQ ID NO: 33881 - protein, 978 aa, synthetic construct
  REGION 1..978: note = engineered CasX variant
QEIKRINKIRRRLVKDSNTKKAGKTGPMKTLLVRVMTPDLRERLENLRKKPPNIPQPISNTSRANLNKLLTDYTEMKKAILHVYWEEFQKDPVGLMSRVAQPASKKIDQNKLKPEMDEKGNLTTAGFACSQCGQPLFVYKLEQVSEKGKAYTNYFGRCNVAEHEKLILLAQLKPEKDSDEAVTYSLGKFGQRALDFYSIHVTKESTHPVKPLAQIAGNRYASSPVGKALSDACMGTIASFLSKYQDIIIEHQKVVKGNQKRLESLRELAGKENLEYPSVTLPPQPHTKEGVDAYNEVIARVRMWVNLNLWQKLKLSRDDAKPLLRLKGFPSFPLVERQANEVDWWDMVCNVKKLINEKKEDGKVFWQNLAGYKRQEALRPYLSSEEDRKKGKKFARYQLGDLLLHLEKKHGEDWGKVYDEAWERIDKKVEGLSKHIKLEEERRSEDAQSKAALTDWLRAKASFVIEGLKEADKDEFCRCELKLQKWYGDLRGKPFAIEAENSILDISGFSKQYNCAFIWQKDGVKKLNLYLIINYFKGGKLRFKKIKPEAFEANRFYTVINKKSGEIVPMEVNFNFDDPNLIILPLAFGKRFGREFIWNDLLSLETGSLKLANGRVIEKTLYNRRTRQDEPALFVALTFERREVLDSSNIKPMNLIGVDRGENIPAVIALTDPEGCPLSRFKDSLGNPTHILRIGESYKEKQRTIQAKKEVEQRRAGGYSRKYASKAKNLADDMVRNTARDLLYYAVTQDAMLIFENLSRGFGRQGKRTFMAERQYTRMEDWLTAKLAYEGLPSKTYLSKTLAQYTSKTCSNCGFTITSADYDRVLEKLKKTATGWMTTINGKELKVEGQITYYNRYKRQNVVKDLSVELDRLSEESVNNDISSWTKGRSGEALSLLKKRFSHRPVQEKFVCLNCGFETHADEQAALNIARSWLFLRSQEYKKYQTNKTTGNTDKRAFVETWQSFYRKKLKEVWKPAV

SEQ ID NO: 33882 - protein, 978 aa, synthetic construct
  REGION 1..978: note = engineered CasX variant
QEIKRINKIRRRLVKDSNTKKAGKTGPMKTLLVRVMTPDLRERLENLRKKPPNIPQPISNTSRANLNKLLTDYTEMKKAILHVYWEEFQKDPVGLMSRVAQPASKKIDQNKLKPEMDEKGNLTTAGFACSQCGQPLFVYKLEQVSEKGKAYTNYFGRCNVAEHEKLILLAQLKPEKDSDEAVTYSLGKFGQRALDFYSIHVTKESTHPVKPLAQIAGNRYASTPVGKALSDACMGTIASFLSKYQDIIIEHQKVVKGNQKRLESLRELAGKENLEYPSVTLPPQPHTKEGVDAYNEVIARVRMWVNLNLWQKLKLSRDDAKPLLRLKGFPSFPLVERQANEVDWWDMVCNVKKLINEKKEDGKVFWQNLAGYKRQEALRPYLSSEEDRKKGKKFARYQLGDLLLHLEKKHGEDWGKVYDEAWERIDKKVEGLSKHIKLEEERRSEDAQSKAALTDWLRAKASFVIEGLKEADKDEFCRCELKLQKWYGDLRGKPFAIEAENSILDISGFSKQYNCAFIWQKDGVKKLNLYLIINYFKGGKLRFKKIKPEAFEANRFYTVINKKSGEIVPMEVNFNFDDPNLIILPLAFGKRFGREFIWNDLLSLETGSLKLANGRVIEKTLYNRRTRQDEPALFVALTFERREVLDSSNIKPMNLIGVDRGENIPAVIALTDPEGCPLSRFKDSLGNPTHILRIGESYKEKQRTIQAKKEVEQRRAGGYSRKYASKAKNLADDMVRNTARDLLYYAVTQDAMLIFENLSRGFGRQGKRTFMAERQYTRMEDWLTAKLAYEGLPSKTYLSKTLAQYTSKTCSNCGFTITSADYDRVLEKLKKTATGWMTTINGKELKVEGQITYYNRYKRQNVVKDLSVELDRLSEESVNNDISSWTKGRSGEALSLLKKRFSHRPVQEKFVCLNCGFETHADEQAALNIARSWLFLRSQEYKKYQTNKTTGNTDKRAFVETWQSFYRKKLKEVWKPAV

SEQ ID NO: 33883 - protein, 978 aa, synthetic construct
  REGION 1..978: note = engineered CasX variant
QEIKRINKIRRRLVKDSNTKKAGKTGPMKTLLVRVMTPDLRERLENLRKKPPNIPQPISNTSRANLNKLLTDYTEMKKAILHVYWEEFQKDPVGLMSRVAQPASKKIDQNKLKPEMDEKGNLTTAGFACSQCGQPLFVYKLEQVSEKGKAYTNYFGRCNVAEHEKLILLAQLKPEKDSDEAVTYSLGKFGQRALDFYSIHVTKESTHPVKPLAQIAGNRYASAPVGKALSDACMGTIASFLSKYQDIIIEHQKVVKGNQKRLESLRELAGKENLEYPSVTLPPQPHTKEGVDAYNEVIARVRMWVNLNLWQKLKLSRDDAKPLLRLKGFPSFPLVERQANEVDWWDMVCNVKKLINEKKEDGKVFWQNLAGYKRQEALRPYLSSEEDRKKGKKFARYQLGDLLLHLEKKHGEDWGKVYDEAWERIDKKVEGLSKHIKLEEERRSEDAQSKAALTDWLRAKASFVIEGLKEADKDEFCRCELKLQKWYGDLRGKPFAIEAENSILDISGFSKQYNCAFIWQKDGVKKLNLYLIINYFKGGKLRFKKIKPEAFEANRFYTVINKKSGEIVPMEVNFNFDDPNLIILPLAFGKRFGREFIWNDLLSLETGSLKLANGRVIEKTLYNRRTRQDEPALFVALTFERREVLDSSNIKPMNLIGVDRGENIPAVIALTDPEGCPLSRFKDSLGNPTHILRIGESYKEKQRTIQAKKEVEQRRAGGYSRKYASKAKNLADDMVRNTARDLLYYAVTQDAMLIFENLSRGFGRQGKRTFMAERQYTRMEDWLTAKLAYEGLPSKTYLSKTLAQYTSKTCSNCGFTITSADYDRVLEKLKKTATGWMTTINGKELKVEGQITYYNRYKRQNVVKDLSVELDRLSEESVNNDISSWTKGRSGEALSLLKKRFSHRPVQEKFVCLNCGFETHADEQAALNIARSWLFLRSQEYKKYQTNKTTGNTDKRAFVETWQSFYRKKLKEVWKPAV

SEQ ID NO: 33884 - protein, 978 aa, synthetic construct
  REGION 1..978: note = engineered CasX variant
QEIKRINKIRRRLVKDSNTKKAGKTGPMKTLLVRVMTPDLRERLENLRKKPPNIPQPISNTSRANLNKLLTDYTEMKKAILHVYWEEFQKDPVGLMSRVAQPASKKIDQNKLKPEMDEKGNLTTAGFACSQCGQPLFVYKLEQVSEKGKAYTNYFGRCNVAEHEKLILLAQLKPEKDSDEAVTYSLGKFGQRALDFYSIHVTKESTHPVKPLAQIAGNRYASVPVGKALSDACMGTIASFLSKYQDIIIEHQKVVKGNQKRLESLRELAGKENLEYPSVTLPPQPHTKEGVDAYNEVIARVRMWVNLNLWQKLKLSRDDAKPLLRLKGFPSFPLVERQANEVDWWDMVCNVKKLINEKKEDGKVFWQNLAGYKRQEALRPYLSSEEDRKKGKKFARYQLGDLLLHLEKKHGEDWGKVYDEAWERIDKKVEGLSKHIKLEEERRSEDAQSKAALTDWLRAKASFVIEGLKEADKDEFCRCELKLQKWYGDLRGKPFAIEAENSILDISGFSKQYNCAFIWQKDGVKKLNLYLIINYFKGGKLRFKKIKPEAFEANRFYTVINKKSGEIVPMEVNFNFDDPNLIILPLAFGKRFGREFIWNDLLSLETGSLKLANGRVIEKTLYNRRTRQDEPALFVALTFERREVLDSSNIKPMNLIGVDRGENIPAVIALTDPEGCPLSRFKDSLGNPTHILRIGESYKEKQRTIQAKKEVEQRRAGGYSRKYASKAKNLADDMVRNTARDLLYYAVTQDAMLIFENLSRGFGRQGKRTFMAERQYTRMEDWLTAKLAYEGLPSKTYLSKTLAQYTSKTCSNCGFTITSADYDRVLEKLKKTATGWMTTINGKELKVEGQITYYNRYKRQNVVKDLSVELDRLSEESVNNDISSWTKGRSGEALSLLKKRFSHRPVQEKFVCLNCGFETHADEQAALNIARSWLFLRSQEYKKYQTNKTTGNTDKRAFVETWQSFYRKKLKEVWKPAV

SEQ ID NO: 33885 - protein, 978 aa, synthetic construct
  REGION 1..978: note = engineered CasX variant
QEIKRINKIRRRLVKDSNTKKAGKTGPMKTLLVRVMTPDLRERLENLRKKPPNIPQPISNTSRANLNKLLTDYTEMKKAILHVYWEEFQKDPVGLMSRVAQPASKKIDQNKLKPEMDEKGNLTTAGFACSQCGQPLFVYKLEQVSEKGKAYTNYFGRCNVAEHEKLIKLAQLKPEKDSDEAVTYSLGKFGQRALDFYSIHVTKESTHPVKPLAQIAGNRYASGPVGKALSDACMGTIASFLSKYQDIIIEHQKVVKGNQKRLESLRELAGKENLEYPSVTLPPQPHTKEGVDAYNEVIARVRMWVNLNLWQKLKLSRDDAKPLLRLKGFPSFPLVERQANEVDWWDMVCNVKKLINEKKEDGKVFWQNLAGYKRQEALRPYLSSEEDRKKGKKFARYQLGDLLLHLEKKHGEDWGKVYDEAWERIDKKVEGLSKHIKLEEERRSEDAQSKAALTDWLRAKASFVIEGLKEADKDEFCRCELKLQKWYGDLRGKPFAIEAENSILDISGFSKQYNCAFIWQKDGVKKLNLYLIINYFKGGKLRFKKIKPEAFEANRFYTVINKKSGEIVPMEVNFNFDDPNLIILPLAFGKRFGREFIWNDLLSLETGSLKLANGRVIEKTLYNRRTRQDEPALFVALTFERREVLDSSNIKPMNLIGVDRGENIPAVIALTDPEGCPLSRFKDSLGNPTHILRIGESYKEKQRTIQAKKEVEQRRAGGYSRKYASKAKNLADDMVRNTARDLLYYAVTQDAMLIFENLSRGFGRQGKRTFMAERQYTRMEDWLTAKLAYEGLPSKTYLSKTLAQYTSKTCSNCGFTITSADYDRVLEKLKKTATGWMTTINGKELKVEGQITYYNRYKRQNVVKDLSVELDRLSEESVNNDISSWTKGRSGEALSLLKKRFSHRPVQEKFVCLNCGFETHADEQAALNIARSWLFLRSQEYKKYQTNKTTGNTDKRAFVETWQSFYRKKLKEVWKPAV

SEQ ID NO: 33886 - protein, 977 aa, synthetic construct
  REGION 1..977: note = engineered CasX variant
QEIKRINKIRRRLVKDSNTKKAGKTGPMKTLLVRVMTPDLRERLENLRKKPPNIPQPISNTSRANLNKLLTDYTEMKKAILHVYWEEFQKDPVGLMSRVAQPASKKIDQNKLKPEMDEKGNLTTAGFACSQCGQPLFVYKLEQVSEKGKAYTNYFGRCNVAEHEKLILLAQLKPEKDSDEAVTYSLGKFGQRALDFYSIHVTKESTHPVKPLAQIAGNRYASPVGKALSDACMGTIASFLSKYQDIIIEHQKVVKGNQKRLESLRELAGKENLEYPSVTLPPQPHTKEGVDAYNEVIARVRMWVNLNLWQKLKLSRDDAKPLLRLKGFPSFPLVERQANEVDWWDMVCNVKKLINEKKEDGKVFWQNLAGYKRQEALRPYLSSEEDRKKGKKFARYQLGDLLLHLEKKHGEDWGKVYDEAWERIDKKVEGLSKHIKLEEERRSEDAQSKAALTDWLRAKASFVIEGLKEADKDEFCRCELKLQKWYGDLRGKPFAIEAENSILDISGFSKQYNCAFIWQKDGVKKLNLYLIINYFKGGKLRFKKIKPEAFEANRFYTVINKKSGEIVPMEVNFNFDDPNLIILPLAFGKRFGREFIWNDLLSLETGSLKLANGRVIEKTLYNRRTRQDEPALFVALTFERREVLDSSNIKPMNLIGVDRGENIPAVIALTDPEGCPLSRFKDSLGNPTHILRIGESYKEKQRTIQAKKEVEQRRAGGYSRKYASKAKNLADDMVRNTARDLLYYAVTQDAMLIFENLSRGFGRQGKRTFMAERQYTRMEDWLTAKLAYEGLPSKTYLSKTLAQYTSKTCSNCGFTITSADYDRVLEKLKKTATGWMTTINGKELKVEGQITYYNRYKRQNVVKDLSVELDRLSEESVNNDISSWTKGRSGEALSLLKKRFSHRPVQEKFVCLNCGFETHADEQAALNIARSWLFLRSQEYKKYQTNKTTGNTDKRAFVETWQSFYRKKLKEVWKPAV

SEQ ID NO: 33887 - protein, 978 aa, synthetic construct
  REGION 1..978: note = engineered CasX variant
QEIKRINKIRRRLVKDSNTKKAGKTGPMKTLLVRVMTPDLRERLENLRKKPPNIPQPISNTSRANLNKLLTDYTEMKKAILHVYWEEFQKDPVGLMSRVAQPASKKIDQNKLKPEMDEKGNLTTAGFACSQCGQPLFVYKLEQVSEKGKAYTNYFGRCNVAEHEKLILLAQLKPEKDSDEAVTYSLGKFGQRALDFYSIHVTKESTHPVKPLAQIAGNRYASYPVGKALSDACMGTIASFLSKYQDIIIEHQKVVKGNQKRLESLRELAGKENLEYPSVTLPPQPHTKEGVDAYNEVIARVRMWVNLNLWQKLKLSRDDAKPLLRLKGFPSFPLVERQANEVDWWDMVCNVKKLINEKKEDGKVFWQNLAGYKRQEALRPYLSSEEDRKKGKKFARYQLGDLLLHLEKKHGEDWGKVYDEAWERIDKKVEGLSKHIKLEEERRSEDAQSKAALTDWLRAKASFVIEGLKEADKDEFCRCELKLQKWYGDLRGKPFAIEAENSILDISGFSKQYNCAFIWQKDGVKKLNLYLIINYFKGGKLRFKKIKPEAFEANRFYTVINKKSGEIVPMEVNFNFDDPNLIILPLAFGKRVGREFIWNDLLSLETGSLKLANGRVIEKTLYNRRTRQDEPALFVALTFERREVLDSSNIKPMNLIGVDRGENIPAVIALTDPEGCPLSRFKDSLGNPTHILRIGESYKEKQRTIQAKKEVEQRRAGGYSRKYASKAKNLADDMVRNTARDLLYYAVTQDAMLIFENLSRGFGRQGKRTFMAERQYTRMEDWLTAKLAYEGLPSKTYLSKTLAQYTSKTCSNCGFTITSADYDRVLEKLKKTATGWMTTINGKELKVEGQITYYNRYKRQNVVKDLSVELDRLSEESVNNDISSWTKGRSGEALSLLKKRFSHRPVQEKFVCLNCGFETHADEQAALNIARSWLFLRSQEYKKYQTNKTTGNTDKRAFVETWQSFYRKKLKEVWKPAV

SEQ ID NO: 33888 - protein, 978 aa, synthetic construct
  REGION 1..978: note = engineered CasX variant
QEIKRINKIRRRLVKDSNTKKAGKTGPMKTLLVRVMTPDLRERLENLRKKPPNIPQPISNTSRANLNKLLTDYTEMKKAILHVYWEEFQKDPVGLMSRVAQPASKKIDQNKLKPEMDEKGNLTTAGFACSQCGQPLFVYKLEQVSEKGKAYTNYFGRCNVAEHEKLILLAQLKPEKDSDEAVTYSLGKFGQRALDFYSIHVTKESTHPVKPLAQIAGNRYASHPVGKALSDACMGTIASFLSKYQDIIIEHQKVVKGNQKRLESLRELAGKENLEYPSVTLPPQPHTKEGVDAYNEVIARVRMWVNLNLWQKLKLSRDDAKPLLRLKGFPSFPLVERQANEVDWWDMVCNVKKLINEKKEDGKVFWQNLAGYKRQEALRPYLSSEEDRKKGKKFARYQLGDLLLHLEKKHGEDWGKVYDEAWERIDKKVEGLSKHIKLEEERRSEDAQSKAALTDWLRAKASFVIEGLKEADKDEFCRCELKLQKWYGDLRGKPFAIEAENSILDISGFSKQYNCAFIWQKDGVKKLNLYLIINYFKGGKLRFKKIKPEAFEANRFYTVINKKSGEIVPMEVNFNFDDPNLIILPLAFGKRVGREFIWNDLLSLETGSLKLANGRVIEKTLYNRRTRQDEPALFVALTFERREVLDSSNIKPMNLIGVDRGENIPAVIALTDPEGCPLSRFKDSLGNPTHILRIGESYKEKQRTIQAKKEVEQRRAGGYSRKYASKAKNLADDMVRNTARDLLYYAVTQDAMLIFENLSRGFGRQGKRTFMAERQYTRMEDWLTAKLAYEGLPSKTYLSKTLAQYTSKTCSNCGFTITSADYDRVLEKLKKTATGWMTTINGKELKVEGQITYYNRYKRQNVVKDLSVELDRLSEESVNNDISSWTKGRSGEALSLLKKRFSHRPVQEKFVCLNCGFETHADEQAALNIARSWLFLRSQEYKKYQTNKTTGNTDKRAFVETWQSFYRKKLKEVWKPAV

SEQ ID NO: 33889 - protein, 978 aa, synthetic construct
  REGION 1..978: note = engineered CasX variant
QEIKRINKIRRRLVKDSNTKKAGKTGPMKTLLVRVMTPDLRERLENLRKKPPNIPQPISNTSRANLNKLLTDYTEMKKAILHVYWEEFQKDPVGLMSRVAQPASKKIDQNKLKPEMDEKGNLTTAGFACSQCGQPLFVYKLEQVSEKGKAYTNYFGRCNVAEHEKLILLAQLKPEKDSDEAVTYSLGKFGQRALDFYSIHVTKESTHPVKPLAQIAGNRYASSPVGKALSDACMGTIASFLSKYQDIIIEHQKVVKGNQKRLESLRELAGKENLEYPSVTLPPQPHTKEGVDAYNEVIARVRMWVNLNLWQKLKLSRDDAKPLLRLKGFPSFPLVERQANEVDWWDMVCNVKKLINEKKEDGKVFWQNLAGYKRQEALRPYLSSEEDRKKGKKFARYQLGDLLLHLEKKHGEDWGKVYDEAWERIDKKVEGLSKHIKLEEERRSEDAQSKAALTDWLRAKASFVIEGLKEADKDEFCRCELKLQKWYGDLRGKPFAIEAENSILDISGFSKQYNCAFIWQKDGVKKLNLYLIINYFKGGKLRFKKIKPEAFEANRFYTVINKKSGEIVPMEVNFNFDDPNLIILPLAFGKRVGREFIWNDLLSLETGSLKLANGRVIEKTLYNRRTRQDEPALFVALTFERREVLDSSNIKPMNLIGVDRGENIPAVIALTDPEGCPLSRFKDSLGNPTHILRIGESYKEKQRTIQAKKEVEQRRAGGYSRKYASKAKNLADDMVRNTARDLLYYAVTQDAMLIFENLSRGFGRQGKRTFMAERQYTRMEDWLTAKLAYEGLPSKTYLSKTLAQYTSKTCSNCGFTITSADYDRVLEKLKKTATGWMTTINGKELKVEGQITYYNRYKRQNVVKDLSVELDRLSEESVNNDISSWTKGRSGEALSLLKKRFSHRPVQEKFVCLNCGFETHADEQAALNIARSWLFLRSQEYKKYQTNKTTGNTDKRAFVETWQSFYRKKLKEVWKPAV

SEQ ID NO: 33890 - protein, 978 aa, synthetic construct
  REGION 1..978: note = engineered CasX variant
QEIKRINKIRRRLVKDSNTKKAGKTGPMKTLLVRVMTPDLRERLENLRKKPPNIPQPISNTSRANLNKLLTDYTEMKKAILHVYWEEFQKDPVGLMSRVAQPASKKIDQNKLKPEMDEKGNLTTAGFACSQCGQPLFVYKLEQVSEKGKAYTNYFGRCNVAEHEKLILLAQLKPEKDSDEAVTYSLGKFGQRALDFYSIHVTKESTHPVKPLAQIAGNRYASTPVGKALSDACMGTIASFLSKYQDIIIEHQKVVKGNQKRLESLRELAGKENLEYPSVTLPPQPHTKEGVDAYNEVIARVRMWVNLNLWQKLKLSRDDAKPLLRLKGFPSFPLVERQANEVDWWDMVCNVKKLINEKKEDGKVFWQNLAGYKRQEALRPYLSSEEDRKKGKKFARYQLGDLLLHLEKKHGEDWGKVYDEAWERIDKKVEGLSKHIKLEEERRSEDAQSKAALTDWLRAKASFVIEGLKEADKDEFCRCELKLQKWYGDLRGKPFAIEAENSILDISGFSKQYNCAFIWQKDGVKKLNLYLIINYFKGGKLRFKKIKPEAFEANRFYTVINKKSGEIVPMEVNFNFDDPNLIILPLAFGKRVGREFIWNDLLSLETGSLKLANGRVIEKTLYNRRTRQDEPALFVALTFERREVLDSSNIKPMNLIGVDRGENIPAVIALTDPEGCPLSRFKDSLGNPTHILRIGESYKEKQRTIQAKKEVEQRRAGGYSRKYASKAKNLADDMVRNTARDLLYYAVTQDAMLIFENLSRGFGRQGKRTFMAERQYTRMEDWLTAKLAYEGLPSKTYLSKTLAQYTSKTCSNCGFTITSADYDRVLEKLKKTATGWMTTINGKELKVEGQITYYNRYKRQNVVKDLSVELDRLSEESVNNDISSWTKGRSGEALSLLKKRFSHRPVQEKFVCLNCGFETHADEQAALNIARSWLFLRSQEYKKYQTNKTTGNTDKRAFVETWQSFYRKKLKEVWKPAV

SEQ ID NO: 33891 - protein, 978 aa, synthetic construct
  REGION 1..978: note = engineered CasX variant
QEIKRINKIRRRLVKDSNTKKAGKTGPMKTLLVRVMTPDLRERLENLRKKPPNIPQPISNTSRANLNKLLTDYTEMKKAILHVYWEEFQKDPVGLMSRVAQPASKKIDQNKLKPEMDEKGNLTTAGFACSQCGQPLFVYKLEQVSEKGKAYTNYFGRCNVAEHEKLILLAQLKPEKDSDEAVTYSLGKFGQRALDFYSIHVTKESTHPVKPLAQIAGNRYASAPVGKALSDACMGTIASFLSKYQDIIIEHQKVVKGNQKRLESLRELAGKENLEYPSVTLPPQPHTKEGVDAYNEVIARVRMWVNLNLWQKLKLSRDDAKPLLRLKGFPSFPLVERQANEVDWWDMVCNVKKLINEKKEDGKVFWQNLAGYKRQEALRPYLSSEEDRKKGKKFARYQLGDLLLHLEKKHGEDWGKVYDEAWERIDKKVEGLSKHIKLEEERRSEDAQSKAALTDWLRAKASFVIEGLKEADKDEFCRCELKLQKWYGDLRGKPFAIEAENSILDISGFSKQYNCAFIWQKDGVKKLNLYLIINYFKGGKLRFKKIKPEAFEANRFYTVINKKSGEIVPMEVNFNFDDPNLIILPLAFGKRVGREFIWNDLLSLETGSLKLANGRVIEKTLYNRRTRQDEPALFVALTFERREVLDSSNIKPMNLIGVDRGENIPAVIALTDPEGCPLSRFKDSLGNPTHILRIGESYKEKQRTIQAKKEVEQRRAGGYSRKYASKAKNLADDMVRNTARDLLYYAVTQDAMLIFENLSRGFGRQGKRTFMAERQYTRMEDWLTAKLAYEGLPSKTYLSKTLAQYTSKTCSNCGFTITSADYDRVLEKLKKTATGWMTTINGKELKVEGQITYYNRYKRQNVVKDLSVELDRLSEESVNNDISSWTKGRSGEALSLLKKRFSHRPVQEKFVCLNCGFETHADEQAALNIARSWLFLRSQEYKKYQTNKTTGNTDKRAFVETWQSFYRKKLKEVWKPAV

SEQ ID NO: 33892 - protein, 978 aa, synthetic construct
  REGION 1..978: note = engineered CasX variant
QEIKRINKIRRRLVKDSNTKKAGKTGPMKTLLVRVMTPDLRERLENLRKKPPNIPQPISNTSRANLNKLLTDYTEMKKAILHVYWEEFQKDPVGLMSRVAQPASKKIDQNKLKPEMDEKGNLTTAGFACSQCGQPLFVYKLEQVSEKGKAYTNYFGRCNVAEHEKLILLAQLKPEKDSDEAVTYSLGKFGQRALDFYSIHVTKESTHPVKPLAQIAGNRYASVPVGKALSDACMGTIASFLSKYQDIIIEHQKVVKGNQKRLESLRELAGKENLEYPSVTLPPQPHTKEGVDAYNEVIARVRMWVNLNLWQKLKLSRDDAKPLLRLKGFPSFPLVERQANEVDWWDMVCNVKKLINEKKEDGKVFWQNLAGYKRQEALRPYLSSEEDRKKGKKFARYQLGDLLLHLEKKHGEDWGKVYDEAWERIDKKVEGLSKHIKLEEERRSEDAQSKAALTDWLRAKASFVIEGLKEADKDEFCRCELKLQKWYGDLRGKPFAIEAENSILDISGFSKQYNCAFIWQKDGVKKLNLYLIINYFKGGKLRFKKIKPEAFEANRFYTVINKKSGEIVPMEVNFNFDDPNLIILPLAFGKRVGREFIWNDLLSLETGSLKLANGRVIEKTLYNRRTRQDEPALFVALTFERREVLDSSNIKPMNLIGVDRGENIPAVIALTDPEGCPLSRFKDSLGNPTHILRIGESYKEKQRTIQAKKEVEQRRAGGYSRKYASKAKNLADDMVRNTARDLLYYAVTQDAMLIFENLSRGFGRQGKRTFMAERQYTRMEDWLTAKLAYEGLPSKTYLSKTLAQYTSKTCSNCGFTITSADYDRVLEKLKKTATGWMTTINGKELKVEGQITYYNRYKRQNVVKDLSVELDRLSEESVNNDISSWTKGRSGEALSLLKKRFSHRPVQEKFVCLNCGFETHADEQAALNIARSWLFLRSQEYKKYQTNKTTGNTDKRAFVETWQSFYRKKLKEVWKPAV

SEQ ID NO: 33893 - protein, 978 aa, synthetic construct
  REGION 1..978: note = engineered CasX variant
QEIKRINKIRRRLVKDSNTKKAGKTGPMKTLLVRVMTPDLRERLENLRKKPPNIPQPISNTSRANLNKLLTDYTEMKKAILHVYWEEFQKDPVGLMSRVAQPASKKIDQNKLKPEMDEKGNLTTAGFACSQCGQPLFVYKLEQVSEKGKAYTNYFGRCNVAEHEKLIKLAQLKPEKDSDEAVTYSLGKFGQRALDFYSIHVTKESTHPVKPLAQIAGNRYASGPVGKALSDACMGTIASFLSKYQDIIIEHQKVVKGNQKRLESLRELAGKENLEYPSVTLPPQPHTKEGVDAYNEVIARVRMWVNLNLWQKLKLSRDDAKPLLRLKGFPSFPLVERQANEVDWWDMVCNVKKLINEKKEDGKVFWQNLAGYKRQEALRPYLSSEEDRKKGKKFARYQLGDLLLHLEKKHGEDWGKVYDEAWERIDKKVEGLSKHIKLEEERRSEDAQSKAALTDWLRAKASFVIEGLKEADKDEFCRCELKLQKWYGDLRGKPFAIEAENSILDISGFSKQYNCAFIWQKDGVKKLNLYLIINYFKGGKLRFKKIKPEAFEANRFYTVINKKSGEIVPMEVNFNFDDPNLIILPLAFGKRVGREFIWNDLLSLETGSLKLANGRVIEKTLYNRRTRQDEPALFVALTFERREVLDSSNIKPMNLIGVDRGENIPAVIALTDPEGCPLSRFKDSLGNPTHILRIGESYKEKQRTIQAKKEVEQRRAGGYSRKYASKAKNLADDMVRNTARDLLYYAVTQDAMLIFENLSRGFGRQGKRTFMAERQYTRMEDWLTAKLAYEGLPSKTYLSKTLAQYTSKTCSNCGFTITSADYDRVLEKLKKTATGWMTTINGKELKVEGQITYYNRYKRQNVVKDLSVELDRLSEESVNNDISSWTKGRSGEALSLLKKRFSHRPVQEKFVCLNCGFETHADEQAALNIARSWLFLRSQEYKKYQTNKTTGNTDKRAFVETWQSFYRKKLKEVWKPAV

SEQ ID NO: 33894 - protein, 977 aa, synthetic construct
  REGION 1..977: note = engineered CasX variant
QEIKRINKIRRRLVKDSNTKKAGKTGPMKTLLVRVMTPDLRERLENLRKKPPNIPQPISNTSRANLNKLLTDYTEMKKAILHVYWEEFQKDPVGLMSRVAQPASKKIDQNKLKPEMDEKGNLTTAGFACSQCGQPLFVYKLEQVSEKGKAYTNYFGRCNVAEHEKLILLAQLKPEKDSDEAVTYSLGKFGQRALDFYSIHVTKESTHPVKPLAQIAGNRYASPVGKALSDACMGTIASFLSKYQDIIIEHQKVVKGNQKRLESLRELAGKENLEYPSVTLPPQPHTKEGVDAYNEVIARVRMWVNLNLWQKLKLSRDDAKPLLRLKGFPSFPLVERQANEVDWWDMVCNVKKLINEKKEDGKVFWQNLAGYKRQEALRPYLSSEEDRKKGKKFARYQLGDLLLHLEKKHGEDWGKVYDEAWERIDKKVEGLSKHIKLEEERRSEDAQSKAALTDWLRAKASFVIEGLKEADKDEFCRCELKLQKWYGDLRGKPFAIEAENSILDISGFSKQYNCAFIWQKDGVKKLNLYLIINYFKGGKLRFKKIKPEAFEANRFYTVINKKSGEIVPMEVNFNFDDPNLIILPLAFGKRVGREFIWNDLLSLETGSLKLANGRVIEKTLYNRRTRQDEPALFVALTFERREVLDSSNIKPMNLIGVDRGENIPAVIALTDPEGCPLSRFKDSLGNPTHILRIGESYKEKQRTIQAKKEVEQRRAGGYSRKYASKAKNLADDMVRNTARDLLYYAVTQDAMLIFENLSRGFGRQGKRTFMAERQYTRMEDWLTAKLAYEGLPSKTYLSKTLAQYTSKTCSNCGFTITSADYDRVLEKLKKTATGWMTTINGKELKVEGQITYYNRYKRQNVVKDLSVELDRLSEESVNNDISSWTKGRSGEALSLLKKRFSHRPVQEKFVCLNCGFETHADEQAALNIARSWLFLRSQEYKKYQTNKTTGNTDKRAFVETWQSFYRKKLKEVWKPAV

SEQ ID NO: 33895 - protein, 979 aa, synthetic construct
  REGION 1..979: note = engineered CasX variant
QEIKRINKIRRRLVKDSNTKKAGKTGPMKTLLVRVMTPDLRERLENLRKKPPNIPQPISNTSRANLNKLLTDYTEMKKAILHVYWEEFQKDPVGLMSRVAQPASKKIDQNKLKPEMDEKGNLTTAGFACSQCGQPLFVYKLEQVSEKGKAYTNYFGRCNVAEHEKLILLAQLKPEKDSDEAVTYSLGKFGQRALDFYSIHVTKESTHPVKPLAQIAGNRYASYPVGKALSDACMGTIASFLSKYQDIIIEHQKVVKGNQKRLESLRELAGKENLEYPSVTLPPQPHTKEGVDAYNEVIARVRMWVNLNLWQKLKLSRDDAKPLLRLKGFPSFPLVERQANEVDWWDMVCNVKKLINEKKEDGKVFWQNLAGYKRQEALRPYLSSEEDRKKGKKFARYQLGDLLLHLEKKHGEDWGKVYDEAWERIDKKVEGLSKHIKLEEERRSEDAQSKAALTDWLRAKASFVIEGLKEADKDEFCRCELKLQKWYGDLRGKPFAIEAENSILDISGFSKQYNCAFIWQKDGVKKLNLYLIINYFKGGKLRFKKIKPEAFEANRFYTVINKKSGEIVPMEVNFNFDDPNLIILPLAFGKRQGREFIWNDLLSLETGSLKLANGRVIEKTLYNRRTRQDEPALFVALTFERREVLDSSNIKTPMNLIGVDRGENIPAVIALTDPEGCPLSRFKDSLGNPTHILRIGESYKEKQRTIQAKKEVEQRRAGGYSRKYASKAKNLADDMVRNTARDLLYYAVTQDAMLIFENLSRGFGRQGKRTFMAERQYTRMEDWLTAKLAYEGLPSKTYLSKTLAQYTSKTCSNCGFTITSADYDRVLEKLKKTATGWMTTINGKELKVEGQITYYNRYKRQNVVKDLSVELDRLSEESVNNDISSWTKGRSGEALSLLKKRFSHRPVQEKFVCLNCGFETHADEQAALNIARSWLFLRSQEYKKYQTNKTTGNTDKRAFVETWQSFYRKKLKEVWKPAV

SEQ ID NO: 33896 - protein, 979 aa, synthetic construct
  REGION 1..979: note = engineered CasX variant
QEIKRINKIRRRLVKDSNTKKAGKTGPMKTLLVRVMTPDLRERLENLRKKPPNIPQPISNTSRANLNKLLTDYTEMKKAILHVYWEEFQKDPVGLMSRVAQPASKKIDQNKLKPEMDEKGNLTTAGFACSQCGQPLFVYKLEQVSEKGKAYTNYFGRCNVAEHEKLILLAQLKPEKDSDEAVTYSLGKFGQRALDFYSIHVTKESTHPVKPLAQIAGNRYASHPVGKALSDACMGTIASFLSKYQDIIIEHQKVVKGNQKRLESLRELAGKENLEYPSVTLPPQPHTKEGVDAYNEVIARVRMWVNLNLWQKLKLSRDDAKPLLRLKGFPSFPLVERQANEVDWWDMVCNVKKLINEKKEDGKVFWQNLAGYKRQEALRPYLSSEEDRKKGKKFARYQLGDLLLHLEKKHGEDWGKVYDEAWERIDKKVEGLSKHIKLEEERRSEDAQSKAALTDWLRAKASFVIEGLKEADKDEFCRCELKLQKWYGDLRGKPFAIEAENSILDISGFSKQYNCAFIWQKDGVKKLNLYLIINYFKGGKLRFKKIKPEAFEANRFYTVINKKSGEIVPMEVNFNFDDPNLIILPLAFGKRQGREFIWNDLLSLETGSLKLANGRVIEKTLYNRRTRQDEPALFVALTFERREVLDSSNIKTPMNLIGVDRGENIPAVIALTDPEGCPLSRFKDSLGNPTHILRIGESYKEKQRTIQAKKEVEQRRAGGYSRKYASKAKNLADDMVRNTARDLLYYAVTQDAMLIFENLSRGFGRQGKRTFMAERQYTRMEDWLTAKLAYEGLPSKTYLSKTLAQYTSKTCSNCGFTITSADYDRVLEKLKKTATGWMTTINGKELKVEGQITYYNRYKRQNVVKDLSVELDRLSEESVNNDISSWTKGRSGEALSLLKKRFSHRPVQEKFVCLNCGFETHADEQAALNIARSWLFLRSQEYKKYQTNKTTGNTDKRAFVETWQSFYRKKLKEVWKPAV

SEQ ID NO: 33897 - protein, 979 aa, synthetic construct
  REGION 1..979: note = engineered CasX variant
QEIKRINKIRRRLVKDSNTKKAGKTGPMKTLLVRVMTPDLRERLENLRKKPPNIPQPISNTSRANLNKLLTDYTEMKKAILHVYWEEFQKDPVGLMSRVAQPASKKIDQNKLKPEMDEKGNLTTAGFACSQCGQPLFVYKLEQVSEKGKAYTNYFGRCNVAEHEKLILLAQLKPEKDSDEAVTYSLGKFGQRALDFYSIHVTKESTHPVKPLAQIAGNRYASSPVGKALSDACMGTIASFLSKYQDIIIEHQKVVKGNQKRLESLRELAGKENLEYPSVTLPPQPHTKEGVDAYNEVIARVRMWVNLNLWQKLKLSRDDAKPLLRLKGFPSFPLVERQANEVDWWDMVCNVKKLINEKKEDGKVFWQNLAGYKRQEALRPYLSSEEDRKKGKKFARYQLGDLLLHLEKKHGEDWGKVYDEAWERIDKKVEGLSKHIKLEEERRSEDAQSKAALTDWLRAKASFVIEGLKEADKDEFCRCELKLQKWYGDLRGKPFAIEAENSILDISGFSKQYNCAFIWQKDGVKKLNLYLIINYFKGGKLRFKKIKPEAFEANRFYTVINKKSGEIVPMEVNFNFDDPNLIILPLAFGKRQGREFIWNDLLSLETGSLKLANGRVIEKTLYNRRTRQDEPALFVALTFERREVLDSSNIKTPMNLIGVDRGENIPAVIALTDPEGCPLSRFKDSLGNPTHILRIGESYKEKQRTIQAKKEVEQRRAGGYSRKYASKAKNLADDMVRNTARDLLYYAVTQDAMLIFENLSRGFGRQGKRTFMAERQYTRMEDWLTAKLAYEGLPSKTYLSKTLAQYTSKTCSNCGFTITSADYDRVLEKLKKTATGWMTTINGKELKVEGQITYYNRYKRQNVVKDLSVELDRLSEESVNNDISSWTKGRSGEALSLLKKRFSHRPVQEKFVCLNCGFETHADEQAALNIARSWLFLRSQEYKKYQTNKTTGNTDKRAFVETWQSFYRKKLKEVWKPAV

SEQ ID NO: 33898 - protein, 979 aa, synthetic construct
  REGION 1..979: note = engineered CasX variant
QEIKRINKIRRRLVKDSNTKKAGKTGPMKTLLVRVMTPDLRERLENLRKKPPNIPQPISNTSRANLNKLLTDYTEMKKAILHVYWEEFQKDPVGLMSRVAQPASKKIDQNKLKPEMDEKGNLTTAGFACSQCGQPLFVYKLEQVSEKGKAYTNYFGRCNVAEHEKLILLAQLKPEKDSDEAVTYSLGKFGQRALDFYSIHVTKESTHPVKPLAQIAGNRYASTPVGKALSDACMGTIASFLSKYQDIIIEHQKVVKGNQKRLESLRELAGKENLEYPSVTLPPQPHTKEGVDAYNEVIARVRMWVNLNLWQKLKLSRDDAKPLLRLKGFPSFPLVERQANEVDWWDMVCNVKKLINEKKEDGKVFWQNLAGYKRQEALRPYLSSEEDRKKGKKFARYQLGDLLLHLEKKHGEDWGKVYDEAWERIDKKVEGLSKHIKLEEERRSEDAQSKAALTDWLRAKASFVIEGLKEADKDEFCRCELKLQKWYGDLRGKPFAIEAENSILDISGFSKQYNCAFIWQKDGVKKLNLYLIINYFKGGKLRFKKIKPEAFEANRFYTVINKKSGEIVPMEVNFNFDDPNLIILPLAFGKRQGREFIWNDLLSLETGSLKLANGRVIEKTLYNRRTRQDEPALFVALTFERREVLDSSNIKTPMNLIGVDRGENIPAVIALTDPEGCPLSRFKDSLGNPTHILRIGESYKEKQRTIQAKKEVEQRRAGGYSRKYASKAKNLADDMVRNTARDLLYYAVTQDAMLIFENLSRGFGRQGKRTFMAERQYTRMEDWLTAKLAYEGLPSKTYLSKTLAQYTSKTCSNCGFTITSADYDRVLEKLKKTATGWMTTINGKELKVEGQITYYNRYKRQNVVKDLSVELDRLSEESVNNDISSWTKGRSGEALSLLKKRFSHRPVQEKFVCLNCGFETHADEQAALNIARSWLFLRSQEYKKYQTNKTTGNTDKRAFVETWQSFYRKKLKEVWKPAV

SEQ ID NO: 33899 - protein, 979 aa, synthetic construct
  REGION 1..979: note = engineered CasX variant
QEIKRINKIRRRLVKDSNTKKAGKTGPMKTLLVRVMTPDLRERLENLRKKPPNIPQPISNTSRANLNKLLTDYTEMKKAILHVYWEEFQKDPVGLMSRVAQPASKKIDQNKLKPEMDEKGNLTTAGFACSQCGQPLFVYKLEQVSEKGKAYTNYFGRCNVAEHEKLILLAQLKPEKDSDEAVTYSLGKFGQRALDFYSIHVTKESTHPVKPLAQIAGNRYASAPVGKALSDACMGTIASFLSKYQDIIIEHQKVVKGNQKRLESLRELAGKENLEYPSVTLPPQPHTKEGVDAYNEVIARVRMWVNLNLWQKLKLSRDDAKPLLRLKGFPSFPLVERQANEVDWWDMVCNVKKLINEKKEDGKVFWQNLAGYKRQEALRPYLSSEEDRKKGKKFARYQLGDLLLHLEKKHGEDWGKVYDEAWERIDKKVEGLSKHIKLEEERRSEDAQSKAALTDWLRAKASFVIEGLKEADKDEFCRCELKLQKWYGDLRGKPFAIEAENSILDISGFSKQYNCAFIWQKDGVKKLNLYLIINYFKGGKLRFKKIKPEAFEANRFYTVINKKSGEIVPMEVNFNFDDPNLIILPLAFGKRQGREFIWNDLLSLETGSLKLANGRVIEKTLYNRRTRQDEPALFVALTFERREVLDSSNIKTPMNLIGVDRGENIPAVIALTDPEGCPLSRFKDSLGNPTHILRIGESYKEKQRTIQAKKEVEQRRAGGYSRKYASKAKNLADDMVRNTARDLLYYAVTQDAMLIFENLSRGFGRQGKRTFMAERQYTRMEDWLTAKLAYEGLPSKTYLSKTLAQYTSKTCSNCGFTITSADYDRVLEKLKKTATGWMTTINGKELKVEGQITYYNRYKRQNVVKDLSVELDRLSEESVNNDISSWTKGRSGEALSLLKKRFSHRPVQEKFVCLNCGFETHADEQAALNIARSWLFLRSQEYKKYQTNKTTGNTDKRAFVETWQSFYRKKLKEVWKPAV

SEQ ID NO: 33900 - protein, 979 aa, synthetic construct
  REGION 1..979: note = engineered CasX variant
QEIKRINKIRRRLVKDSNTKKAGKTGPMKTLLVRVMTPDLRERLENLRKKPPNIPQPISNTSRANLNKLLTDYTEMKKAILHVYWEEFQKDPVGLMSRVAQPASKKIDQNKLKPEMDEKGNLTTAGFACSQCGQPLFVYKLEQVSEKGKAYTNYFGRCNVAEHEKLILLAQLKPEKDSDEAVTYSLGKFGQRALDFYSIHVTKESTHPVKPLAQIAGNRYASVPVGKALSDACMGTIASFLSKYQDIIIEHQKVVKGNQKRLESLRELAGKENLEYPSVTLPPQPHTKEGVDAYNEVIARVRMWVNLNLWQKLKLSRDDAKPLLRLKGFPSFPLVERQANEVDWWDMVCNVKKLINEKKEDGKVFWQNLAGYKRQEALRPYLSSEEDRKKGKKFARYQLGDLLLHLEKKHGEDWGKVYDEAWERIDKKVEGLSKHIKLEEERRSEDAQSKAALTDWLRAKASFVIEGLKEADKDEFCRCELKLQKWYGDLRGKPFAIEAENSILDISGFSKQYNCAFIWQKDGVKKLNLYLIINYFKGGKLRFKKIKPEAFEANRFYTVINKKSGEIVPMEVNFNFDDPNLIILPLAFGKRQGREFIWNDLLSLETGSLKLANGRVIEKTLYNRRTRQDEPALFVALTFERREVLDSSNIKTPMNLIGVDRGENIPAVIALTDPEGCPLSRFKDSLGNPTHILRIGESYKEKQRTIQAKKEVEQRRAGGYSRKYASKAKNLADDMVRNTARDLLYYAVTQDAMLIFENLSRGFGRQGKRTFMAERQYTRMEDWLTAKLAYEGLPSKTYLSKTLAQYTSKTCSNCGFTITSADYDRVLEKLKKTATGWMTTINGKELKVEGQITYYNRYKRQNVVKDLSVELDRLSEESVNNDISSWTKGRSGEALSLLKKRFSHRPVQEKFVCLNCGFETHADEQAALNIARSWLFLRSQEYKKYQTNKTTGNTDKRAFVETWQSFYRKKLKEVWKPAV

SEQ ID NO: 33901 - protein, 979 aa, synthetic construct
  REGION 1..979: note = engineered CasX variant
QEIKRINKIRRRLVKDSNTKKAGKTGPMKTLLVRVMTPDLRERLENLRKKPPNIPQPISNTSRANLNKLLTDYTEMKKAILHVYWEEFQKDPVGLMSRVAQPASKKIDQNKLKPEMDEKGNLTTAGFACSQCGQPLFVYKLEQVSEKGKAYTNYFGRCNVAEHEKLIKLAQLKPEKDSDEAVTYSLGKFGQRALDFYSIHVTKESTHPVKPLAQIAGNRYASGPVGKALSDACMGTIASFLSKYQDIIIEHQKVVKGNQKRLESLRELAGKENLEYPSVTLPPQPHTKEGVDAYNEVIARVRMWVNLNLWQKLKLSRDDAKPLLRLKGFPSFPLVERQANEVDWWDMVCNVKKLINEKKEDGKVFWQNLAGYKRQEALRPYLSSEEDRKKGKKFARYQLGDLLLHLEKKHGEDWGKVYDEAWERIDKKVEGLSKHIKLEEERRSEDAQSKAALTDWLRAKASFVIEGLKEADKDEFCRCELKLQKWYGDLRGKPFAIEAENSILDISGFSKQYNCAFIWQKDGVKKLNLYLIINYFKGGKLRFKKIKPEAFEANRFYTVINKKSGEIVPMEVNFNFDDPNLIILPLAFGKRQGREFIWNDLLSLETGSLKLANGRVIEKTLYNRRTRQDEPALFVALTFERREVLDSSNIKTPMNLIGVDRGENIPAVIALTDPEGCPLSRFKDSLGNPTHILRIGESYKEKQRTIQAKKEVEQRRAGGYSRKYASKAKNLADDMVRNTARDLLYYAVTQDAMLIFENLSRGFGRQGKRTFMAERQYTRMEDWLTAKLAYEGLPSKTYLSKTLAQYTSKTCSNCGFTITSADYDRVLEKLKKTATGWMTTINGKELKVEGQITYYNRYKRQNVVKDLSVELDRLSEESVNNDISSWTKGRSGEALSLLKKRFSHRPVQEKFVCLNCGFETHADEQAALNIARSWLFLRSQEYKKYQTNKTTGNTDKRAFVETWQSFYRKKLKEVWKPAV

SEQ ID NO: 33902 - protein, 978 aa, synthetic construct
  REGION 1..978: note = engineered CasX variant
QEIKRINKIRRRLVKDSNTKKAGKTGPMKTLLVRVMTPDLRERLENLRKKPPNIPQPISNTSRANLNKLLTDYTEMKKAILHVYWEEFQKDPVGLMSRVAQPASKKIDQNKLKPEMDEKGNLTTAGFACSQCGQPLFVYKLEQVSEKGKAYTNYFGRCNVAEHEKLILLAQLKPEKDSDEAVTYSLGKFGQRALDFYSIHVTKESTHPVKPLAQIAGNRYASPVGKALSDACMGTIASFLSKYQDIIIEHQKVVKGNQKRLESLRELAGKENLEYPSVTLPPQPHTKEGVDAYNEVIARVRMWVNLNLWQKLKLSRDDAKPLLRLKGFPSFPLVERQANEVDWWDMVCNVKKLINEKKEDGKVFWQNLAGYKRQEALRPYLSSEEDRKKGKKFARYQLGDLLLHLEKKHGEDWGKVYDEAWERIDKKVEGLSKHIKLEEERRSEDAQSKAALTDWLRAKASFVIEGLKEADKDEFCRCELKLQKWYGDLRGKPFAIEAENSILDISGFSKQYNCAFIWQKDGVKKLNLYLIINYFKGGKLRFKKIKPEAFEANRFYTVINKKSGEIVPMEVNFNFDDPNLIILPLAFGKRQGREFIWNDLLSLETGSLKLANGRVIEKTLYNRRTRQDEPALFVALTFERREVLDSSNIKTPMNLIGVDRGENIPAVIALTDPEGCPLSRFKDSLGNPTHILRIGESYKEKQRTIQAKKEVEQRRAGGYSRKYASKAKNLADDMVRNTARDLLYYAVTQDAMLIFENLSRGFGRQGKRTFMAERQYTRMEDWLTAKLAYEGLPSKTYLSKTLAQYTSKTCSNCGFTITSADYDRVLEKLKKTATGWMTTINGKELKVEGQITYYNRYKRQNVVKDLSVELDRLSEESVNNDISSWTKGRSGEALSLLKKRFSHRPVQEKFVCLNCGFETHADEQAALNIARSWLFLRSQEYKKYQTNKTTGNTDKRAFVETWQSFYRKKLKEVWKPAV

SEQ ID NO: 33903 - protein, 979 aa, synthetic construct
  REGION 1..979: note = engineered CasX variant
QEIKRINKIRRRLVKDSNTKKAGKTGPMKTLLVRVMTPDLRERLENLRKKPPNIPQPISNTSRANLNKLLTDYTEMKKAILHVYWEEFQKDPVGLMSRVAQPASKKIDQNKLKPEMDEKGNLTTAGFACSQCGQPLFVYKLEQVSEKGKAYTNYFGRCNVAEHEKLILLAQLKPEKDSDEAVTYSLGKFGQRALDFYSIHVTKESTHPVKPLAQIAGNRYASYPVGKALSDACMGTIASFLSKYQDIIIEHQKVVKGNQKRLESLRELAGKENLEYPSVTLPPQPHTKEGVDAYNEVIARVRMWVNLNLWQKLKLSRDDAKPLLRLKGFPSFPLVERQANEVDWWDMVCNVKKLINEKKEDGKVFWQNLAGYKRQEALRPYLSSEEDRKKGKKFARYQLGDLLLHLEKKHGEDWGKVYDEAWERIDKKVEGLSKHIKLEEERRSEDAQSKAALTDWLRAKASFVIEGLKEADKDEFCRCELKLQKWYGDLRGKPFAIEAENSILDISGFSKQYNCAFIWQKDGVKKLNLYLIINYFKGGKLRFKKIKPEAFEANRFYTVINKKSGEIVPMEVNFNFDDPNLIILPLAFGKRQGREFIWNDLLSLETGSLKLANGRVIEKTLYNRRTRQDEPALFVALTFERREVLDSSNIKPMSNLIGVDRGENIPAVIALTDPEGCPLSRFKDSLGNPTHILRIGESYKEKQRTIQAKKEVEQRRAGGYSRKYASKAKNLADDMVRNTARDLLYYAVTQDAMLIFENLSRGFGRQGKRTFMAERQYTRMEDWLTAKLAYEGLPSKTYLSKTLAQYTSKTCSNCGFTITSADYDRVLEKLKKTATGWMTTINGKELKVEGQITYYNRYKRQNVVKDLSVELDRLSEESVNNDISSWTKGRSGEALSLLKKRFSHRPVQEKFVCLNCGFETHADEQAALNIARSWLFLRSQEYKKYQTNKTTGNTDKRAFVETWQSFYRKKLKEVWKPAV

SEQ ID NO: 33904 - protein, 979 aa, synthetic construct
  REGION 1..979: note = engineered CasX variant
QEIKRINKIRRRLVKDSNTKKAGKTGPMKTLLVRVMTPDLRERLENLRKKPPNIPQPISNTSRANLNKLLTDYTEMKKAILHVYWEEFQKDPVGLMSRVAQPASKKIDQNKLKPEMDEKGNLTTAGFACSQCGQPLFVYKLEQVSEKGKAYTNYFGRCNVAEHEKLILLAQLKPEKDSDEAVTYSLGKFGQRALDFYSIHVTKESTHPVKPLAQIAGNRYASHPVGKALSDACMGTIASFLSKYQDIIIEHQKVVKGNQKRLESLRELAGKENLEYPSVTLPPQPHTKEGVDAYNEVIARVRMWVNLNLWQKLKLSRDDAKPLLRLKGFPSFPLVERQANEVDWWDMVCNVKKLINEKKEDGKVFWQNLAGYKRQEALRPYLSSEEDRKKGKKFARYQLGDLLLHLEKKHGEDWGKVYDEAWERIDKKVEGLSKHIKLEEERRSEDAQSKAALTDWLRAKASFVIEGLKEADKDEFCRCELKLQKWYGDLRGKPFAIEAENSILDISGFSKQYNCAFIWQKDGVKKLNLYLIINYFKGGKLRFKKIKPEAFEANRFYTVINKKSGEIVPMEVNFNFDDPNLIILPLAFGKRQGREFIWNDLLSLETGSLKLANGRVIEKTLYNRRTRQDEPALFVALTFERREVLDSSNIKPMSNLIGVDRGENIPAVIALTDPEGCPLSRFKDSLGNPTHILRIGESYKEKQRTIQAKKEVEQRRAGGYSRKYASKAKNLADDMVRNTARDLLYYAVTQDAMLIFENLSRGFGRQGKRTFMAERQYTRMEDWLTAKLAYEGLPSKTYLSKTLAQYTSKTCSNCGFTITSADYDRVLEKLKKTATGWMTTINGKELKVEGQITYYNRYKRQNVVKDLSVELDRLSEESVNNDISSWTKGRSGEALSLLKKRFSHRPVQEKFVCLNCGFETHADEQAALNIARSWLFLRSQEYKKYQTNKTTGNTDKRAFVETWQSFYRKKLKEVWKPAV

SEQ ID NO: 33905 - protein, 979 aa, synthetic construct
  REGION 1..979: note = engineered CasX variant
QEIKRINKIRRRLVKDSNTKKAGKTGPMKTLLVRVMTPDLRERLENLRKKPPNIPQPISNTSRANLNKLLTDYTEMKKAILHVYWEEFQKDPVGLMSRVAQPASKKIDQNKLKPEMDEKGNLTTAGFACSQCGQPLFVYKLEQVSEKGKAYTNYFGRCNVAEHEKLILLAQLKPEKDSDEAVTYSLGKFGQRALDFYSIHVTKESTHPVKPLAQIAGNRYASSPVGKALSDACMGTIASFLSKYQDIIIEHQKVVKGNQKRLESLRELAGKENLEYPSVTLPPQPHTKEGVDAYNEVIARVRMWVNLNLWQKLKLSRDDAKPLLRLKGFPSFPLVERQANEVDWWDMVCNVKKLINEKKEDGKVFWQNLAGYKRQEALRPYLSSEEDRKKGKKFARYQLGDLLLHLEKKHGEDWGKVYDEAWERIDKKVEGLSKHIKLEEERRSEDAQSKAALTDWLRAKASFVIEGLKEADKDEFCRCELKLQKWYGDLRGKPFAIEAENSILDISGFSKQYNCAFIWQKDGVKKLNLYLIINYFKGGKLRFKKIKPEAFEANRFYTVINKKSGEIVPMEVNFNFDDPNLIILPLAFGKRQGREFIWNDLLSLETGSLKLANGRVIEKTLYNRRTRQDEPALFVALTFERREVLDSSNIKPMSNLIGVDRGENIPAVIALTDPEGCPLSRFKDSLGNPTHILRIGESYKEKQRTIQAKKEVEQRRAGGYSRKYASKAKNLADDMVRNTARDLLYYAVTQDAMLIFENLSRGFGRQGKRTFMAERQYTRMEDWLTAKLAYEGLPSKTYLSKTLAQYTSKTCSNCGFTITSADYDRVLEKLKKTATGWMTTINGKELKVEGQITYYNRYKRQNVVKDLSVELDRLSEESVNNDISSWTKGRSGEALSLLKKRFSHRPVQEKFVCLNCGFETHADEQAALNIARSWLFLRSQEYKKYQTNKTTGNTDKRAFVETWQSFYRKKLKEVWKPAV

SEQ ID NO: 33906 - protein, 979 aa, synthetic construct
  REGION 1..979: note = engineered CasX variant
QEIKRINKIRRRLVKDSNTKKAGKTGPMKTLLVRVMTPDLRERLENLRKKPPNIPQPISNTSRANLNKLLTDYTEMKKAILHVYWEEFQKDPVGLMSRVAQPASKKIDQNKLKPEMDEKGNLTTAGFACSQCGQPLFVYKLEQVSEKGKAYTNYFGRCNVAEHEKLILLAQLKPEKDSDEAVTYSLGKFGQRALDFYSIHVTKESTHPVKPLAQIAGNRYASTPVGKALSDACMGTIASFLSKYQDIIIEHQKVVKGNQKRLESLRELAGKENLEYPSVTLPPQPHTKEGVDAYNEVIARVRMWVNLNLWQKLKLSRDDAKPLLRLKGFPSFPLVERQANEVDWWDMVCNVKKLINEKKEDGKVFWQNLAGYKRQEALRPYLSSEEDRKKGKKFARYQLGDLLLHLEKKHGEDWGKVYDEAWERIDKKVEGLSKHIKLEEERRSEDAQSKAALTDWLRAKASFVIEGLKEADKDEFCRCELKLQKWYGDLRGKPFAIEAENSILDISGFSKQYNCAFIWQKDGVKKLNLYLIINYFKGGKLRFKKIKPEAFEANRFYTVINKKSGEIVPMEVNFNFDDPNLIILPLAFGKRQGREFIWNDLLSLETGSLKLANGRVIEKTLYNRRTRQDEPALFVALTFERREVLDSSNIKPMSNLIGVDRGENIPAVIALTDPEGCPLSRFKDSLGNPTHILRIGESYKEKQRTIQAKKEVEQRRAGGYSRKYASKAKNLADDMVRNTARDLLYYAVTQDAMLIFENLSRGFGRQGKRTFMAERQYTRMEDWLTAKLAYEGLPSKTYLSKTLAQYTSKTCSNCGFTITSADYDRVLEKLKKTATGWMTTINGKELKVEGQITYYNRYKRQNVVKDLSVELDRLSEESVNNDISSWTKGRSGEALSLLKKRFSHRPVQEKFVCLNCGFETHADEQAALNIARSWLFLRSQEYKKYQTNKTTGNTDKRAFVETWQSFYRKKLKEVWKPAV

SEQ ID NO: 33907 - protein, 979 aa, synthetic construct
  REGION 1..979: note = engineered CasX variant
QEIKRINKIRRRLVKDSNTKKAGKTGPMKTLLVRVMTPDLRERLENLRKKPPNIPQPISNTSRANLNKLLTDYTEMKKAILHVYWEEFQKDPVGLMSRVAQPASKKIDQNKLKPEMDEKGNLTTAGFACSQCGQPLFVYKLEQVSEKGKAYTNYFGRCNVAEHEKLILLAQLKPEKDSDEAVTYSLGKFGQRALDFYSIHVTKESTHPVKPLAQIAGNRYASAPVGKALSDACMGTIASFLSKYQDIIIEHQKVVKGNQKRLESLRELAGKENLEYPSVTLPPQPHTKEGVDAYNEVIARVRMWVNLNLWQKLKLSRDDAKPLLRLKGFPSFPLVERQANEVDWWDMVCNVKKLINEKKEDGKVFWQNLAGYKRQEALRPYLSSEEDRKKGKKFARYQLGDLLLHLEKKHGEDWGKVYDEAWERIDKKVEGLSKHIKLEEERRSEDAQSKAALTDWLRAKASFVIEGLKEADKDEFCRCELKLQKWYGDLRGKPFAIEAENSILDISGFSKQYNCAFIWQKDGVKKLNLYLIINYFKGGKLRFKKIKPEAFEANRFYTVINKKSGEIVPMEVNFNFDDPNLIILPLAFGKRQGREFIWNDLLSLETGSLKLANGRVIEKTLYNRRTRQDEPALFVALTFERREVLDSSNIKPMSNLIGVDRGENIPAVIALTDPEGCPLSRFKDSLGNPTHILRIGESYKEKQRTIQAKKEVEQRRAGGYSRKYASKAKNLADDMVRNTARDLLYYAVTQDAMLIFENLSRGFGRQGKRTFMAERQYTRMEDWLTAKLAYEGLPSKTYLSKTLAQYTSKTCSNCGFTITSADYDRVLEKLKKTATGWMTTINGKELKVEGQITYYNRYKRQNVVKDLSVELDRLSEESVNNDISSWTKGRSGEALSLLKKRFSHRPVQEKFVCLNCGFETHADEQAALNIARSWLFLRSQEYKKYQTNKTTGNTDKRAFVETWQSFYRKKLKEVWKPAV

SEQ ID NO: 33908 - protein, 979 aa, synthetic construct
  REGION 1..979: note = engineered CasX variant
QEIKRINKIRRRLVKDSNTKKAGKTGPMKTLLVRVMTPDLRERLENLRKKPPNIPQPISNTSRANLNKLLTDYTEMKKAILHVYWEEFQKDPVGLMSRVAQPASKKIDQNKLKPEMDEKGNLTTAGFACSQCGQPLFVYKLEQVSEKGKAYTNYFGRCNVAEHEKLILLAQLKPEKDSDEAVTYSLGKFGQRALDFYSIHVTKESTHPVKPLAQIAGNRYASVPVGKALSDACMGTIASFLSKYQDIIIEHQKVVKGNQKRLESLRELAGKENLEYPSVTLPPQPHTKEGVDAYNEVIARVRMWVNLNLWQKLKLSRDDAKPLLRLKGFPSFPLVERQANEVDWWDMVCNVKKLINEKKEDGKVFWQNLAGYKRQEALRPYLSSEEDRKKGKKFARYQLGDLLLHLEKKHGEDWGKVYDEAWERIDKKVEGLSKHIKLEEERRSEDAQSKAALTDWLRAKASFVIEGLKEADKDEFCRCELKLQKWYGDLRGKPFAIEAENSILDISGFSKQYNCAFIWQKDGVKKLNLYLIINYFKGGKLRFKKIKPEAFEANRFYTVINKKSGEIVPMEVNFNFDDPNLIILPLAFGKRQGREFIWNDLLSLETGSLKLANGRVIEKTLYNRRTRQDEPALFVALTFERREVLDSSNIKPMSNLIGVDRGENIPAVIALTDPEGCPLSRFKDSLGNPTHILRIGESYKEKQRTIQAKKEVEQRRAGGYSRKYASKAKNLADDMVRNTARDLLYYAVTQDAMLIFENLSRGFGRQGKRTFMAERQYTRMEDWLTAKLAYEGLPSKTYLSKTLAQYTSKTCSNCGFTITSADYDRVLEKLKKTATGWMTTINGKELKVEGQITYYNRYKRQNVVKDLSVELDRLSEESVNNDISSWTKGRSGEALSLLKKRFSHRPVQEKFVCLNCGFETHADEQAALNIARSWLFLRSQEYKKYQTNKTTGNTDKRAFVETWQSFYRKKLKEVWKPAV

SEQ ID NO: 33909 - protein, 979 aa, synthetic construct
  REGION 1..979: note = engineered CasX variant
QEIKRINKIRRRLVKDSNTKKAGKTGPMKTLLVRVMTPDLRERLENLRKKPPNIPQPISNTSRANLNKLLTDYTEMKKAILHVYWEEFQKDPVGLMSRVAQPASKKIDQNKLKPEMDEKGNLTTAGFACSQCGQPLFVYKLEQVSEKGKAYTNYFGRCNVAEHEKLIKLAQLKPEKDSDEAVTYSLGKFGQRALDFYSIHVTKESTHPVKPLAQIAGNRYASGPVGKALSDACMGTIASFLSKYQDIIIEHQKVVKGNQKRLESLRELAGKENLEYPSVTLPPQPHTKEGVDAYNEVIARVRMWVNLNLWQKLKLSRDDAKPLLRLKGFPSFPLVERQANEVDWWDMVCNVKKLINEKKEDGKVFWQNLAGYKRQEALRPYLSSEEDRKKGKKFARYQLGDLLLHLEKKHGEDWGKVYDEAWERIDKKVEGLSKHIKLEEERRSEDAQSKAALTDWLRAKASFVIEGLKEADKDEFCRCELKLQKWYGDLRGKPFAIEAENSILDISGFSKQYNCAFIWQKDGVKKLNLYLIINYFKGGKLRFKKIKPEAFEANRFYTVINKKSGEIVPMEVNFNFDDPNLIILPLAFGKRQGREFIWNDLLSLETGSLKLANGRVIEKTLYNRRTRQDEPALFVALTFERREVLDSSNIKPMSNLIGVDRGENIPAVIALTDPEGCPLSRFKDSLGNPTHILRIGESYKEKQRTIQAKKEVEQRRAGGYSRKYASKAKNLADDMVRNTARDLLYYAVTQDAMLIFENLSRGFGRQGKRTFMAERQYTRMEDWLTAKLAYEGLPSKTYLSKTLAQYTSKTCSNCGFTITSADYDRVLEKLKKTATGWMTTINGKELKVEGQITYYNRYKRQNVVKDLSVELDRLSEESVNNDISSWTKGRSGEALSLLKKRFSHRPVQEKFVCLNCGFETHADEQAALNIARSWLFLRSQEYKKYQTNKTTGNTDKRAFVETWQSFYRKKLKEVWKPAV

SEQ ID NO: 33910 - protein, 978 aa, synthetic construct
  REGION 1..978: note = engineered CasX variant
QEIKRINKIRRRLVKDSNTKKAGKTGPMKTLLVRVMTPDLRERLENLRKKPPNIPQPISNTSRANLNKLLTDYTEMKKAILHVYWEEFQKDPVGLMSRVAQPASKKIDQNKLKPEMDEKGNLTTAGFACSQCGQPLFVYKLEQVSEKGKAYTNYFGRCNVAEHEKLILLAQLKPEKDSDEAVTYSLGKFGQRALDFYSIHVTKESTHPVKPLAQIAGNRYASPVGKALSDACMGTIASFLSKYQDIIIEHQKVVKGNQKRLESLRELAGKENLEYPSVTLPPQPHTKEGVDAYNEVIARVRMWVNLNLWQKLKLSRDDAKPLLRLKGFPSFPLVERQANEVDWWDMVCNVKKLINEKKEDGKVFWQNLAGYKRQEALRPYLSSEEDRKKGKKFARYQLGDLLLHLEKKHGEDWGKVYDEAWERIDKKVEGLSKHIKLEEERRSEDAQSKAALTDWLRAKASFVIEGLKEADKDEFCRCELKLQKWYGDLRGKPFAIEAENSILDISGFSKQYNCAFIWQKDGVKKLNLYLIINYFKGGKLRFKKIKPEAFEANRFYTVINKKSGEIVPMEVNFNFDDPNLIILPLAFGKRQGREFIWNDLLSLETGSLKLANGRVIEKTLYNRRTRQDEPALFVALTFERREVLDSSNIKPMSNLIGVDRGENIPAVIALTDPEGCPLSRFKDSLGNPTHILRIGESYKEKQRTIQAKKEVEQRRAGGYSRKYASKAKNLADDMVRNTARDLLYYAVTQDAMLIFENLSRGFGRQGKRTFMAERQYTRMEDWLTAKLAYEGLPSKTYLSKTLAQYTSKTCSNCGFTITSADYDRVLEKLKKTATGWMTTINGKELKVEGQITYYNRYKRQNVVKDLSVELDRLSEESVNNDISSWTKGRSGEALSLLKKRFSHRPVQEKFVCLNCGFETHADEQAALNIARSWLFLRSQEYKKYQTNKTTGNTDKRAFVETWQSFYRKKLKEVWKPAV

SEQ ID NO: 33911 - protein, 978 aa, synthetic construct
  REGION 1..978: note = engineered CasX variant
QEIKRINKIRRRLVKDSNTKKAGKTGPMKTLLVRVMTPDLRERLENLRKKPPNIPQPISNTSRANLNKLLTDYTEMKKAILHVYWEEFQKDPVGLMSRVAQPASKKIDQNKLKPEMDEKGNLTTAGFACSQCGQPLFVYKLEQVSEKGKAYTNYFGRCNVAEHEKLILLAQLKPEKDSDEAVTYSLGKFGQRALDFYSIHVTKESTHPVKPLAQIAGNRYASYPVGKALSDACMGTIASFLSKYQDIIIEHQKVVKGNQKRLESLRELAGKENLEYPSVTLPPQPHTKEGVDAYNEVIARVRMWVNLNLWQKLKLSRDDAKPLLRLKGFPSFPLVERQANEVDWWDMVCNVKKLINEKKEDGKVFWQNLAGYKRQEALRPYLSSEEDRKKGKKFARYQLGDLLLHLEKKHGEDWGKVYDEAWERIDKKVEGLSKHIKLEEERRSEDAQSKAALTDWLRAKASFVIEGLKEADKDEFCRCELKLQKWYGDLRGKPFAIEAENSILDISGFSKQYNCAFIWQKDGVKKLNLYLIINYFKGGKLRFKKIKPEAFEANRFYTVINKKSGEIVPMEVNFNFDDPNLIILPLAFGKRQGREFIWNDLLSLETGSLKLANGRVIEKTLYNRRTRQDEPALFVALTFERREVLDSSNIKPMNLIGVDRGENIPAVIALTDPEGCPLSRFKDSLGNPTHILRIRESYKEKQRTIQAKKEVEQRRAGGYSRKYASKAKNLADDMVRNTARDLLYYAVTQDAMLIFENLSRGFGRQGKRTFMAERQYTRMEDWLTAKLAYEGLPSKTYLSKTLAQYTSKTCSNCGFTITSADYDRVLEKLKKTATGWMTTINGKELKVEGQITYYNRYKRQNVVKDLSVELDRLSEESVNNDISSWTKGRSGEALSLLKKRFSHRPVQEKFVCLNCGFETHADEQAALNIARSWLFLRSQEYKKYQTNKTTGNTDKRAFVETWQSFYRKKLKEVWKPAV

SEQ ID NO: 33912 - protein, 978 aa, synthetic construct
  REGION 1..978: note = engineered CasX variant
QEIKRINKIRRRLVKDSNTKKAGKTGPMKTLLVRVMTPDLRERLENLRKKPPNIPQPISNTSRANLNKLLTDYTEMKKAILHVYWEEFQKDPVGLMSRVAQPASKKIDQNKLKPEMDEKGNLTTAGFACSQCGQPLFVYKLEQVSEKGKAYTNYFGRCNVAEHEKLILLAQLKPEKDSDEAVTYSLGKFGQRALDFYSIHVTKESTHPVKPLAQIAGNRYASHPVGKALSDACMGTIASFLSKYQDIIIEHQKVVKGNQKRLESLRELAGKENLEYPSVTLPPQPHTKEGVDAYNEVIARVRMWVNLNLWQKLKLSRDDAKPLLRLKGFPSFPLVERQANEVDWWDMVCNVKKLINEKKEDGKVFWQNLAGYKRQEALRPYLSSEEDRKKGKKFARYQLGDLLLHLEKKHGEDWGKVYDEAWERIDKKVEGLSKHIKLEEERRSEDAQSKAALTDWLRAKASFVIEGLKEADKDEFCRCELKLQKWYGDLRGKPFAIEAENSILDISGFSKQYNCAFIWQKDGVKKLNLYLIINYFKGGKLRFKKIKPEAFEANRFYTVINKKSGEIVPMEVNFNFDDPNLIILPLAFGKRQGREFIWNDLLSLETGSLKLANGRVIEKTLYNRRTRQDEPALFVALTFERREVLDSSNIKPMNLIGVDRGENIPAVIALTDPEGCPLSRFKDSLGNPTHILRIRESYKEKQRTIQAKKEVEQRRAGGYSRKYASKAKNLADDMVRNTARDLLYYAVTQDAMLIFENLSRGFGRQGKRTFMAERQYTRMEDWLTAKLAYEGLPSKTYLSKTLAQYTSKTCSNCGFTITSADYDRVLEKLKKTATGWMTTINGKELKVEGQITYYNRYKRQNVVKDLSVELDRLSEESVNNDISSWTKGRSGEALSLLKKRFSHRPVQEKFVCLNCGFETHADEQAALNIARSWLFLRSQEYKKYQTNKTTGNTDKRAFVETWQSFYRKKLKEVWKPAV

SEQ ID NO: 33913 - protein, 978 aa, synthetic construct
  REGION 1..978: note = engineered CasX variant
QEIKRINKIRRRLVKDSNTKKAGKTGPMKTLLVRVMTPDLRERLENLRKKPPNIPQPISNTSRANLNKLLTDYTEMKKAILHVYWEEFQKDPVGLMSRVAQPASKKIDQNKLKPEMDEKGNLTTAGFACSQCGQPLFVYKLEQVSEKGKAYTNYFGRCNVAEHEKLILLAQLKPEKDSDEAVTYSLGKFGQRALDFYSIHVTKESTHPVKPLAQIAGNRYASSPVGKALSDACMGTIASFLSKYQDIIIEHQKVVKGNQKRLESLRELAGKENLEYPSVTLPPQPHTKEGVDAYNEVIARVRMWVNLNLWQKLKLSRDDAKPLLRLKGFPSFPLVERQANEVDWWDMVCNVKKLINEKKEDGKVFWQNLAGYKRQEALRPYLSSEEDRKKGKKFARYQLGDLLLHLEKKHGEDWGKVYDEAWERIDKKVEGLSKHIKLEEERRSEDAQSKAALTDWLRAKASFVIEGLKEADKDEFCRCELKLQKWYGDLRGKPFAIEAENSILDISGFSKQYNCAFIWQKDGVKKLNLYLIINYFKGGKLRFKKIKPEAFEANRFYTVINKKSGEIVPMEVNFNFDDPNLIILPLAFGKRQGREFIWNDLLSLETGSLKLANGRVIEKTLYNRRTRQDEPALFVALTFERREVLDSSNIKPMNLIGVDRGENIPAVIALTDPEGCPLSRFKDSLGNPTHILRIRESYKEKQRTIQAKKEVEQRRAGGYSRKYASKAKNLADDMVRNTARDLLYYAVTQDAMLIFENLSRGFGRQGKRTFMAERQYTRMEDWLTAKLAYEGLPSKTYLSKTLAQYTSKTCSNCGFTITSADYDRVLEKLKKTATGWMTTINGKELKVEGQITYYNRYKRQNVVKDLSVELDRLSEESVNNDISSWTKGRSGEALSLLKKRFSHRPVQEKFVCLNCGFETHADEQAALNIARSWLFLRSQEYKKYQTNKTTGNTDKRAFVETWQSFYRKKLKEVWKPAV

SEQ ID NO: 33914 - protein, 978 aa, synthetic construct
  REGION 1..978: note = engineered CasX variant
QEIKRINKIRRRLVKDSNTKKAGKTGPMKTLLVRVMTPDLRERLENLRKKPPNIPQPISNTSRANLNKLLTDYTEMKKAILHVYWEEFQKDPVGLMSRVAQPASKKIDQNKLKPEMDEKGNLTTAGFACSQCGQPLFVYKLEQVSEKGKAYTNYFGRCNVAEHEKLILLAQLKPEKDSDEAVTYSLGKFGQRALDFYSIHVTKESTHPVKPLAQIAGNRYASTPVGKALSDACMGTIASFLSKYQDIIIEHQKVVKGNQKRLESLRELAGKENLEYPSVTLPPQPHTKEGVDAYNEVIARVRMWVNLNLWQKLKLSRDDAKPLLRLKGFPSFPLVERQANEVDWWDMVCNVKKLINEKKEDGKVFWQNLAGYKRQEALRPYLSSEEDRKKGKKFARYQLGDLLLHLEKKHGEDWGKVYDEAWERIDKKVEGLSKHIKLEEERRSEDAQSKAALTDWLRAKASFVIEGLKEADKDEFCRCELKLQKWYGDLRGKPFAIEAENSILDISGFSKQYNCAFIWQKDGVKKLNLYLIINYFKGGKLRFKKIKPEAFEANRFYTVINKKSGEIVPMEVNFNFDDPNLIILPLAFGKRQGREFIWNDLLSLETGSLKLANGRVIEKTLYNRRTRQDEPALFVALTFERREVLDSSNIKPMNLIGVDRGENIPAVIALTDPEGCPLSRFKDSLGNPTHILRIRESYKEKQRTIQAKKEVEQRRAGGYSRKYASKAKNLADDMVRNTARDLLYYAVTQDAMLIFENLSRGFGRQGKRTFMAERQYTRMEDWLTAKLAYEGLPSKTYLSKTLAQYTSKTCSNCGFTITSADYDRVLEKLKKTATGWMTTINGKELKVEGQITYYNRYKRQNVVKDLSVELDRLSEESVNNDISSWTKGRSGEALSLLKKRFSHRPVQEKFVCLNCGFETHADEQAALNIARSWLFLRSQEYKKYQTNKTTGNTDKRAFVETWQSFYRKKLKEVWKPAV

SEQ ID NO: 33915 - protein, 978 aa, synthetic construct
  REGION 1..978: note = engineered CasX variant
QEIKRINKIRRRLVKDSNTKKAGKTGPMKTLLVRVMTPDLRERLENLRKKPPNIPQPISNTSRANLNKLLTDYTEMKKAILHVYWEEFQKDPVGLMSRVAQPASKKIDQNKLKPEMDEKGNLTTAGFACSQCGQPLFVYKLEQVSEKGKAYTNYFGRCNVAEHEKLILLAQLKPEKDSDEAVTYSLGKFGQRALDFYSIHVTKESTHPVKPLAQIAGNRYASAPVGKALSDACMGTIASFLSKYQDIIIEHQKVVKGNQKRLESLRELAGKENLEYPSVTLPPQPHTKEGVDAYNEVIARVRMWVNLNLWQKLKLSRDDAKPLLRLKGFPSFPLVERQANEVDWWDMVCNVKKLINEKKEDGKVFWQNLAGYKRQEALRPYLSSEEDRKKGKKFARYQLGDLLLHLEKKHGEDWGKVYDEAWERIDKKVEGLSKHIKLEEERRSEDAQSKAALTDWLRAKASFVIEGLKEADKDEFCRCELKLQKWYGDLRGKPFAIEAENSILDISGFSKQYNCAFIWQKDGVKKLNLYLIINYFKGGKLRFKKIKPEAFEANRFYTVINKKSGEIVPMEVNFNFDDPNLIILPLAFGKRQGREFIWNDLLSLETGSLKLANGRVIEKTLYNRRTRQDEPALFVALTFERREVLDSSNIKPMNLIGVDRGENIPAVIALTDPEGCPLSRFKDSLGNPTHILRIRESYKEKQRTIQAKKEVEQRRAGGYSRKYASKAKNLADDMVRNTARDLLYYAVTQDAMLIFENLSRGFGRQGKRTFMAERQYTRMEDWLTAKLAYEGLPSKTYLSKTLAQYTSKTCSNCGFTITSADYDRVLEKLKKTATGWMTTINGKELKVEGQITYYNRYKRQNVVKDLSVELDRLSEESVNNDISSWTKGRSGEALSLLKKRFSHRPVQEKFVCLNCGFETHADEQAALNIARSWLFLRSQEYKKYQTNKTTGNTDKRAFVETWQSFYRKKLKEVWKPAV

SEQ ID NO: 33916 - protein, 978 aa, synthetic construct
  REGION 1..978: note = engineered CasX variant
QEIKRINKIRRRLVKDSNTKKAGKTGPMKTLLVRVMTPDLRERLENLRKKPPNIPQPISNTSRANLNKLLTDYTEMKKAILHVYWEEFQKDPVGLMSRVAQPASKKIDQNKLKPEMDEKGNLTTAGFACSQCGQPLFVYKLEQVSEKGKAYTNYFGRCNVAEHEKLILLAQLKPEKDSDEAVTYSLGKFGQRALDFYSIHVTKESTHPVKPLAQIAGNRYASVPVGKALSDACMGTIASFLSKYQDIIIEHQKVVKGNQKRLESLRELAGKENLEYPSVTLPPQPHTKEGVDAYNEVIARVRMWVNLNLWQKLKLSRDDAKPLLRLKGFPSFPLVERQANEVDWWDMVCNVKKLINEKKEDGKVFWQNLAGYKRQEALRPYLSSEEDRKKGKKFARYQLGDLLLHLEKKHGEDWGKVYDEAWERIDKKVEGLSKHIKLEEERRSEDAQSKAALTDWLRAKASFVIEGLKEADKDEFCRCELKLQKWYGDLRGKPFAIEAENSILDISGFSKQYNCAFIWQKDGVKKLNLYLIINYFKGGKLRFKKIKPEAFEANRFYTVINKKSGEIVPMEVNFNFDDPNLIILPLAFGKRQGREFIWNDLLSLETGSLKLANGRVIEKTLYNRRTRQDEPALFVALTFERREVLDSSNIKPMNLIGVDRGENIPAVIALTDPEGCPLSRFKDSLGNPTHILRIRESYKEKQRTIQAKKEVEQRRAGGYSRKYASKAKNLADDMVRNTARDLLYYAVTQDAMLIFENLSRGFGRQGKRTFMAERQYTRMEDWLTAKLAYEGLPSKTYLSKTLAQYTSKTCSNCGFTITSADYDRVLEKLKKTATGWMTTINGKELKVEGQITYYNRYKRQNVVKDLSVELDRLSEESVNNDISSWTKGRSGEALSLLKKRFSHRPVQEKFVCLNCGFETHADEQAALNIARSWLFLRSQEYKKYQTNKTTGNTDKRAFVETWQSFYRKKLKEVWKPAV

SEQ ID NO: 33917 - protein, 978 aa, synthetic construct
  REGION 1..978: note = engineered CasX variant
QEIKRINKIRRRLVKDSNTKKAGKTGPMKTLLVRVMTPDLRERLENLRKKPPNIPQPISNTSRANLNKLLTDYTEMKKAILHVYWEEFQKDPVGLMSRVAQPASKKIDQNKLKPEMDEKGNLTTAGFACSQCGQPLFVYKLEQVSEKGKAYTNYFGRCNVAEHEKLIKLAQLKPEKDSDEAVTYSLGKFGQRALDFYSIHVTKESTHPVKPLAQIAGNRYASGPVGKALSDACMGTIASFLSKYQDIIIEHQKVVKGNQKRLESLRELAGKENLEYPSVTLPPQPHTKEGVDAYNEVIARVRMWVNLNLWQKLKLSRDDAKPLLRLKGFPSFPLVERQANEVDWWDMVCNVKKLINEKKEDGKVFWQNLAGYKRQEALRPYLSSEEDRKKGKKFARYQLGDLLLHLEKKHGEDWGKVYDEAWERIDKKVEGLSKHIKLEEERRSEDAQSKAALTDWLRAKASFVIEGLKEADKDEFCRCELKLQKWYGDLRGKPFAIEAENSILDISGFSKQYNCAFIWQKDGVKKLNLYLIINYFKGGKLRFKKIKPEAFEANRFYTVINKKSGEIVPMEVNFNFDDPNLIILPLAFGKRQGREFIWNDLLSLETGSLKLANGRVIEKTLYNRRTRQDEPALFVALTFERREVLDSSNIKPMNLIGVDRGENIPAVIALTDPEGCPLSRFKDSLGNPTHILRIRESYKEKQRTIQAKKEVEQRRAGGYSRKYASKAKNLADDMVRNTARDLLYYAVTQDAMLIFENLSRGFGRQGKRTFMAERQYTRMEDWLTAKLAYEGLPSKTYLSKTLAQYTSKTCSNCGFTITSADYDRVLEKLKKTATGWMTTINGKELKVEGQITYYNRYKRQNVVKDLSVELDRLSEESVNNDISSWTKGRSGEALSLLKKRFSHRPVQEKFVCLNCGFETHADEQAALNIARSWLFLRSQEYKKYQTNKTTGNTDKRAFVETWQSFYRKKLKEVWKPAV

SEQ ID NO: 33918 - protein, 977 aa, synthetic construct
  REGION 1..977: note = engineered CasX variant
QEIKRINKIRRRLVKDSNTKKAGKTGPMKTLLVRVMTPDLRERLENLRKKPPNIPQPISNTSRANLNKLLTDYTEMKKAILHVYWEEFQKDPVGLMSRVAQPASKKIDQNKLKPEMDEKGNLTTAGFACSQCGQPLFVYKLEQVSEKGKAYTNYFGRCNVAEHEKLILLAQLKPEKDSDEAVTYSLGKFGQRALDFYSIHVTKESTHPVKPLAQIAGNRYASPVGKALSDACMGTIASFLSKYQDIIIEHQKVVKGNQKRLESLRELAGKENLEYPSVTLPPQPHTKEGVDAYNEVIARVRMWVNLNLWQKLKLSRDDAKPLLRLKGFPSFPLVERQANEVDWWDMVCNVKKLINEKKEDGKVFWQNLAGYKRQEALRPYLSSEEDRKKGKKFARYQLGDLLLHLEKKHGEDWGKVYDEAWERIDKKVEGLSKHIKLEEERRSEDAQSKAALTDWLRAKASFVIEGLKEADKDEFCRCELKLQKWYGDLRGKPFAIEAENSILDISGFSKQYNCAFIWQKDGVKKLNLYLIINYFKGGKLRFKKIKPEAFEANRFYTVINKKSGEIVPMEVNFNFDDPNLIILPLAFGKRQGREFIWNDLLSLETGSLKLANGRVIEKTLYNRRTRQDEPALFVALTFERREVLDSSNIKPMNLIGVDRGENIPAVIALTDPEGCPLSRFKDSLGNPTHILRIRESYKEKQRTIQAKKEVEQRRAGGYSRKYASKAKNLADDMVRNTARDLLYYAVTQDAMLIFENLSRGFGRQGKRTFMAERQYTRMEDWLTAKLAYEGLPSKTYLSKTLAQYTSKTCSNCGFTITSADYDRVLEKLKKTATGWMTTINGKELKVEGQITYYNRYKRQNVVKDLSVELDRLSEESVNNDISSWTKGRSGEALSLLKKRFSHRPVQEKFVCLNCGFETHADEQAALNIARSWLFLRSQEYKKYQTNKTTGNTDKRAFVETWQSFYRKKLKEVWKPAV

SEQ ID NO: 33919 - protein, 978 aa, synthetic construct
  REGION 1..978: note = engineered CasX variant
QEIKRINKIRRRLVKDSNTKKAGKTGPMKTLLVRVMTPDLRERLENLRKKPPNIPQPISNTSRANLNKLLTDYTEMKKAILHVYWEEFQKDPVGLMSRVAQPASKKIDQNKLKPEMDEKGNLTTAGFACSQCGQPLFVYKLEQVSEKGKAYTNYFGRCNVAEHEKLILLAQLKPEKDSDEAVTYSLGKFGQRALDFYSIHVTKESTHPVKPLAQIAGNRYASYPVGKALSDACMGTIASFLSKYQDIIIEHQKVVKGNQKRLESLRELAGKENLEYPSVTLPPQPHTKEGVDAYNEVIARVRMWVNLNLWQKLKLSRDDAKPLLRLKGFPSFPLVERQANEVDWWDMVCNVKKLINEKKEDGKVFWQNLAGYKRQEALRPYLSSEEDRKKGKKFARYQLGDLLLHLEKKHGEDWGKVYDEAWERIDKKVEGLSKHIKLEEERRSEDAQSKAALTDWLRAKASFVIEGLKEADKDEFCRCELKLQKWYGDLRGKPFAIEAENSILDISGFSKQYNCAFIWQKDGVKKLNLYLIINYFKGGKLRFKKIKPEAFEANRFYTVINKKSGEIVPMEVNFNFDDPNLIILPLAFGKRQGREFIWNDLLSLETGSLKLANGRVIEKTLYNRRTRQDEPALFVALTFERREVLDSSNIKPMNLIGVDRGENIPAVIALTDPEGCPLSRFKDSLGNPTHILRIGESYKEKQRTIQAKKEVEQRRAGGYSRKYASKAKNLADDMVRNTARDLLYYAVTQDAMLIFENLSRGFGRQGKRTFSAERQYTRMEDWLTAKLAYEGLPSKTYLSKTLAQYTSKTCSNCGFTITSADYDRVLEKLKKTATGWMTTINGKELKVEGQITYYNRYKRQNVVKDLSVELDRLSEESVNNDISSWTKGRSGEALSLLKKRFSHRPVQEKFVCLNCGFETHADEQAALNIARSWLFLRSQEYKKYQTNKTTGNTDKRAFVETWQSFYRKKLKEVWKPAV

SEQ ID NO: 33920 - protein, 978 aa, synthetic construct
  REGION 1..978: note = engineered CasX variant
QEIKRINKIRRRLVKDSNTKKAGKTGPMKTLLVRVMTPDLRERLENLRKKPPNIPQPISNTSRANLNKLLTDYTEMKKAILHVYWEEFQKDPVGLMSRVAQPASKKIDQNKLKPEMDEKGNLTTAGFACSQCGQPLFVYKLEQVSEKGKAYTNYFGRCNVAEHEKLILLAQLKPEKDSDEAVTYSLGKFGQRALDFYSIHVTKESTHPVKPLAQIAGNRYASHPVGKALSDACMGTIASFLSKYQDIIIEHQKVVKGNQKRLESLRELAGKENLEYPSVTLPPQPHTKEGVDAYNEVIARVRMWVNLNLWQKLKLSRDDAKPLLRLKGFPSFPLVERQANEVDWWDMVCNVKKLINEKKEDGKVFWQNLAGYKRQEALRPYLSSEEDRKKGKKFARYQLGDLLLHLEKKHGEDWGKVYDEAWERIDKKVEGLSKHIKLEEERRSEDAQSKAALTDWLRAKASFVIEGLKEADKDEFCRCELKLQKWYGDLRGKPFAIEAENSILDISGFSKQYNCAFIWQKDGVKKLNLYLIINYFKGGKLRFKKIKPEAFEANRFYTVINKKSGEIVPMEVNFNFDDPNLIILPLAFGKRQGREFIWNDLLSLETGSLKLANGRVIEKTLYNRRTRQDEPALFVALTFERREVLDSSNIKPMNLIGVDRGENIPAVIALTDPEGCPLSRFKDSLGNPTHILRIGESYKEKQRTIQAKKEVEQRRAGGYSRKYASKAKNLADDMVRNTARDLLYYAVTQDAMLIFENLSRGFGRQGKRTFSAERQYTRMEDWLTAKLAYEGLPSKTYLSKTLAQYTSKTCSNCGFTITSADYDRVLEKLKKTATGWMTTINGKELKVEGQITYYNRYKRQNVVKDLSVELDRLSEESVNNDISSWTKGRSGEALSLLKKRFSHRPVQEKFVCLNCGFETHADEQAALNIARSWLFLRSQEYKKYQTNKTTGNTDKRAFVETWQSFYRKKLKEVWKPAV

SEQ ID NO: 33921 - protein, 978 aa, synthetic construct
  REGION 1..978: note = engineered CasX variant
QEIKRINKIRRRLVKDSNTKKAGKTGPMKTLLVRVMTPDLRERLENLRKKPPNIPQPISNTSRANLNKLLTDYTEMKKAILHVYWEEFQKDPVGLMSRVAQPASKKIDQNKLKPEMDEKGNLTTAGFACSQCGQPLFVYKLEQVSEKGKAYTNYFGRCNVAEHEKLILLAQLKPEKDSDEAVTYSLGKFGQRALDFYSIHVTKESTHPVKPLAQIAGNRYASSPVGKALSDACMGTIASFLSKYQDIIIEHQKVVKGNQKRLESLRELAGKENLEYPSVTLPPQPHTKEGVDAYNEVIARVRMWVNLNLWQKLKLSRDDAKPLLRLKGFPSFPLVERQANEVDWWDMVCNVKKLINEKKEDGKVFWQNLAGYKRQEALRPYLSSEEDRKKGKKFARYQLGDLLLHLEKKHGEDWGKVYDEAWERIDKKVEGLSKHIKLEEERRSEDAQSKAALTDWLRAKASFVIEGLKEADKDEFCRCELKLQKWYGDLRGKPFAIEAENSILDISGFSKQYNCAFIWQKDGVKKLNLYLIINYFKGGKLRFKKIKPEAFEANRFYTVINKKSGEIVPMEVNFNFDDPNLIILPLAFGKRQGREFIWNDLLSLETGSLKLANGRVIEKTLYNRRTRQDEPALFVALTFERREVLDSSNIKPMNLIGVDRGENIPAVIALTDPEGCPLSRFKDSLGNPTHILRIGESYKEKQRTIQAKKEVEQRRAGGYSRKYASKAKNLADDMVRNTARDLLYYAVTQDAMLIFENLSRGFGRQGKRTFSAERQYTRMEDWLTAKLAYEGLPSKTYLSKTLAQYTSKTCSNCGFTITSADYDRVLEKLKKTATGWMTTINGKELKVEGQITYYNRYKRQNVVKDLSVELDRLSEESVNNDISSWTKGRSGEALSLLKKRFSHRPVQEKFVCLNCGFETHADEQAALNIARSWLFLRSQEYKKYQTNKTTGNTDKRAFVETWQSFYRKKLKEVWKPAV

SEQ ID NO: 33922 - protein, 978 aa, synthetic construct
  REGION 1..978: note = engineered CasX variant
QEIKRINKIRRRLVKDSNTKKAGKTGPMKTLLVRVMTPDLRERLENLRKKPPNIPQPISNTSRANLNKLLTDYTEMKKAILHVYWEEFQKDPVGLMSRVAQPASKKIDQNKLKPEMDEKGNLTTAGFACSQCGQPLFVYKLEQVSEKGKAYTNYFGRCNVAEHEKLILLAQLKPEKDSDEAVTYSLGKFGQRALDFYSIHVTKESTHPVKPLAQIAGNRYASTPVGKALSDACMGTIASFLSKYQDIIIEHQKVVKGNQKRLESLRELAGKENLEYPSVTLPPQPHTKEGVDAYNEVIARVRMWVNLNLWQKLKLSRDDAKPLLRLKGFPSFPLVERQANEVDWWDMVCNVKKLINEKKEDGKVFWQNLAGYKRQEALRPYLSSEEDRKKGKKFARYQLGDLLLHLEKKHGEDWGKVYDEAWERIDKKVEGLSKHIKLEEERRSEDAQSKAALTDWLRAKASFVIEGLKEADKDEFCRCELKLQKWYGDLRGKPFAIEAENSILDISGFSKQYNCAFIWQKDGVKKLNLYLIINYFKGGKLRFKKIKPEAFEANRFYTVINKKSGEIVPMEVNFNFDDPNLIILPLAFGKRQGREFIWNDLLSLETGSLKLANGRVIEKTLYNRRTRQDEPALFVALTFERREVLDSSNIKPMNLIGVDRGENIPAVIALTDPEGCPLSRFKDSLGNPTHILRIGESYKEKQRTIQAKKEVEQRRAGGYSRKYASKAKNLADDMVRNTARDLLYYAVTQDAMLIFENLSRGFGRQGKRTFSAERQYTRMEDWLTAKLAYEGLPSKTYLSKTLAQYTSKTCSNCGFTITSADYDRVLEKLKKTATGWMTTINGKELKVEGQITYYNRYKRQNVVKDLSVELDRLSEESVNNDISSWTKGRSGEALSLLKKRFSHRPVQEKFVCLNCGFETHADEQAALNIARSWLFLRSQEYKKYQTNKTTGNTDKRAFVETWQSFYRKKLKEVWKPAV

SEQ ID NO: 33923 - protein, 978 aa, synthetic construct
  REGION 1..978: note = engineered CasX variant
QEIKRINKIRRRLVKDSNTKKAGKTGPMKTLLVRVMTPDLRERLENLRKKPPNIPQPISNTSRANLNKLLTDYTEMKKAILHVYWEEFQKDPVGLMSRVAQPASKKIDQNKLKPEMDEKGNLTTAGFACSQCGQPLFVYKLEQVSEKGKAYTNYFGRCNVAEHEKLILLAQLKPEKDSDEAVTYSLGKFGQRALDFYSIHVTKESTHPVKPLAQIAGNRYASAPVGKALSDACMGTIASFLSKYQDIIIEHQKVVKGNQKRLESLRELAGKENLEYPSVTLPPQPHTKEGVDAYNEVIARVRMWVNLNLWQKLKLSRDDAKPLLRLKGFPSFPLVERQANEVDWWDMVCNVKKLINEKKEDGKVFWQNLAGYKRQEALRPYLSSEEDRKKGKKFARYQLGDLLLHLEKKHGEDWGKVYDEAWERIDKKVEGLSKHIKLEEERRSEDAQSKAALTDWLRAKASFVIEGLKEADKDEFCRCELKLQKWYGDLRGKPFAIEAENSILDISGFSKQYNCAFIWQKDGVKKLNLYLIINYFKGGKLRFKKIKPEAFEANRFYTVINKKSGEIVPMEVNFNFDDPNLIILPLAFGKRQGREFIWNDLLSLETGSLKLANGRVIEKTLYNRRTRQDEPALFVALTFERREVLDSSNIKPMNLIGVDRGENIPAVIALTDPEGCPLSRFKDSLGNPTHILRIGESYKEKQRTIQAKKEVEQRRAGGYSRKYASKAKNLADDMVRNTARDLLYYAVTQDAMLIFENLSRGFGRQGKRTFSAERQYTRMEDWLTAKLAYEGLPSKTYLSKTLAQYTSKTCSNCGFTITSADYDRVLEKLKKTATGWMTTINGKELKVEGQITYYNRYKRQNVVKDLSVELDRLSEESVNNDISSWTKGRSGEALSLLKKRFSHRPVQEKFVCLNCGFETHADEQAALNIARSWLFLRSQEYKKYQTNKTTGNTDKRAFVETWQSFYRKKLKEVWKPAV

SEQ ID NO: 33924 - protein, 978 aa, synthetic construct
  REGION 1..978: note = engineered CasX variant
QEIKRINKIRRRLVKDSNTKKAGKTGPMKTLLVRVMTPDLRERLENLRKKPPNIPQPISNTSRANLNKLLTDYTEMKKAILHVYWEEFQKDPVGLMSRVAQPASKKIDQNKLKPEMDEKGNLTTAGFACSQCGQPLFVYKLEQVSEKGKAYTNYFGRCNVAEHEKLILLAQLKPEKDSDEAVTYSLGKFGQRALDFYSIHVTKESTHPVKPLAQIAGNRYASVPVGKALSDACMGTIASFLSKYQDIIIEHQKVVKGNQKRLESLRELAGKENLEYPSVTLPPQPHTKEGVDAYNEVIARVRMWVNLNLWQKLKLSRDDAKPLLRLKGFPSFPLVERQANEVDWWDMVCNVKKLINEKKEDGKVFWQNLAGYKRQEALRPYLSSEEDRKKGKKFARYQLGDLLLHLEKKHGEDWGKVYDEAWERIDKKVEGLSKHIKLEEERRSEDAQSKAALTDWLRAKASFVIEGLKEADKDEFCRCELKLQKWYGDLRGKPFAIEAENSILDISGFSKQYNCAFIWQKDGVKKLNLYLIINYFKGGKLRFKKIKPEAFEANRFYTVINKKSGEIVPMEVNFNFDDPNLIILPLAFGKRQGREFIWNDLLSLETGSLKLANGRVIEKTLYNRRTRQDEPALFVALTFERREVLDSSNIKPMNLIGVDRGENIPAVIALTDPEGCPLSRFKDSLGNPTHILRIGESYKEKQRTIQAKKEVEQRRAGGYSRKYASKAKNLADDMVRNTARDLLYYAVTQDAMLIFENLSRGFGRQGKRTFSAERQYTRMEDWLTAKLAYEGLPSKTYLSKTLAQYTSKTCSNCGFTITSADYDRVLEKLKKTATGWMTTINGKELKVEGQITYYNRYKRQNVVKDLSVELDRLSEESVNNDISSWTKGRSGEALSLLKKRFSHRPVQEKFVCLNCGFETHADEQAALNIARSWLFLRSQEYKKYQTNKTTGNTDKRAFVETWQSFYRKKLKEVWKPAV

SEQ ID NO: 33925 - protein, 978 aa, synthetic construct
  REGION 1..978: note = engineered CasX variant
QEIKRINKIRRRLVKDSNTKKAGKTGPMKTLLVRVMTPDLRERLENLRKKPPNIPQPISNTSRANLNKLLTDYTEMKKAILHVYWEEFQKDPVGLMSRVAQPASKKIDQNKLKPEMDEKGNLTTAGFACSQCGQPLFVYKLEQVSEKGKAYTNYFGRCNVAEHEKLIKLAQLKPEKDSDEAVTYSLGKFGQRALDFYSIHVTKESTHPVKPLAQIAGNRYASGPVGKALSDACMGTIASFLSKYQDIIIEHQKVVKGNQKRLESLRELAGKENLEYPSVTLPPQPHTKEGVDAYNEVIARVRMWVNLNLWQKLKLSRDDAKPLLRLKGFPSFPLVERQANEVDWWDMVCNVKKLINEKKEDGKVFWQNLAGYKRQEALRPYLSSEEDRKKGKKFARYQLGDLLLHLEKKHGEDWGKVYDEAWERIDKKVEGLSKHIKLEEERRSEDAQSKAALTDWLRAKASFVIEGLKEADKDEFCRCELKLQKWYGDLRGKPFAIEAENSILDISGFSKQYNCAFIWQKDGVKKLNLYLIINYFKGGKLRFKKIKPEAFEANRFYTVINKKSGEIVPMEVNFNFDDPNLIILPLAFGKRQGREFIWNDLLSLETGSLKLANGRVIEKTLYNRRTRQDEPALFVALTFERREVLDSSNIKPMNLIGVDRGENIPAVIALTDPEGCPLSRFKDSLGNPTHILRIGESYKEKQRTIQAKKEVEQRRAGGYSRKYASKAKNLADDMVRNTARDLLYYAVTQDAMLIFENLSRGFGRQGKRTFSAERQYTRMEDWLTAKLAYEGLPSKTYLSKTLAQYTSKTCSNCGFTITSADYDRVLEKLKKTATGWMTTINGKELKVEGQITYYNRYKRQNVVKDLSVELDRLSEESVNNDISSWTKGRSGEALSLLKKRFSHRPVQEKFVCLNCGFETHADEQAALNIARSWLFLRSQEYKKYQTNKTTGNTDKRAFVETWQSFYRKKLKEVWKPAV

SEQ ID NO: 33926 - protein, 977 aa, synthetic construct
  REGION 1..977: note = engineered CasX variant
QEIKRINKIRRRLVKDSNTKKAGKTGPMKTLLVRVMTPDLRERLENLRKKPPNIPQPISNTSRANLNKLLTDYTEMKKAILHVYWEEFQKDPVGLMSRVAQPASKKIDQNKLKPEMDEKGNLTTAGFACSQCGQPLFVYKLEQVSEKGKAYTNYFGRCNVAEHEKLILLAQLKPEKDSDEAVTYSLGKFGQRALDFYSIHVTKESTHPVKPLAQIAGNRYASPVGKALSDACMGTIASFLSKYQDIIIEHQKVVKGNQKRLESLRELAGKENLEYPSVTLPPQPHTKEGVDAYNEVIARVRMWVNLNLWQKLKLSRDDAKPLLRLKGFPSFPLVERQANEVDWWDMVCNVKKLINEKKEDGKVFWQNLAGYKRQEALRPYLSSEEDRKKGKKFARYQLGDLLLHLEKKHGEDWGKVYDEAWERIDKKVEGLSKHIKLEEERRSEDAQSKAALTDWLRAKASFVIEGLKEADKDEFCRCELKLQKWYGDLRGKPFAIEAENSILDISGFSKQYNCAFIWQKDGVKKLNLYLIINYFKGGKLRFKKIKPEAFEANRFYTVINKKSGEIVPMEVNFNFDDPNLIILPLAFGKRQGREFIWNDLLSLETGSLKLANGRVIEKTLYNRRTRQDEPALFVALTFERREVLDSSNIKPMNLIGVDRGENIPAVIALTDPEGCPLSRFKDSLGNPTHILRIGESYKEKQRTIQAKKEVEQRRAGGYSRKYASKAKNLADDMVRNTARDLLYYAVTQDAMLIFENLSRGFGRQGKRTFSAERQYTRMEDWLTAKLAYEGLPSKTYLSKTLAQYTSKTCSNCGFTITSADYDRVLEKLKKTATGWMTTINGKELKVEGQITYYNRYKRQNVVKDLSVELDRLSEESVNNDISSWTKGRSGEALSLLKKRFSHRPVQEKFVCLNCGFETHADEQAALNIARSWLFLRSQEYKKYQTNKTTGNTDKRAFVETWQSFYRKKLKEVWKPAV

SEQ ID NO: 33927 - protein, 978 aa, synthetic construct
  REGION 1..978: note = engineered CasX variant
QEIKRINKIRRRLVKDSNTKKAGKTGPMKTLLVRVMTPDLRERLENLRKKPPNIPQPISNTSRANLNKLLTDYTEMKKAILHVYWEEFQKDPVGLMSRVAQPASKKIDQNKLKPEMDEKGNLTTAGFACSQCGQPLFVYKLEQVSEKGKAYTNYFGRCNVAEHEKLILLAQLKPEKDSDEAVTYSLGKFGQRALDFYSIHVTKESTHPVKPLAQIAGNRYASYPVGKALSDACMGTIASFLSKYQDIIIEHQKVVKGNQKRLESLRELAGKENLEYPSVTLPPQPHTKEGVDAYNEVIARVRMWVNLNLWQKLKLSRDDAKPLLRLKGFPSFPLVERQANEVDWWDMVCNVKKLINEKKEDGKVFWQNLAGYKRQEALRPYLSSEEDRKKGKKFARYQLGDLLLHLEKKHGEDWGKVYDEAWERIDKKVEGLSKHIKLEEERRSEDAQSKAALTDWLRAKASFVIEGLKEADKDEFCRCELKLQKWYGDLRGKPFAIEAENSILDISGFSKQYNCAFIWQKDGVKKLNLYLIINYFKGGKLRFKKIKPEAFEANRFYTVINKKSGEIVPMEVNFNFDDPNLIILPLAFGKRQGREFIWNDLLSLETGSLKLANGRVIEKTLYNRRTRQDEPALFVALTFERREVLDSSNIKPMNLIGVDRGENIPAVIALTDPEGCPLSRFKDSLGNPTHILRIGESYKEKQRTIQAKKEVEQRRAGGYSRKYASKAKNLADDMVRNTARDLLYYAVTQDAMLIFENLSRGFGRQGKRTFMAERQYTRMEDWLTAKLAYEGLPSKTYLSKTLAQYTSKTCSNCGFTITSADYDRVLEKLKKTATGWMTTINGKELKVEGQITYYNRYKRQNVVKDLSVELDRLSEESVNNDISSWDKGRSGEALSLLKKRFSHRPVQEKFVCLNCGFETHADEQAALNIARSWLFLRSQEYKKYQTNKTTGNTDKRAFVETWQSFYRKKLKEVWKPAV

SEQ ID NO: 33928 - protein, 978 aa, synthetic construct
  REGION 1..978: note = engineered CasX variant
QEIKRINKIRRRLVKDSNTKKAGKTGPMKTLLVRVMTPDLRERLENLRKKPPNIPQPISNTSRANLNKLLTDYTEMKKAILHVYWEEFQKDPVGLMSRVAQPASKKIDQNKLKPEMDEKGNLTTAGFACSQCGQPLFVYKLEQVSEKGKAYTNYFGRCNVAEHEKLILLAQLKPEKDSDEAVTYSLGKFGQRALDFYSIHVTKESTHPVKPLAQIAGNRYASHPVGKALSDACMGTIASFLSKYQDIIIEHQKVVKGNQKRLESLRELAGKENLEYPSVTLPPQPHTKEGVDAYNEVIARVRMWVNLNLWQKLKLSRDDAKPLLRLKGFPSFPLVERQANEVDWWDMVCNVKKLINEKKEDGKVFWQNLAGYKRQEALRPYLSSEEDRKKGKKFARYQLGDLLLHLEKKHGEDWGKVYDEAWERIDKKVEGLSKHIKLEEERRSEDAQSKAALTDWLRAKASFVIEGLKEADKDEFCRCELKLQKWYGDLRGKPFAIEAENSILDISGFSKQYNCAFIWQKDGVKKLNLYLIINYFKGGKLRFKKIKPEAFEANRFYTVINKKSGEIVPMEVNFNFDDPNLIILPLAFGKRQGREFIWNDLLSLETGSLKLANGRVIEKTLYNRRTRQDEPALFVALTFERREVLDSSNIKPMNLIGVDRGENIPAVIALTDPEGCPLSRFKDSLGNPTHILRIGESYKEKQRTIQAKKEVEQRRAGGYSRKYASKAKNLADDMVRNTARDLLYYAVTQDAMLIFENLSRGFGRQGKRTFMAERQYTRMEDWLTAKLAYEGLPSKTYLSKTLAQYTSKTCSNCGFTITSADYDRVLEKLKKTATGWMTTINGKELKVEGQITYYNRYKRQNVVKDLSVELDRLSEESVNNDISSWDKGRSGEALSLLKKRFSHRPVQEKFVCLNCGFETHADEQAALNIARSWLFLRSQEYKKYQTNKTTGNTDKRAFVETWQSFYRKKLKEVWKPAV

SEQ ID NO: 33929 - protein, 978 aa, synthetic construct
  REGION 1..978: note = engineered CasX variant
QEIKRINKIRRRLVKDSNTKKAGKTGPMKTLLVRVMTPDLRERLENLRKKPPNIPQPISNTSRANLNKLLTDYTEMKKAILHVYWEEFQKDPVGLMSRVAQPASKKIDQNKLKPEMDEKGNLTTAGFACSQCGQPLFVYKLEQVSEKGKAYTNYFGRCNVAEHEKLILLAQLKPEKDSDEAVTYSLGKFGQRALDFYSIHVTKESTHPVKPLAQIAGNRYASSPVGKALSDACMGTIASFLSKYQDIIIEHQKVVKGNQKRLESLRELAGKENLEYPSVTLPPQPHTKEGVDAYNEVIARVRMWVNLNLWQKLKLSRDDAKPLLRLKGFPSFPLVERQANEVDWWDMVCNVKKLINEKKEDGKVFWQNLAGYKRQEALRPYLSSEEDRKKGKKFARYQLGDLLLHLEKKHGEDWGKVYDEAWERIDKKVEGLSKHIKLEEERRSEDAQSKAALTDWLRAKASFVIEGLKEADKDEFCRCELKLQKWYGDLRGKPFAIEAENSILDISGFSKQYNCAFIWQKDGVKKLNLYLIINYFKGGKLRFKKIKPEAFEANRFYTVINKKSGEIVPMEVNFNFDDPNLIILPLAFGKRQGREFIWNDLLSLETGSLKLANGRVIEKTLYNRRTRQDEPALFVALTFERREVLDSSNIKPMNLIGVDRGENIPAVIALTDPEGCPLSRFKDSLGNPTHILRIGESYKEKQRTIQAKKEVEQRRAGGYSRKYASKAKNLADDMVRNTARDLLYYAVTQDAMLIFENLSRGFGRQGKRTFMAERQYTRMEDWLTAKLAYEGLPSKTYLSKTLAQYTSKTCSNCGFTITSADYDRVLEKLKKTATGWMTTINGKELKVEGQITYYNRYKRQNVVKDLSVELDRLSEESVNNDISSWDKGRSGEALSLLKKRFSHRPVQEKFVCLNCGFETHADEQAALNIARSWLFLRSQEYKKYQTNKTTGNTDKRAFVETWQSFYRKKLKEVWKPAV

SEQ ID NO: 33930 - protein, 978 aa, synthetic construct
  REGION 1..978: note = engineered CasX variant
QEIKRINKIRRRLVKDSNTKKAGKTGPMKTLLVRVMTPDLRERLENLRKKPPNIPQPISNTSRANLNKLLTDYTEMKKAILHVYWEEFQKDPVGLMSRVAQPASKKIDQNKLKPEMDEKGNLTTAGFACSQCGQPLFVYKLEQVSEKGKAYTNYFGRCNVAEHEKLILLAQLKPEKDSDEAVTYSLGKFGQRALDFYSIHVTKESTHPVKPLAQIAGNRYASTPVGKALSDACMGTIASFLSKYQDIIIEHQKVVKGNQKRLESLRELAGKENLEYPSVTLPPQPHTKEGVDAYNEVIARVRMWVNLNLWQKLKLSRDDAKPLLRLKGFPSFPLVERQANEVDWWDMVCNVKKLINEKKEDGKVFWQNLAGYKRQEALRPYLSSEEDRKKGKKFARYQLGDLLLHLEKKHGEDWGKVYDEAWERIDKKVEGLSKHIKLEEERRSEDAQSKAALTDWLRAKASFVIEGLKEADKDEFCRCELKLQKWYGDLRGKPFAIEAENSILDISGFSKQYNCAFIWQKDGVKKLNLYLIINYFKGGKLRFKKIKPEAFEANRFYTVINKKSGEIVPMEVNFNFDDPNLIILPLAFGKRQGREFIWNDLLSLETGSLKLANGRVIEKTLYNRRTRQDEPALFVALTFERREVLDSSNIKPMNLIGVDRGENIPAVIALTDPEGCPLSRFKDSLGNPTHILRIGESYKEKQRTIQAKKEVEQRRAGGYSRKYASKAKNLADDMVRNTARDLLYYAVTQDAMLIFENLSRGFGRQGKRTFMAERQYTRMEDWLTAKLAYEGLPSKTYLSKTLAQYTSKTCSNCGFTITSADYDRVLEKLKKTATGWMTTINGKELKVEGQITYYNRYKRQNVVKDLSVELDRLSEESVNNDISSWDKGRSGEALSLLKKRFSHRPVQEKFVCLNCGFETHADEQAALNIARSWLFLRSQEYKKYQTNKTTGNTDKRAFVETWQSFYRKKLKEVWKPAV

SEQ ID NO: 33931 - protein, 978 aa, synthetic construct
  REGION 1..978: note = engineered CasX variant
QEIKRINKIRRRLVKDSNTKKAGKTGPMKTLLVRVMTPDLRERLENLRKKPPNIPQPISNTSRANLNKLLTDYTEMKKAILHVYWEEFQKDPVGLMSRVAQPASKKIDQNKLKPEMDEKGNLTTAGFACSQCGQPLFVYKLEQVSEKGKAYTNYFGRCNVAEHEKLILLAQLKPEKDSDEAVTYSLGKFGQRALDFYSIHVTKESTHPVKPLAQIAGNRYASAPVGKALSDACMGTIASFLSKYQDIIIEHQKVVKGNQKRLESLRELAGKENLEYPSVTLPPQPHTKEGVDAYNEVIARVRMWVNLNLWQKLKLSRDDAKPLLRLKGFPSFPLVERQANEVDWWDMVCNVKKLINEKKEDGKVFWQNLAGYKRQEALRPYLSSEEDRKKGKKFARYQLGDLLLHLEKKHGEDWGKVYDEAWERIDKKVEGLSKHIKLEEERRSEDAQSKAALTDWLRAKASFVIEGLKEADKDEFCRCELKLQKWYGDLRGKPFAIEAENSILDISGFSKQYNCAFIWQKDGVKKLNLYLIINYFKGGKLRFKKIKPEAFEANRFYTVINKKSGEIVPMEVNFNFDDPNLIILPLAFGKRQGREFIWNDLLSLETGSLKLANGRVIEKTLYNRRTRQDEPALFVALTFERREVLDSSNIKPMNLIGVDRGENIPAVIALTDPEGCPLSRFKDSLGNPTHILRIGESYKEKQRTIQAKKEVEQRRAGGYSRKYASKAKNLADDMVRNTARDLLYYAVTQDAMLIFENLSRGFGRQGKRTFMAERQYTRMEDWLTAKLAYEGLPSKTYLSKTLAQYTSKTCSNCGFTITSADYDRVLEKLKKTATGWMTTINGKELKVEGQITYYNRYKRQNVVKDLSVELDRLSEESVNNDISSWDKGRSGEALSLLKKRFSHRPVQEKFVCLNCGFETHADEQAALNIARSWLFLRSQEYKKYQTNKTTGNTDKRAFVETWQSFYRKKLKEVWKPAV

SEQ ID NO: 33932 - protein, 978 aa, synthetic construct
  REGION 1..978: note = engineered CasX variant
QEIKRINKIRRRLVKDSNTKKAGKTGPMKTLLVRVMTPDLRERLENLRKKPPNIPQPISNTSRANLNKLLTDYTEMKKAILHVYWEEFQKDPVGLMSRVAQPASKKIDQNKLKPEMDEKGNLTTAGFACSQCGQPLFVYKLEQVSEKGKAYTNYFGRCNVAEHEKLILLAQLKPEKDSDEAVTYSLGKFGQRALDFYSIHVTKESTHPVKPLAQIAGNRYASVPVGKALSDACMGTIASFLSKYQDIIIEHQKVVKGNQKRLESLRELAGKENLEYPSVTLPPQPHTKEGVDAYNEVIARVRMWVNLNLWQKLKLSRDDAKPLLRLKGFPSFPLVERQANEVDWWDMVCNVKKLINEKKEDGKVFWQNLAGYKRQEALRPYLSSEEDRKKGKKFARYQLGDLLLHLEKKHGEDWGKVYDEAWERIDKKVEGLSKHIKLEEERRSEDAQSKAALTDWLRAKASFVIEGLKEADKDEFCRCELKLQKWYGDLRGKPFAIEAENSILDISGFSKQYNCAFIWQKDGVKKLNLYLIINYFKGGKLRFKKIKPEAFEANRFYTVINKKSGEIVPMEVNFNFDDPNLIILPLAFGKRQGREFIWNDLLSLETGSLKLANGRVIEKTLYNRRTRQDEPALFVALTFERREVLDSSNIKPMNLIGVDRGENIPAVIALTDPEGCPLSRFKDSLGNPTHILRIGESYKEKQRTIQAKKEVEQRRAGGYSRKYASKAKNLADDMVRNTARDLLYYAVTQDAMLIFENLSRGFGRQGKRTFMAERQYTRMEDWLTAKLAYEGLPSKTYLSKTLAQYTSKTCSNCGFTITSADYDRVLEKLKKTATGWMTTINGKELKVEGQITYYNRYKRQNVVKDLSVELDRLSEESVNNDISSWDKGRSGEALSLLKKRFSHRPVQEKFVCLNCGFETHADEQAALNIARSWLFLRSQEYKKYQTNKTTGNTDKRAFVETWQSFYRKKLKEVWKPAV

SEQ ID NO: 33933 - protein, 978 aa, synthetic construct
  REGION 1..978: note = engineered CasX variant
QEIKRINKIRRRLVKDSNTKKAGKTGPMKTLLVRVMTPDLRERLENLRKKPPNIPQPISNTSRANLNKLLTDYTEMKKAILHVYWEEFQKDPVGLMSRVAQPASKKIDQNKLKPEMDEKGNLTTAGFACSQCGQPLFVYKLEQVSEKGKAYTNYFGRCNVAEHEKLIKLAQLKPEKDSDEAVTYSLGKFGQRALDFYSIHVTKESTHPVKPLAQIAGNRYASGPVGKALSDACMGTIASFLSKYQDIIIEHQKVVKGNQKRLESLRELAGKENLEYPSVTLPPQPHTKEGVDAYNEVIARVRMWVNLNLWQKLKLSRDDAKPLLRLKGFPSFPLVERQANEVDWWDMVCNVKKLINEKKEDGKVFWQNLAGYKRQEALRPYLSSEEDRKKGKKFARYQLGDLLLHLEKKHGEDWGKVYDEAWERIDKKVEGLSKHIKLEEERRSEDAQSKAALTDWLRAKASFVIEGLKEADKDEFCRCELKLQKWYGDLRGKPFAIEAENSILDISGFSKQYNCAFIWQKDGVKKLNLYLIINYFKGGKLRFKKIKPEAFEANRFYTVINKKSGEIVPMEVNFNFDDPNLIILPLAFGKRQGREFIWNDLLSLETGSLKLANGRVIEKTLYNRRTRQDEPALFVALTFERREVLDSSNIKPMNLIGVDRGENIPAVIALTDPEGCPLSRFKDSLGNPTHILRIGESYKEKQRTIQAKKEVEQRRAGGYSRKYASKAKNLADDMVRNTARDLLYYAVTQDAMLIFENLSRGFGRQGKRTFMAERQYTRMEDWLTAKLAYEGLPSKTYLSKTLAQYTSKTCSNCGFTITSADYDRVLEKLKKTATGWMTTINGKELKVEGQITYYNRYKRQNVVKDLSVELDRLSEESVNNDISSWDKGRSGEALSLLKKRFSHRPVQEKFVCLNCGFETHADEQAALNIARSWLFLRSQEYKKYQTNKTTGNTDKRAFVETWQSFYRKKLKEVWKPAV

SEQ ID NO: 33934 - protein, 977 aa, synthetic construct
  REGION 1..977: note = engineered CasX variant
QEIKRINKIRRRLVKDSNTKKAGKTGPMKTLLVRVMTPDLRERLENLRKKPPNIPQPISNTSRANLNKLLTDYTEMKKAILHVYWEEFQKDPVGLMSRVAQPASKKIDQNKLKPEMDEKGNLTTAGFACSQCGQPLFVYKLEQVSEKGKAYTNYFGRCNVAEHEKLILLAQLKPEKDSDEAVTYSLGKFGQRALDFYSIHVTKESTHPVKPLAQIAGNRYASPVGKALSDACMGTIASFLSKYQDIIIEHQKVVKGNQKRLESLRELAGKENLEYPSVTLPPQPHTKEGVDAYNEVIARVRMWVNLNLWQKLKLSRDDAKPLLRLKGFPSFPLVERQANEVDWWDMVCNVKKLINEKKEDGKVFWQNLAGYKRQEALRPYLSSEEDRKKGKKFARYQLGDLLLHLEKKHGEDWGKVYDEAWERIDKKVEGLSKHIKLEEERRSEDAQSKAALTDWLRAKASFVIEGLKEADKDEFCRCELKLQKWYGDLRGKPFAIEAENSILDISGFSKQYNCAFIWQKDGVKKLNLYLIINYFKGGKLRFKKIKPEAFEANRFYTVINKKSGEIVPMEVNFNFDDPNLIILPLAFGKRQGREFIWNDLLSLETGSLKLANGRVIEKTLYNRRTRQDEPALFVALTFERREVLDSSNIKPMNLIGVDRGENIPAVIALTDPEGCPLSRFKDSLGNPTHILRIGESYKEKQRTIQAKKEVEQRRAGGYSRKYASKAKNLADDMVRNTARDLLYYAVTQDAMLIFENLSRGFGRQGKRTFMAERQYTRMEDWLTAKLAYEGLPSKTYLSKTLAQYTSKTCSNCGFTITSADYDRVLEKLKKTATGWMTTINGKELKVEGQITYYNRYKRQNVVKDLSVELDRLSEESVNNDISSWDKGRSGEALSLLKKRFSHRPVQEKFVCLNCGFETHADEQAALNIARSWLFLRSQEYKKYQTNKTTGNTDKRAFVETWQSFYRKKLKEVWKPAV

SEQ ID NO: 33935 - protein, 978 aa, synthetic construct
  REGION 1..978: note = engineered CasX variant
QEIKRINKIRRRLVKDSNTKKAGKTGPMKTLLVRVMTPDLRERLENLRKKPPNIPQPISNTSRANLNKLLTDYTEMKKAILHVYWEEFQVDPVGLMSRVAQPASKKIDQNKLKPEMDEKGNLTTAGFACSQCGQPLFVYKLEQVSEKGKAYTNYFGRCNVAEHEKLILLAQLKPEKDSDEAVTYSLGKFGQRALDFYSIHVTKESTHPVKPLAQIAGNRYASYPVGKALSDACMGTIASFLSKYQDIIIEHQKVVKGNQKRLESLRELAGKENLEYPSVTLPPQPHTKEGVDAYNEVIARVRMWVNLNLWQKLKLSRDDAKPLLRLKGFPSFPLVERQANEVDWWDMVCNVKKLINEKKEDGKVFWQNLAGYKRQEALRPYLSSEEDRKKGKKFARYQLGDLLLHLEKKHGEDWGKVYDEAWERIDKKVEGLSKHIKLEEERRSEDAQSKAALTDWLRAKASFVIEGLKEADKDEFCRCELKLQKWYGDLRGKPFAIEAENSILDISGFSKQYNCAFIWQKDGVKKLNLYLIINYFKGGKLRFKKIKPEAFEANRFYTVINKKSGEIVPMEVNFNFDDPNLIILPLAFGKRQGREFIWNDLLSLETGSLKLANGRVIEKTLYNRRTRQDEPALFVALTFERREVLDSSNIKPMNLIGVDRGENIPAVIALTDPEGCPLSRFKDSLGNPTHILRIGESYKEKQRTIQAKKEVEQRRAGGYSRKYASKAKNLADDMVRNTARDLLYYAVTQDAMLIFENLSRGFGRQGKRTFMAERQYTRMEDWLTAKLAYEGLPSKTYLSKTLAQYTSKTCSNCGFTITSADYDRVLEKLKKTATGWMTTINGKELKVEGQITYYNRYKRQNVVKDLSVELDRLSEESVNNDISSWTKGRSGEALSLLKKRFSHRPVQEKFVCLNCGFETHADEQAALNIARSWLFLRSQEYKKYQTNKTTGNTDKRAFVETWQSFYRKKLKEVWKPAV

SEQ ID NO: 33936 - protein, 978 aa, synthetic construct
  REGION 1..978: note = engineered CasX variant
QEIKRINKIRRRLVKDSNTKKAGKTGPMKTLLVRVMTPDLRERLENLRKKPPNIPQPISNTSRANLNKLLTDYTEMKKAILHVYWEEFQVDPVGLMSRVAQPASKKIDQNKLKPEMDEKGNLTTAGFACSQCGQPLFVYKLEQVSEKGKAYTNYFGRCNVAEHEKLILLAQLKPEKDSDEAVTYSLGKFGQRALDFYSIHVTKESTHPVKPLAQIAGNRYASHPVGKALSDACMGTIASFLSKYQDIIIEHQKVVKGNQKRLESLRELAGKENLEYPSVTLPPQPHTKEGVDAYNEVIARVRMWVNLNLWQKLKLSRDDAKPLLRLKGFPSFPLVERQANEVDWWDMVCNVKKLINEKKEDGKVFWQNLAGYKRQEALRPYLSSEEDRKKGKKFARYQLGDLLLHLEKKHGEDWGKVYDEAWERIDKKVEGLSKHIKLEEERRSEDAQSKAALTDWLRAKASFVIEGLKEADKDEFCRCELKLQKWYGDLRGKPFAIEAENSILDISGFSKQYNCAFIWQKDGVKKLNLYLIINYFKGGKLRFKKIKPEAFEANRFYTVINKKSGEIVPMEVNFNFDDPNLIILPLAFGKRQGREFIWNDLLSLETGSLKLANGRVIEKTLYNRRTRQDEPALFVALTFERREVLDSSNIKPMNLIGVDRGENIPAVIALTDPEGCPLSRFKDSLGNPTHILRIGESYKEKQRTIQAKKEVEQRRAGGYSRKYASKAKNLADDMVRNTARDLLYYAVTQDAMLIFENLSRGFGRQGKRTFMAERQYTRMEDWLTAKLAYEGLPSKTYLSKTLAQYTSKTCSNCGFTITSADYDRVLEKLKKTATGWMTTINGKELKVEGQITYYNRYKRQNVVKDLSVELDRLSEESVNNDISSWTKGRSGEALSLLKKRFSHRPVQEKFVCLNCGFETHADEQAALNIARSWLFLRSQEYKKYQTNKTTGNTDKRAFVETWQSFYRKKLKEVWKPAV

SEQ ID NO: 33937 - protein, 978 aa, synthetic construct
  REGION 1..978: note = engineered CasX variant
QEIKRINKIRRRLVKDSNTKKAGKTGPMKTLLVRVMTPDLRERLENLRKKPPNIPQPISNTSRANLNKLLTDYTEMKKAILHVYWEEFQVDPVGLMSRVAQPASKKIDQNKLKPEMDEKGNLTTAGFACSQCGQPLFVYKLEQVSEKGKAYTNYFGRCNVAEHEKLILLAQLKPEKDSDEAVTYSLGKFGQRALDFYSIHVTKESTHPVKPLAQIAGNRYASSPVGKALSDACMGTIASFLSKYQDIIIEHQKVVKGNQKRLESLRELAGKENLEYPSVTLPPQPHTKEGVDAYNEVIARVRMWVNLNLWQKLKLSRDDAKPLLRLKGFPSFPLVERQANEVDWWDMVCNVKKLINEKKEDGKVFWQNLAGYKRQEALRPYLSSEEDRKKGKKFARYQLGDLLLHLEKKHGEDWGKVYDEAWERIDKKVEGLSKHIKLEEERRSEDAQSKAALTDWLRAKASFVIEGLKEADKDEFCRCELKLQKWYGDLRGKPFAIEAENSILDISGFSKQYNCAFIWQKDGVKKLNLYLIINYFKGGKLRFKKIKPEAFEANRFYTVINKKSGEIVPMEVNFNFDDPNLIILPLAFGKRQGREFIWNDLLSLETGSLKLANGRVIEKTLYNRRTRQDEPALFVALTFERREVLDSSNIKPMNLIGVDRGENIPAVIALTDPEGCPLSRFKDSLGNPTHILRIGESYKEKQRTIQAKKEVEQRRAGGYSRKYASKAKNLADDMVRNTARDLLYYAVTQDAMLIFENLSRGFGRQGKRTFMAERQYTRMEDWLTAKLAYEGLPSKTYLSKTLAQYTSKTCSNCGFTITSADYDRVLEKLKKTATGWMTTINGKELKVEGQITYYNRYKRQNVVKDLSVELDRLSEESVNNDISSWTKGRSGEALSLLKKRFSHRPVQEKFVCLNCGFETHADEQAALNIARSWLFLRSQEYKKYQTNKTTGNTDKRAFVETWQSFYRKKLKEVWKPAV

SEQ ID NO: 33938 - protein, 978 aa, synthetic construct
  REGION 1..978: note = engineered CasX variant
QEIKRINKIRRRLVKDSNTKKAGKTGPMKTLLVRVMTPDLRERLENLRKKPPNIPQPISNTSRANLNKLLTDYTEMKKAILHVYWEEFQVDPVGLMSRVAQPASKKIDQNKLKPEMDEKGNLTTAGFACSQCGQPLFVYKLEQVSEKGKAYTNYFGRCNVAEHEKLILLAQLKPEKDSDEAVTYSLGKFGQRALDFYSIHVTKESTHPVKPLAQIAGNRYASTPVGKALSDACMGTIASFLSKYQDIIIEHQKVVKGNQKRLESLRELAGKENLEYPSVTLPPQPHTKEGVDAYNEVIARVRMWVNLNLWQKLKLSRDDAKPLLRLKGFPSFPLVERQANEVDWWDMVCNVKKLINEKKEDGKVFWQNLAGYKRQEALRPYLSSEEDRKKGKKFARYQLGDLLLHLEKKHGEDWGKVYDEAWERIDKKVEGLSKHIKLEEERRSEDAQSKAALTDWLRAKASFVIEGLKEADKDEFCRCELKLQKWYGDLRGKPFAIEAENSILDISGFSKQYNCAFIWQKDGVKKLNLYLIINYFKGGKLRFKKIKPEAFEANRFYTVINKKSGEIVPMEVNFNFDDPNLIILPLAFGKRQGREFIWNDLLSLETGSLKLANGRVIEKTLYNRRTRQDEPALFVALTFERREVLDSSNIKPMNLIGVDRGENIPAVIALTDPEGCPLSRFKDSLGNPTHILRIGESYKEKQRTIQAKKEVEQRRAGGYSRKYASKAKNLADDMVRNTARDLLYYAVTQDAMLIFENLSRGFGRQGKRTFMAERQYTRMEDWLTAKLAYEGLPSKTYLSKTLAQYTSKTCSNCGFTITSADYDRVLEKLKKTATGWMTTINGKELKVEGQITYYNRYKRQNVVKDLSVELDRLSEESVNNDISSWTKGRSGEALSLLKKRFSHRPVQEKFVCLNCGFETHADEQAALNIARSWLFLRSQEYKKYQTNKTTGNTDKRAFVETWQSFYRKKLKEVWKPAV

SEQ ID NO: 33939 - protein, 978 aa, synthetic construct
  REGION 1..978: note = engineered CasX variant
QEIKRINKIRRRLVKDSNTKKAGKTGPMKTLLVRVMTPDLRERLENLRKKPPNIPQPISNTSRANLNKLLTDYTEMKKAILHVYWEEFQVDPVGLMSRVAQPASKKIDQNKLKPEMDEKGNLTTAGFACSQCGQPLFVYKLEQVSEKGKAYTNYFGRCNVAEHEKLILLAQLKPEKDSDEAVTYSLGKFGQRALDFYSIHVTKESTHPVKPLAQIAGNRYASAPVGKALSDACMGTIASFLSKYQDIIIEHQKVVKGNQKRLESLRELAGKENLEYPSVTLPPQPHTKEGVDAYNEVIARVRMWVNLNLWQKLKLSRDDAKPLLRLKGFPSFPLVERQANEVDWWDMVCNVKKLINEKKEDGKVFWQNLAGYKRQEALRPYLSSEEDRKKGKKFARYQLGDLLLHLEKKHGEDWGKVYDEAWERIDKKVEGLSKHIKLEEERRSEDAQSKAALTDWLRAKASFVIEGLKEADKDEFCRCELKLQKWYGDLRGKPFAIEAENSILDISGFSKQYNCAFIWQKDGVKKLNLYLIINYFKGGKLRFKKIKPEAFEANRFYTVINKKSGEIVPMEVNFNFDDPNLIILPLAFGKRQGREFIWNDLLSLETGSLKLANGRVIEKTLYNRRTRQDEPALFVALTFERREVLDSSNIKPMNLIGVDRGENIPAVIALTDPEGCPLSRFKDSLGNPTHILRIGESYKEKQRTIQAKKEVEQRRAGGYSRKYASKAKNLADDMVRNTARDLLYYAVTQDAMLIFENLSRGFGRQGKRTFMAERQYTRMEDWLTAKLAYEGLPSKTYLSKTLAQYTSKTCSNCGFTITSADYDRVLEKLKKTATGWMTTINGKELKVEGQITYYNRYKRQNVVKDLSVELDRLSEESVNNDISSWTKGRSGEALSLLKKRFSHRPVQEKFVCLNCGFETHADEQAALNIARSWLFLRSQEYKKYQTNKTTGNTDKRAFVETWQSFYRKKLKEVWKPAV

SEQ ID NO: 33940 - protein, 978 aa, synthetic construct
  REGION 1..978: note = engineered CasX variant
QEIKRINKIRRRLVKDSNTKKAGKTGPMKTLLVRVMTPDLRERLENLRKKPPNIPQPISNTSRANLNKLLTDYTEMKKAILHVYWEEFQVDPVGLMSRVAQPASKKIDQNKLKPEMDEKGNLTTAGFACSQCGQPLFVYKLEQVSEKGKAYTNYFGRCNVAEHEKLILLAQLKPEKDSDEAVTYSLGKFGQRALDFYSIHVTKESTHPVKPLAQIAGNRYASVPVGKALSDACMGTIASFLSKYQDIIIEHQKVVKGNQKRLESLRELAGKENLEYPSVTLPPQPHTKEGVDAYNEVIARVRMWVNLNLWQKLKLSRDDAKPLLRLKGFPSFPLVERQANEVDWWDMVCNVKKLINEKKEDGKVFWQNLAGYKRQEALRPYLSSEEDRKKGKKFARYQLGDLLLHLEKKHGEDWGKVYDEAWERIDKKVEGLSKHIKLEEERRSEDAQSKAALTDWLRAKASFVIEGLKEADKDEFCRCELKLQKWYGDLRGKPFAIEAENSILDISGFSKQYNCAFIWQKDGVKKLNLYLIINYFKGGKLRFKKIKPEAFEANRFYTVINKKSGEIVPMEVNFNFDDPNLIILPLAFGKRQGREFIWNDLLSLETGSLKLANGRVIEKTLYNRRTRQDEPALFVALTFERREVLDSSNIKPMNLIGVDRGENIPAVIALTDPEGCPLSRFKDSLGNPTHILRIGESYKEKQRTIQAKKEVEQRRAGGYSRKYASKAKNLADDMVRNTARDLLYYAVTQDAMLIFENLSRGFGRQGKRTFMAERQYTRMEDWLTAKLAYEGLPSKTYLSKTLAQYTSKTCSNCGFTITSADYDRVLEKLKKTATGWMTTINGKELKVEGQITYYNRYKRQNVVKDLSVELDRLSEESVNNDISSWTKGRSGEALSLLKKRFSHRPVQEKFVCLNCGFETHADEQAALNIARSWLFLRSQEYKKYQTNKTTGNTDKRAFVETWQSFYRKKLKEVWKPAV

SEQ ID NO: 33941 - protein, 978 aa, synthetic construct
  REGION 1..978: note = engineered CasX variant
QEIKRINKIRRRLVKDSNTKKAGKTGPMKTLLVRVMTPDLRERLENLRKKPPNIPQPISNTSRANLNKLLTDYTEMKKAILHVYWEEFQVDPVGLMSRVAQPASKKIDQNKLKPEMDEKGNLTTAGFACSQCGQPLFVYKLEQVSEKGKAYTNYFGRCNVAEHEKLIKLAQLKPEKDSDEAVTYSLGKFGQRALDFYSIHVTKESTHPVKPLAQIAGNRYASGPVGKALSDACMGTIASFLSKYQDIIIEHQKVVKGNQKRLESLRELAGKENLEYPSVTLPPQPHTKEGVDAYNEVIARVRMWVNLNLWQKLKLSRDDAKPLLRLKGFPSFPLVERQANEVDWWDMVCNVKKLINEKKEDGKVFWQNLAGYKRQEALRPYLSSEEDRKKGKKFARYQLGDLLLHLEKKHGEDWGKVYDEAWERIDKKVEGLSKHIKLEEERRSEDAQSKAALTDWLRAKASFVIEGLKEADKDEFCRCELKLQKWYGDLRGKPFAIEAENSILDISGFSKQYNCAFIWQKDGVKKLNLYLIINYFKGGKLRFKKIKPEAFEANRFYTVINKKSGEIVPMEVNFNFDDPNLIILPLAFGKRQGREFIWNDLLSLETGSLKLANGRVIEKTLYNRRTRQDEPALFVALTFERREVLDSSNIKPMNLIGVDRGENIPAVIALTDPEGCPLSRFKDSLGNPTHILRIGESYKEKQRTIQAKKEVEQRRAGGYSRKYASKAKNLADDMVRNTARDLLYYAVTQDAMLIFENLSRGFGRQGKRTFMAERQYTRMEDWLTAKLAYEGLPSKTYLSKTLAQYTSKTCSNCGFTITSADYDRVLEKLKKTATGWMTTINGKELKVEGQITYYNRYKRQNVVKDLSVELDRLSEESVNNDISSWTKGRSGEALSLLKKRFSHRPVQEKFVCLNCGFETHADEQAALNIARSWLFLRSQEYKKYQTNKTTGNTDKRAFVETWQSFYRKKLKEVWKPAV

SEQ ID NO: 33942 - protein, 977 aa, synthetic construct
  REGION 1..977: note = engineered CasX variant
QEIKRINKIRRRLVKDSNTKKAGKTGPMKTLLVRVMTPDLRERLENLRKKPPNIPQPISNTSRANLNKLLTDYTEMKKAILHVYWEEFQVDPVGLMSRVAQPASKKIDQNKLKPEMDEKGNLTTAGFACSQCGQPLFVYKLEQVSEKGKAYTNYFGRCNVAEHEKLILLAQLKPEKDSDEAVTYSLGKFGQRALDFYSIHVTKESTHPVKPLAQIAGNRYASPVGKALSDACMGTIASFLSKYQDIIIEHQKVVKGNQKRLESLRELAGKENLEYPSVTLPPQPHTKEGVDAYNEVIARVRMWVNLNLWQKLKLSRDDAKPLLRLKGFPSFPLVERQANEVDWWDMVCNVKKLINEKKEDGKVFWQNLAGYKRQEALRPYLSSEEDRKKGKKFARYQLGDLLLHLEKKHGEDWGKVYDEAWERIDKKVEGLSKHIKLEEERRSEDAQSKAALTDWLRAKASFVIEGLKEADKDEFCRCELKLQKWYGDLRGKPFAIEAENSILDISGFSKQYNCAFIWQKDGVKKLNLYLIINYFKGGKLRFKKIKPEAFEANRFYTVINKKSGEIVPMEVNFNFDDPNLIILPLAFGKRQGREFIWNDLLSLETGSLKLANGRVIEKTLYNRRTRQDEPALFVALTFERREVLDSSNIKPMNLIGVDRGENIPAVIALTDPEGCPLSRFKDSLGNPTHILRIGESYKEKQRTIQAKKEVEQRRAGGYSRKYASKAKNLADDMVRNTARDLLYYAVTQDAMLIFENLSRGFGRQGKRTFMAERQYTRMEDWLTAKLAYEGLPSKTYLSKTLAQYTSKTCSNCGFTITSADYDRVLEKLKKTATGWMTTINGKELKVEGQITYYNRYKRQNVVKDLSVELDRLSEESVNNDISSWTKGRSGEALSLLKKRFSHRPVQEKFVCLNCGFETHADEQAALNIARSWLFLRSQEYKKYQTNKTTGNTDKRAFVETWQSFYRKKLKEVWKPAV

SEQ ID NO: 33943 - protein, 978 aa, synthetic construct
  REGION 1..978: note = engineered CasX variant
QEIKRLNKIRRRLVKDSNTKKAGKTGPMKTLLVRVMTPDLRERLENLRKKPPNIPQPISNTSRANLNKLLTDYTEMKKAILHVYWEEFQKDPVGLMSRVAQPASKKIDQNKLKPEMDEKGNLTTAGFACSQCGQPLFVYKLEQVSEKGKAYTNYFGRCNVAEHEKLILLAQLKPEKDSDEAVTYSLGKFGQRALDFYSIHVTKESTHPVKPLAQIAGNRYASYPVGKALSDACMGTIASFLSKYQDIIIEHQKVVKGNQKRLESLRELAGKENLEYPSVTLPPQPHTKEGVDAYNEVIARVRMWVNLNLWQKLKLSRDDAKPLLRLKGFPSFPLVERQANEVDWWDMVCNVKKLINEKKEDGKVFWQNLAGYKRQEALRPYLSSEEDRKKGKKFARYQLGDLLLHLEKKHGEDWGKVYDEAWERIDKKVEGLSKHIKLEEERRSEDAQSKAALTDWLRAKASFVIEGLKEADKDEFCRCELKLQKWYGDLRGKPFAIEAENSILDISGFSKQYNCAFIWQKDGVKKLNLYLIINYFKGGKLRFKKIKPEAFEANRFYTVINKKSGEIVPMEVNFNFDDPNLIILPLAFGKRQGREFIWNDLLSLETGSLKLANGRVIEKTLYNRRTRQDEPALFVALTFERREVLDSSNIKPMNLIGVDRGENIPAVIALTDPEGCPLSRFKDSLGNPTHILRIGESYKEKQRTIQAKKEVEQRRAGGYSRKYASKAKNLADDMVRNTARDLLYYAVTQDAMLIFENLSRGFGRQGKRTFMAERQYTRMEDWLTAKLAYEGLPSKTYLSKTLAQYTSKTCSNCGFTITSADYDRVLEKLKKTATGWMTTINGKELKVEGQITYYNRYKRQNVVKDLSVELDRLSEESVNNDISSWTKGRSGEALSLLKKRFSHRPVQEKFVCLNCGFETHADEQAALNIARSWLFLRSQEYKKYQTNKTTGNTDKRAFVETWQSFYRKKLKEVWKPAV

SEQ ID NO: 33944 - protein, 978 aa, synthetic construct
  REGION 1..978: note = engineered CasX variant
QEIKRLNKIRRRLVKDSNTKKAGKTGPMKTLLVRVMTPDLRERLENLRKKPPNIPQPISNTSRANLNKLLTDYTEMKKAILHVYWEEFQKDPVGLMSRVAQPASKKIDQNKLKPEMDEKGNLTTAGFACSQCGQPLFVYKLEQVSEKGKAYTNYFGRCNVAEHEKLILLAQLKPEKDSDEAVTYSLGKFGQRALDFYSIHVTKESTHPVKPLAQIAGNRYASHPVGKALSDACMGTIASFLSKYQDIIIEHQKVVKGNQKRLESLRELAGKENLEYPSVTLPPQPHTKEGVDAYNEVIARVRMWVNLNLWQKLKLSRDDAKPLLRLKGFPSFPLVERQANEVDWWDMVCNVKKLINEKKEDGKVFWQNLAGYKRQEALRPYLSSEEDRKKGKKFARYQLGDLLLHLEKKHGEDWGKVYDEAWERIDKKVEGLSKHIKLEEERRSEDAQSKAALTDWLRAKASFVIEGLKEADKDEFCRCELKLQKWYGDLRGKPFAIEAENSILDISGFSKQYNCAFIWQKDGVKKLNLYLIINYFKGGKLRFKKIKPEAFEANRFYTVINKKSGEIVPMEVNFNFDDPNLIILPLAFGKRQGREFIWNDLLSLETGSLKLANGRVIEKTLYNRRTRQDEPALFVALTFERREVLDSSNIKPMNLIGVDRGENIPAVIALTDPEGCPLSRFKDSLGNPTHILRIGESYKEKQRTIQAKKEVEQRRAGGYSRKYASKAKNLADDMVRNTARDLLYYAVTQDAMLIFENLSRGFGRQGKRTFMAERQYTRMEDWLTAKLAYEGLPSKTYLSKTLAQYTSKTCSNCGFTITSADYDRVLEKLKKTATGWMTTINGKELKVEGQITYYNRYKRQNVVKDLSVELDRLSEESVNNDISSWTKGRSGEALSLLKKRFSHRPVQEKFVCLNCGFETHADEQAALNIARSWLFLRSQEYKKYQTNKTTGNTDKRAFVETWQSFYRKKLKEVWKPAV

SEQ ID NO: 33945 - protein, 978 aa, synthetic construct
  REGION 1..978: note = engineered CasX variant
QEIKRLNKIRRRLVKDSNTKKAGKTGPMKTLLVRVMTPDLRERLENLRKKPPNIPQPISNTSRANLNKLLTDYTEMKKAILHVYWEEFQKDPVGLMSRVAQPASKKIDQNKLKPEMDEKGNLTTAGFACSQCGQPLFVYKLEQVSEKGKAYTNYFGRCNVAEHEKLILLAQLKPEKDSDEAVTYSLGKFGQRALDFYSIHVTKESTHPVKPLAQIAGNRYASSPVGKALSDACMGTIASFLSKYQDIIIEHQKVVKGNQKRLESLRELAGKENLEYPSVTLPPQPHTKEGVDAYNEVIARVRMWVNLNLWQKLKLSRDDAKPLLRLKGFPSFPLVERQANEVDWWDMVCNVKKLINEKKEDGKVFWQNLAGYKRQEALRPYLSSEEDRKKGKKFARYQLGDLLLHLEKKHGEDWGKVYDEAWERIDKKVEGLSKHIKLEEERRSEDAQSKAALTDWLRAKASFVIEGLKEADKDEFCRCELKLQKWYGDLRGKPFAIEAENSILDISGFSKQYNCAFIWQKDGVKKLNLYLIINYFKGGKLRFKKIKPEAFEANRFYTVINKKSGEIVPMEVNFNFDDPNLIILPLAFGKRQGREFIWNDLLSLETGSLKLANGRVIEKTLYNRRTRQDEPALFVALTFERREVLDSSNIKPMNLIGVDRGENIPAVIALTDPEGCPLSRFKDSLGNPTHILRIGESYKEKQRTIQAKKEVEQRRAGGYSRKYASKAKNLADDMVRNTARDLLYYAVTQDAMLIFENLSRGFGRQGKRTFMAERQYTRMEDWLTAKLAYEGLPSKTYLSKTLAQYTSKTCSNCGFTITSADYDRVLEKLKKTATGWMTTINGKELKVEGQITYYNRYKRQNVVKDLSVELDRLSEESVNNDISSWTKGRSGEALSLLKKRFSHRPVQEKFVCLNCGFETHADEQAALNIARSWLFLRSQEYKKYQTNKTTGNTDKRAFVETWQSFYRKKLKEVWKPAV

SEQ ID NO: 33946 - protein, 978 aa, synthetic construct
  REGION 1..978: note = engineered CasX variant
QEIKRLNKIRRRLVKDSNTKKAGKTGPMKTLLVRVMTPDLRERLENLRKKPPNIPQPISNTSRANLNKLLTDYTEMKKAILHVYWEEFQKDPVGLMSRVAQPASKKIDQNKLKPEMDEKGNLTTAGFACSQCGQPLFVYKLEQVSEKGKAYTNYFGRCNVAEHEKLILLAQLKPEKDSDEAVTYSLGKFGQRALDFYSIHVTKESTHPVKPLAQIAGNRYASTPVGKALSDACMGTIASFLSKYQDIIIEHQKVVKGNQKRLESLRELAGKENLEYPSVTLPPQPHTKEGVDAYNEVIARVRMWVNLNLWQKLKLSRDDAKPLLRLKGFPSFPLVERQANEVDWWDMVCNVKKLINEKKEDGKVFWQNLAGYKRQEALRPYLSSEEDRKKGKKFARYQLGDLLLHLEKKHGEDWGKVYDEAWERIDKKVEGLSKHIKLEEERRSEDAQSKAALTDWLRAKASFVIEGLKEADKDEFCRCELKLQKWYGDLRGKPFAIEAENSILDISGFSKQYNCAFIWQKDGVKKLNLYLIINYFKGGKLRFKKIKPEAFEANRFYTVINKKSGEIVPMEVNFNFDDPNLIILPLAFGKRQGREFIWNDLLSLETGSLKLANGRVIEKTLYNRRTRQDEPALFVALTFERREVLDSSNIKPMNLIGVDRGENIPAVIALTDPEGCPLSRFKDSLGNPTHILRIGESYKEKQRTIQAKKEVEQRRAGGYSRKYASKAKNLADDMVRNTARDLLYYAVTQDAMLIFENLSRGFGRQGKRTFMAERQYTRMEDWLTAKLAYEGLPSKTYLSKTLAQYTSKTCSNCGFTITSADYDRVLEKLKKTATGWMTTINGKELKVEGQITYYNRYKRQNVVKDLSVELDRLSEESVNNDISSWTKGRSGEALSLLKKRFSHRPVQEKFVCLNCGFETHADEQAALNIARSWLFLRSQEYKKYQTNKTTGNTDKRAFVETWQSFYRKKLKEVWKPAV

SEQ ID NO: 33947 - protein, 978 aa, synthetic construct
  REGION 1..978: note = engineered CasX variant
QEIKRLNKIRRRLVKDSNTKKAGKTGPMKTLLVRVMTPDLRERLENLRKKPPNIPQPISNTSRANLNKLLTDYTEMKKAILHVYWEEFQKDPVGLMSRVAQPASKKIDQNKLKPEMDEKGNLTTAGFACSQCGQPLFVYKLEQVSEKGKAYTNYFGRCNVAEHEKLILLAQLKPEKDSDEAVTYSLGKFGQRALDFYSIHVTKESTHPVKPLAQIAGNRYASAPVGKALSDACMGTIASFLSKYQDIIIEHQKVVKGNQKRLESLRELAGKENLEYPSVTLPPQPHTKEGVDAYNEVIARVRMWVNLNLWQKLKLSRDDAKPLLRLKGFPSFPLVERQANEVDWWDMVCNVKKLINEKKEDGKVFWQNLAGYKRQEALRPYLSSEEDRKKGKKFARYQLGDLLLHLEKKHGEDWGKVYDEAWERIDKKVEGLSKHIKLEEERRSEDAQSKAALTDWLRAKASFVIEGLKEADKDEFCRCELKLQKWYGDLRGKPFAIEAENSILDISGFSKQYNCAFIWQKDGVKKLNLYLIINYFKGGKLRFKKIKPEAFEANRFYTVINKKSGEIVPMEVNFNFDDPNLIILPLAFGKRQGREFIWNDLLSLETGSLKLANGRVIEKTLYNRRTRQDEPALFVALTFERREVLDSSNIKPMNLIGVDRGENIPAVIALTDPEGCPLSRFKDSLGNPTHILRIGESYKEKQRTIQAKKEVEQRRAGGYSRKYASKAKNLADDMVRNTARDLLYYAVTQDAMLIFENLSRGFGRQGKRTFMAERQYTRMEDWLTAKLAYEGLPSKTYLSKTLAQYTSKTCSNCGFTITSADYDRVLEKLKKTATGWMTTINGKELKVEGQITYYNRYKRQNVVKDLSVELDRLSEESVNNDISSWTKGRSGEALSLLKKRFSHRPVQEKFVCLNCGFETHADEQAALNIARSWLFLRSQEYKKYQTNKTTGNTDKRAFVETWQSFYRKKLKEVWKPAV

SEQ ID NO: 33948 - protein, 978 aa, synthetic construct
  REGION 1..978: note = engineered CasX variant
QEIKRLNKIRRRLVKDSNTKKAGKTGPMKTLLVRVMTPDLRERLENLRKKPPNIPQPISNTSRANLNKLLTDYTEMKKAILHVYWEEFQKDPVGLMSRVAQPASKKIDQNKLKPEMDEKGNLTTAGFACSQCGQPLFVYKLEQVSEKGKAYTNYFGRCNVAEHEKLILLAQLKPEKDSDEAVTYSLGKFGQRALDFYSIHVTKESTHPVKPLAQIAGNRYASVPVGKALSDACMGTIASFLSKYQDIIIEHQKVVKGNQKRLESLRELAGKENLEYPSVTLPPQPHTKEGVDAYNEVIARVRMWVNLNLWQKLKLSRDDAKPLLRLKGFPSFPLVERQANEVDWWDMVCNVKKLINEKKEDGKVFWQNLAGYKRQEALRPYLSSEEDRKKGKKFARYQLGDLLLHLEKKHGEDWGKVYDEAWERIDKKVEGLSKHIKLEEERRSEDAQSKAALTDWLRAKASFVIEGLKEADKDEFCRCELKLQKWYGDLRGKPFAIEAENSILDISGFSKQYNCAFIWQKDGVKKLNLYLIINYFKGGKLRFKKIKPEAFEANRFYTVINKKSGEIVPMEVNFNFDDPNLIILPLAFGKRQGREFIWNDLLSLETGSLKLANGRVIEKTLYNRRTRQDEPALFVALTFERREVLDSSNIKPMNLIGVDRGENIPAVIALTDPEGCPLSRFKDSLGNPTHILRIGESYKEKQRTIQAKKEVEQRRAGGYSRKYASKAKNLADDMVRNTARDLLYYAVTQDAMLIFENLSRGFGRQGKRTFMAERQYTRMEDWLTAKLAYEGLPSKTYLSKTLAQYTSKTCSNCGFTITSADYDRVLEKLKKTATGWMTTINGKELKVEGQITYYNRYKRQNVVKDLSVELDRLSEESVNNDISSWTKGRSGEALSLLKKRFSHRPVQEKFVCLNCGFETHADEQAALNIARSWLFLRSQEYKKYQTNKTTGNTDKRAFVETWQSFYRKKLKEVWKPAV

SEQ ID NO: 33949 - protein, 978 aa, synthetic construct
  REGION 1..978: note = engineered CasX variant
QEIKRLNKIRRRLVKDSNTKKAGKTGPMKTLLVRVMTPDLRERLENLRKKPPNIPQPISNTSRANLNKLLTDYTEMKKAILHVYWEEFQKDPVGLMSRVAQPASKKIDQNKLKPEMDEKGNLTTAGFACSQCGQPLFVYKLEQVSEKGKAYTNYFGRCNVAEHEKLIKLAQLKPEKDSDEAVTYSLGKFGQRALDFYSIHVTKESTHPVKPLAQIAGNRYASGPVGKALSDACMGTIASFLSKYQDIIIEHQKVVKGNQKRLESLRELAGKENLEYPSVTLPPQPHTKEGVDAYNEVIARVRMWVNLNLWQKLKLSRDDAKPLLRLKGFPSFPLVERQANEVDWWDMVCNVKKLINEKKEDGKVFWQNLAGYKRQEALRPYLSSEEDRKKGKKFARYQLGDLLLHLEKKHGEDWGKVYDEAWERIDKKVEGLSKHIKLEEERRSEDAQSKAALTDWLRAKASFVIEGLKEADKDEFCRCELKLQKWYGDLRGKPFAIEAENSILDISGFSKQYNCAFIWQKDGVKKLNLYLIINYFKGGKLRFKKIKPEAFEANRFYTVINKKSGEIVPMEVNFNFDDPNLIILPLAFGKRQGREFIWNDLLSLETGSLKLANGRVIEKTLYNRRTRQDEPALFVALTFERREVLDSSNIKPMNLIGVDRGENIPAVIALTDPEGCPLSRFKDSLGNPTHILRIGESYKEKQRTIQAKKEVEQRRAGGYSRKYASKAKNLADDMVRNTARDLLYYAVTQDAMLIFENLSRGFGRQGKRTFMAERQYTRMEDWLTAKLAYEGLPSKTYLSKTLAQYTSKTCSNCGFTITSADYDRVLEKLKKTATGWMTTINGKELKVEGQITYYNRYKRQNVVKDLSVELDRLSEESVNNDISSWTKGRSGEALSLLKKRFSHRPVQEKFVCLNCGFETHADEQAALNIARSWLFLRSQEYKKYQTNKTTGNTDKRAFVETWQSFYRKKLKEVWKPAV

SEQ ID NO: 33950 - protein, 977 aa, synthetic construct
  REGION 1..977: note = engineered CasX variant
QEIKRLNKIRRRLVKDSNTKKAGKTGPMKTLLVRVMTPDLRERLENLRKKPPNIPQPISNTSRANLNKLLTDYTEMKKAILHVYWEEFQKDPVGLMSRVAQPASKKIDQNKLKPEMDEKGNLTTAGFACSQCGQPLFVYKLEQVSEKGKAYTNYFGRCNVAEHEKLILLAQLKPEKDSDEAVTYSLGKFGQRALDFYSIHVTKESTHPVKPLAQIAGNRYASPVGKALSDACMGTIASFLSKYQDIIIEHQKVVKGNQKRLESLRELAGKENLEYPSVTLPPQPHTKEGVDAYNEVIARVRMWVNLNLWQKLKLSRDDAKPLLRLKGFPSFPLVERQANEVDWWDMVCNVKKLINEKKEDGKVFWQNLAGYKRQEALRPYLSSEEDRKKGKKFARYQLGDLLLHLEKKHGEDWGKVYDEAWERIDKKVEGLSKHIKLEEERRSEDAQSKAALTDWLRAKASFVIEGLKEADKDEFCRCELKLQKWYGDLRGKPFAIEAENSILDISGFSKQYNCAFIWQKDGVKKLNLYLIINYFKGGKLRFKKIKPEAFEANRFYTVINKKSGEIVPMEVNFNFDDPNLIILPLAFGKRQGREFIWNDLLSLETGSLKLANGRVIEKTLYNRRTRQDEPALFVALTFERREVLDSSNIKPMNLIGVDRGENIPAVIALTDPEGCPLSRFKDSLGNPTHILRIGESYKEKQRTIQAKKEVEQRRAGGYSRKYASKAKNLADDMVRNTARDLLYYAVTQDAMLIFENLSRGFGRQGKRTFMAERQYTRMEDWLTAKLAYEGLPSKTYLSKTLAQYTSKTCSNCGFTITSADYDRVLEKLKKTATGWMTTINGKELKVEGQITYYNRYKRQNVVKDLSVELDRLSEESVNNDISSWTKGRSGEALSLLKKRFSHRPVQEKFVCLNCGFETHADEQAALNIARSWLFLRSQEYKKYQTNKTTGNTDKRAFVETWQSFYRKKLKEVWKPAV

SEQ ID NO: 33951 - protein, 978 aa, synthetic construct
  REGION 1..978: note = engineered CasX variant
QEIKRINKIRRRLVKDSNTKKAGKTGPMKTLLVRVMTPDLRERLENLRKKPPNIPQPISNTSRANLNKLLTDYTEMKKAILHVYWEEFQKDPVGLMSRVAQPASKKIDQNKLKPEMDEKGNLTTAGFACSQCGQPLFVYKLEQVSEKGKAYTNYVGRCNVAEHEKLILLAQLKPEKDSDEAVTYSLGKFGQRALDFYSIHVTKESTHPVKPLAQIAGNRYASYPVGKALSDACMGTIASFLSKYQDIIIEHQKVVKGNQKRLESLRELAGKENLEYPSVTLPPQPHTKEGVDAYNEVIARVRMWVNLNLWQKLKLSRDDAKPLLRLKGFPSFPLVERQANEVDWWDMVCNVKKLINEKKEDGKVFWQNLAGYKRQEALRPYLSSEEDRKKGKKFARYQLGDLLLHLEKKHGEDWGKVYDEAWERIDKKVEGLSKHIKLEEERRSEDAQSKAALTDWLRAKASFVIEGLKEADKDEFCRCELKLQKWYGDLRGKPFAIEAENSILDISGFSKQYNCAFIWQKDGVKKLNLYLIINYFKGGKLRFKKIKPEAFEANRFYTVINKKSGEIVPMEVNFNFDDPNLIILPLAFGKRQGREFIWNDLLSLETGSLKLANGRVIEKTLYNRRTRQDEPALFVALTFERREVLDSSNIKPMNLIGVDRGENIPAVIALTDPEGCPLSRFKDSLGNPTHILRIGESYKEKQRTIQAKKEVEQRRAGGYSRKYASKAKNLADDMVRNTARDLLYYAVTQDAMLIFENLSRGFGRQGKRTFMAERQYTRMEDWLTAKLAYEGLPSKTYLSKTLAQYTSKTCSNCGFTITSADYDRVLEKLKKTATGWMTTINGKELKVEGQITYYNRYKRQNVVKDLSVELDRLSEESVNNDISSWTKGRSGEALSLLKKRFSHRPVQEKFVCLNCGFETHADEQAALNIARSWLFLRSQEYKKYQTNKTTGNTDKRAFVETWQSFYRKKLKEVWKPAV

SEQ ID NO: 33952 - protein, 978 aa, synthetic construct
  REGION 1..978: note = engineered CasX variant
QEIKRINKIRRRLVKDSNTKKAGKTGPMKTLLVRVMTPDLRERLENLRKKPPNIPQPISNTSRANLNKLLTDYTEMKKAILHVYWEEFQKDPVGLMSRVAQPASKKIDQNKLKPEMDEKGNLTTAGFACSQCGQPLFVYKLEQVSEKGKAYTNYVGRCNVAEHEKLILLAQLKPEKDSDEAVTYSLGKFGQRALDFYSIHVTKESTHPVKPLAQIAGNRYASHPVGKALSDACMGTIASFLSKYQDIIIEHQKVVKGNQKRLESLRELAGKENLEYPSVTLPPQPHTKEGVDAYNEVIARVRMWVNLNLWQKLKLSRDDAKPLLRLKGFPSFPLVERQANEVDWWDMVCNVKKLINEKKEDGKVFWQNLAGYKRQEALRPYLSSEEDRKKGKKFARYQLGDLLLHLEKKHGEDWGKVYDEAWERIDKKVEGLSKHIKLEEERRSEDAQSKAALTDWLRAKASFVIEGLKEADKDEFCRCELKLQKWYGDLRGKPFAIEAENSILDISGFSKQYNCAFIWQKDGVKKLNLYLIINYFKGGKLRFKKIKPEAFEANRFYTVINKKSGEIVPMEVNFNFDDPNLIILPLAFGKRQGREFIWNDLLSLETGSLKLANGRVIEKTLYNRRTRQDEPALFVALTFERREVLDSSNIKPMNLIGVDRGENIPAVIALTDPEGCPLSRFKDSLGNPTHILRIGESYKEKQRTIQAKKEVEQRRAGGYSRKYASKAKNLADDMVRNTARDLLYYAVTQDAMLIFENLSRGFGRQGKRTFMAERQYTRMEDWLTAKLAYEGLPSKTYLSKTLAQYTSKTCSNCGFTITSADYDRVLEKLKKTATGWMTTINGKELKVEGQITYYNRYKRQNVVKDLSVELDRLSEESVNNDISSWTKGRSGEALSLLKKRFSHRPVQEKFVCLNCGFETHADEQAALNIARSWLFLRSQEYKKYQTNKTTGNTDKRAFVETWQSFYRKKLKEVWKPAV

SEQ ID NO: 33953 - protein, 978 aa, synthetic construct
  REGION 1..978: note = engineered CasX variant
QEIKRINKIRRRLVKDSNTKKAGKTGPMKTLLVRVMTPDLRERLENLRKKPPNIPQPISNTSRANLNKLLTDYTEMKKAILHVYWEEFQKDPVGLMSRVAQPASKKIDQNKLKPEMDEKGNLTTAGFACSQCGQPLFVYKLEQVSEKGKAYTNYVGRCNVAEHEKLILLAQLKPEKDSDEAVTYSLGKFGQRALDFYSIHVTKESTHPVKPLAQIAGNRYASSPVGKALSDACMGTIASFLSKYQDIIIEHQKVVKGNQKRLESLRELAGKENLEYPSVTLPPQPHTKEGVDAYNEVIARVRMWVNLNLWQKLKLSRDDAKPLLRLKGFPSFPLVERQANEVDWWDMVCNVKKLINEKKEDGKVFWQNLAGYKRQEALRPYLSSEEDRKKGKKFARYQLGDLLLHLEKKHGEDWGKVYDEAWERIDKKVEGLSKHIKLEEERRSEDAQSKAALTDWLRAKASFVIEGLKEADKDEFCRCELKLQKWYGDLRGKPFAIEAENSILDISGFSKQYNCAFIWQKDGVKKLNLYLIINYFKGGKLRFKKIKPEAFEANRFYTVINKKSGEIVPMEVNFNFDDPNLIILPLAFGKRQGREFIWNDLLSLETGSLKLANGRVIEKTLYNRRTRQDEPALFVALTFERREVLDSSNIKPMNLIGVDRGENIPAVIALTDPEGCPLSRFKDSLGNPTHILRIGESYKEKQRTIQAKKEVEQRRAGGYSRKYASKAKNLADDMVRNTARDLLYYAVTQDAMLIFENLSRGFGRQGKRTFMAERQYTRMEDWLTAKLAYEGLPSKTYLSKTLAQYTSKTCSNCGFTITSADYDRVLEKLKKTATGWMTTINGKELKVEGQITYYNRYKRQNVVKDLSVELDRLSEESVNNDISSWTKGRSGEALSLLKKRFSHRPVQEKFVCLNCGFETHADEQAALNIARSWLFLRSQEYKKYQTNKTTGNTDKRAFVETWQSFYRKKLKEVWKPAV

SEQ ID NO: 33954 - protein, 978 aa, synthetic construct
  REGION 1..978: note = engineered CasX variant
QEIKRINKIRRRLVKDSNTKKAGKTGPMKTLLVRVMTPDLRERLENLRKKPPNIPQPISNTSRANLNKLLTDYTEMKKAILHVYWEEFQKDPVGLMSRVAQPASKKIDQNKLKPEMDEKGNLTTAGFACSQCGQPLFVYKLEQVSEKGKAYTNYVGRCNVAEHEKLILLAQLKPEKDSDEAVTYSLGKFGQRALDFYSIHVTKESTHPVKPLAQIAGNRYASTPVGKALSDACMGTIASFLSKYQDIIIEHQKVVKGNQKRLESLRELAGKENLEYPSVTLPPQPHTKEGVDAYNEVIARVRMWVNLNLWQKLKLSRDDAKPLLRLKGFPSFPLVERQANEVDWWDMVCNVKKLINEKKEDGKVFWQNLAGYKRQEALRPYLSSEEDRKKGKKFARYQLGDLLLHLEKKHGEDWGKVYDEAWERIDKKVEGLSKHIKLEEERRSEDAQSKAALTDWLRAKASFVIEGLKEADKDEFCRCELKLQKWYGDLRGKPFAIEAENSILDISGFSKQYNCAFIWQKDGVKKLNLYLIINYFKGGKLRFKKIKPEAFEANRFYTVINKKSGEIVPMEVNFNFDDPNLIILPLAFGKRQGREFIWNDLLSLETGSLKLANGRVIEKTLYNRRTRQDEPALFVALTFERREVLDSSNIKPMNLIGVDRGENIPAVIALTDPEGCPLSRFKDSLGNPTHILRIGESYKEKQRTIQAKKEVEQRRAGGYSRKYASKAKNLADDMVRNTARDLLYYAVTQDAMLIFENLSRGFGRQGKRTFMAERQYTRMEDWLTAKLAYEGLPSKTYLSKTLAQYTSKTCSNCGFTITSADYDRVLEKLKKTATGWMTTINGKELKVEGQITYYNRYKRQNVVKDLSVELDRLSEESVNNDISSWTKGRSGEALSLLKKRFSHRPVQEKFVCLNCGFETHADEQAALNIARSWLFLRSQEYKKYQTNKTTGNTDKRAFVETWQSFYRKKLKEVWKPAV

SEQ ID NO: 33955 - protein, 978 aa, synthetic construct
  REGION 1..978: note = engineered CasX variant
QEIKRINKIRRRLVKDSNTKKAGKTGPMKTLLVRVMTPDLRERLENLRKKPPNIPQPISNTSRANLNKLLTDYTEMKKAILHVYWEEFQKDPVGLMSRVAQPASKKIDQNKLKPEMDEKGNLTTAGFACSQCGQPLFVYKLEQVSEKGKAYTNYVGRCNVAEHEKLILLAQLKPEKDSDEAVTYSLGKFGQRALDFYSIHVTKESTHPVKPLAQIAGNRYASAPVGKALSDACMGTIASFLSKYQDIIIEHQKVVKGNQKRLESLRELAGKENLEYPSVTLPPQPHTKEGVDAYNEVIARVRMWVNLNLWQKLKLSRDDAKPLLRLKGFPSFPLVERQANEVDWWDMVCNVKKLINEKKEDGKVFWQNLAGYKRQEALRPYLSSEEDRKKGKKFARYQLGDLLLHLEKKHGEDWGKVYDEAWERIDKKVEGLSKHIKLEEERRSEDAQSKAALTDWLRAKASFVIEGLKEADKDEFCRCELKLQKWYGDLRGKPFAIEAENSILDISGFSKQYNCAFIWQKDGVKKLNLYLIINYFKGGKLRFKKIKPEAFEANRFYTVINKKSGEIVPMEVNFNFDDPNLIILPLAFGKRQGREFIWNDLLSLETGSLKLANGRVIEKTLYNRRTRQDEPALFVALTFERREVLDSSNIKPMNLIGVDRGENIPAVIALTDPEGCPLSRFKDSLGNPTHILRIGESYKEKQRTIQAKKEVEQRRAGGYSRKYASKAKNLADDMVRNTARDLLYYAVTQDAMLIFENLSRGFGRQGKRTFMAERQYTRMEDWLTAKLAYEGLPSKTYLSKTLAQYTSKTCSNCGFTITSADYDRVLEKLKKTATGWMTTINGKELKVEGQITYYNRYKRQNVVKDLSVELDRLSEESVNNDISSWTKGRSGEALSLLKKRFSHRPVQEKFVCLNCGFETHADEQAALNIARSWLFLRSQEYKKYQTNKTTGNTDKRAFVETWQSFYRKKLKEVWKPAV

SEQ ID NO: 33956 - protein, 978 aa, synthetic construct
  REGION 1..978: note = engineered CasX variant
QEIKRINKIRRRLVKDSNTKKAGKTGPMKTLLVRVMTPDLRERLENLRKKPPNIPQPISNTSRANLNKLLTDYTEMKKAILHVYWEEFQKDPVGLMSRVAQPASKKIDQNKLKPEMDEKGNLTTAGFACSQCGQPLFVYKLEQVSEKGKAYTNYVGRCNVAEHEKLILLAQLKPEKDSDEAVTYSLGKFGQRALDFYSIHVTKESTHPVKPLAQIAGNRYASVPVGKALSDACMGTIASFLSKYQDIIIEHQKVVKGNQKRLESLRELAGKENLEYPSVTLPPQPHTKEGVDAYNEVIARVRMWVNLNLWQKLKLSRDDAKPLLRLKGFPSFPLVERQANEVDWWDMVCNVKKLINEKKEDGKVFWQNLAGYKRQEALRPYLSSEEDRKKGKKFARYQLGDLLLHLEKKHGEDWGKVYDEAWERIDKKVEGLSKHIKLEEERRSEDAQSKAALTDWLRAKASFVIEGLKEADKDEFCRCELKLQKWYGDLRGKPFAIEAENSILDISGFSKQYNCAFIWQKDGVKKLNLYLIINYFKGGKLRFKKIKPEAFEANRFYTVINKKSGEIVPMEVNFNFDDPNLIILPLAFGKRQGREFIWNDLLSLETGSLKLANGRVIEKTLYNRRTRQDEPALFVALTFERREVLDSSNIKPMNLIGVDRGENIPAVIALTDPEGCPLSRFKDSLGNPTHILRIGESYKEKQRTIQAKKEVEQRRAGGYSRKYASKAKNLADDMVRNTARDLLYYAVTQDAMLIFENLSRGFGRQGKRTFMAERQYTRMEDWLTAKLAYEGLPSKTYLSKTLAQYTSKTCSNCGFTITSADYDRVLEKLKKTATGWMTTINGKELKVEGQITYYNRYKRQNVVKDLSVELDRLSEESVNNDISSWTKGRSGEALSLLKKRFSHRPVQEKFVCLNCGFETHADEQAALNIARSWLFLRSQEYKKYQTNKTTGNTDKRAFVETWQSFYRKKLKEVWKPAV

SEQ ID NO: 33957 - protein, 978 aa, synthetic construct
  REGION 1..978: note = engineered CasX variant
QEIKRINKIRRRLVKDSNTKKAGKTGPMKTLLVRVMTPDLRERLENLRKKPPNIPQPISNTSRANLNKLLTDYTEMKKAILHVYWEEFQKDPVGLMSRVAQPASKKIDQNKLKPEMDEKGNLTTAGFACSQCGQPLFVYKLEQVSEKGKAYTNYVGRCNVAEHEKLIKLAQLKPEKDSDEAVTYSLGKFGQRALDFYSIHVTKESTHPVKPLAQIAGNRYASGPVGKALSDACMGTIASFLSKYQDIIIEHQKVVKGNQKRLESLRELAGKENLEYPSVTLPPQPHTKEGVDAYNEVIARVRMWVNLNLWQKLKLSRDDAKPLLRLKGFPSFPLVERQANEVDWWDMVCNVKKLINEKKEDGKVFWQNLAGYKRQEALRPYLSSEEDRKKGKKFARYQLGDLLLHLEKKHGEDWGKVYDEAWERIDKKVEGLSKHIKLEEERRSEDAQSKAALTDWLRAKASFVIEGLKEADKDEFCRCELKLQKWYGDLRGKPFAIEAENSILDISGFSKQYNCAFIWQKDGVKKLNLYLIINYFKGGKLRFKKIKPEAFEANRFYTVINKKSGEIVPMEVNFNFDDPNLIILPLAFGKRQGREFIWNDLLSLETGSLKLANGRVIEKTLYNRRTRQDEPALFVALTFERREVLDSSNIKPMNLIGVDRGENIPAVIALTDPEGCPLSRFKDSLGNPTHILRIGESYKEKQRTIQAKKEVEQRRAGGYSRKYASKAKNLADDMVRNTARDLLYYAVTQDAMLIFENLSRGFGRQGKRTFMAERQYTRMEDWLTAKLAYEGLPSKTYLSKTLAQYTSKTCSNCGFTITSADYDRVLEKLKKTATGWMTTINGKELKVEGQITYYNRYKRQNVVKDLSVELDRLSEESVNNDISSWTKGRSGEALSLLKKRFSHRPVQEKFVCLNCGFETHADEQAALNIARSWLFLRSQEYKKYQTNKTTGNTDKRAFVETWQSFYRKKLKEVWKPAV

SEQ ID NO: 33958 - protein, 977 aa, synthetic construct
  REGION 1..977: note = engineered CasX variant
QEIKRINKIRRRLVKDSNTKKAGKTGPMKTLLVRVMTPDLRERLENLRKKPPNIPQPISNTSRANLNKLLTDYTEMKKAILHVYWEEFQKDPVGLMSRVAQPASKKIDQNKLKPEMDEKGNLTTAGFACSQCGQPLFVYKLEQVSEKGKAYTNYVGRCNVAEHEKLILLAQLKPEKDSDEAVTYSLGKFGQRALDFYSIHVTKESTHPVKPLAQIAGNRYASPVGKALSDACMGTIASFLSKYQDIIIEHQKVVKGNQKRLESLRELAGKENLEYPSVTLPPQPHTKEGVDAYNEVIARVRMWVNLNLWQKLKLSRDDAKPLLRLKGFPSFPLVERQANEVDWWDMVCNVKKLINEKKEDGKVFWQNLAGYKRQEALRPYLSSEEDRKKGKKFARYQLGDLLLHLEKKHGEDWGKVYDEAWERIDKKVEGLSKHIKLEEERRSEDAQSKAALTDWLRAKASFVIEGLKEADKDEFCRCELKLQKWYGDLRGKPFAIEAENSILDISGFSKQYNCAFIWQKDGVKKLNLYLIINYFKGGKLRFKKIKPEAFEANRFYTVINKKSGEIVPMEVNFNFDDPNLIILPLAFGKRQGREFIWNDLLSLETGSLKLANGRVIEKTLYNRRTRQDEPALFVALTFERREVLDSSNIKPMNLIGVDRGENIPAVIALTDPEGCPLSRFKDSLGNPTHILRIGESYKEKQRTIQAKKEVEQRRAGGYSRKYASKAKNLADDMVRNTARDLLYYAVTQDAMLIFENLSRGFGRQGKRTFMAERQYTRMEDWLTAKLAYEGLPSKTYLSKTLAQYTSKTCSNCGFTITSADYDRVLEKLKKTATGWMTTINGKELKVEGQITYYNRYKRQNVVKDLSVELDRLSEESVNNDISSWTKGRSGEALSLLKKRFSHRPVQEKFVCLNCGFETHADEQAALNIARSWLFLRSQEYKKYQTNKTTGNTDKRAFVETWQSFYRKKLKEVWKPAV

SEQ ID NO: 33959 - protein, 978 aa, synthetic construct
  REGION 1..978: note = engineered CasX variant
QEIKRINKIRRRLVKDSNTKKAGKTGPMKTLLVRVMTPDLRERLENLRKKPPNIPQPISNTSRANLNKLLTDYTEMKKAILHVYWEEFQKDPVGLMSRVAQPASKKIDQNKLKPEMDEKGNLTTAGFACSQCGQPLFVYKLEQVSEKGKAYTNYFGRCNVAEHEKLILLAQLKPEKDSDEAVTYSLGKFGQRALDFYSIHVTKESTHPVKPLAQIAGNRYASYPVGKALSDACMGTIASFLSKYQDIIIEHQKVVKGNQKRLESLRELAGKENLEYPSVTLPPQPHTKEGVDAYNEVIARVRMWVNLNLWQKLKLSRDDAKPLLRLKGFPSFPLVERQANEVDWWDMVCNVKKLINEKKEDGKVFWQNLAGYKRQEALRPYLSSEEDRKKGKKFARYQLGDLLLHLEKKHGEDWGKVYDEAWERIDKKVEGLSKHIKLEEERRSEDAQSKAALTDWLRAKASFVIEGLKEADKDEFCRCELKLQKWYGDLRGKPFAIEAENSILDISGFSKQYNCAFIWQKDGVKKLNLYLIINYFKGGKLRFKKIKPEAFEANRFYTVINKKSGEIVPMEVNFNFDDPNLIILPLAFGKRQGREFIWNDLLSLETGSLKLANGRVIEKTLYNRRTRQDEPALFVALTFERREVLDSSNIKPMNLIGVDRGENIPAVIALTDPEGCPLSRFKDSLGNPTHILRIGESYKEKQRTIQAKKEVEQRRAGGYSRKYASKAKNLADDMVRNTARDLLYYAVTQDAMLIFENLSRGFGRQGKRTFMAERQYTRMEDWLTAKLAYEGLASKTYLSKTLAQYTSKTCSNCGFTITSADYDRVLEKLKKTATGWMTTINGKELKVEGQITYYNRYKRQNVVKDLSVELDRLSEESVNNDISSWTKGRSGEALSLLKKRFSHRPVQEKFVCLNCGFETHADEQAALNIARSWLFLRSQEYKKYQTNKTTGNTDKRAFVETWQSFYRKKLKEVWKPAV

SEQ ID NO: 33960 - protein, 978 aa, synthetic construct
  REGION 1..978: note = engineered CasX variant
QEIKRINKIRRRLVKDSNTKKAGKTGPMKTLLVRVMTPDLRERLENLRKKPPNIPQPISNTSRANLNKLLTDYTEMKKAILHVYWEEFQKDPVGLMSRVAQPASKKIDQNKLKPEMDEKGNLTTAGFACSQCGQPLFVYKLEQVSEKGKAYTNYFGRCNVAEHEKLILLAQLKPEKDSDEAVTYSLGKFGQRALDFYSIHVTKESTHPVKPLAQIAGNRYASHPVGKALSDACMGTIASFLSKYQDIIIEHQKVVKGNQKRLESLRELAGKENLEYPSVTLPPQPHTKEGVDAYNEVIARVRMWVNLNLWQKLKLSRDDAKPLLRLKGFPSFPLVERQANEVDWWDMVCNVKKLINEKKEDGKVFWQNLAGYKRQEALRPYLSSEEDRKKGKKFARYQLGDLLLHLEKKHGEDWGKVYDEAWERIDKKVEGLSKHIKLEEERRSEDAQSKAALTDWLRAKASFVIEGLKEADKDEFCRCELKLQKWYGDLRGKPFAIEAENSILDISGFSKQYNCAFIWQKDGVKKLNLYLIINYFKGGKLRFKKIKPEAFEANRFYTVINKKSGEIVPMEVNFNFDDPNLIILPLAFGKRQGREFIWNDLLSLETGSLKLANGRVIEKTLYNRRTRQDEPALFVALTFERREVLDSSNIKPMNLIGVDRGENIPAVIALTDPEGCPLSRFKDSLGNPTHILRIGESYKEKQRTIQAKKEVEQRRAGGYSRKYASKAKNLADDMVRNTARDLLYYAVTQDAMLIFENLSRGFGRQGKRTFMAERQYTRMEDWLTAKLAYEGLASKTYLSKTLAQYTSKTCSNCGFTITSADYDRVLEKLKKTATGWMTTINGKELKVEGQITYYNRYKRQNVVKDLSVELDRLSEESVNNDISSWTKGRSGEALSLLKKRFSHRPVQEKFVCLNCGFETHADEQAALNIARSWLFLRSQEYKKYQTNKTTGNTDKRAFVETWQSFYRKKLKEVWKPAV

SEQ ID NO: 33961 - protein, 978 aa, synthetic construct
  REGION 1..978: note = engineered CasX variant
QEIKRINKIRRRLVKDSNTKKAGKTGPMKTLLVRVMTPDLRERLENLRKKPPNIPQPISNTSRANLNKLLTDYTEMKKAILHVYWEEFQKDPVGLMSRVAQPASKKIDQNKLKPEMDEKGNLTTAGFACSQCGQPLFVYKLEQVSEKGKAYTNYFGRCNVAEHEKLILLAQLKPEKDSDEAVTYSLGKFGQRALDFYSIHVTKESTHPVKPLAQIAGNRYASSPVGKALSDACMGTIASFLSKYQDIIIEHQKVVKGNQKRLESLRELAGKENLEYPSVTLPPQPHTKEGVDAYNEVIARVRMWVNLNLWQKLKLSRDDAKPLLRLKGFPSFPLVERQANEVDWWDMVCNVKKLINEKKEDGKVFWQNLAGYKRQEALRPYLSSEEDRKKGKKFARYQLGDLLLHLEKKHGEDWGKVYDEAWERIDKKVEGLSKHIKLEEERRSEDAQSKAALTDWLRAKASFVIEGLKEADKDEFCRCELKLQKWYGDLRGKPFAIEAENSILDISGFSKQYNCAFIWQKDGVKKLNLYLIINYFKGGKLRFKKIKPEAFEANRFYTVINKKSGEIVPMEVNFNFDDPNLIILPLAFGKRQGREFIWNDLLSLETGSLKLANGRVIEKTLYNRRTRQDEPALFVALTFERREVLDSSNIKPMNLIGVDRGENIPAVIALTDPEGCPLSRFKDSLGNPTHILRIGESYKEKQRTIQAKKEVEQRRAGGYSRKYASKAKNLADDMVRNTARDLLYYAVTQDAMLIFENLSRGFGRQGKRTFMAERQYTRMEDWLTAKLAYEGLASKTYLSKTLAQYTSKTCSNCGFTITSADYDRVLEKLKKTATGWMTTINGKELKVEGQITYYNRYKRQNVVKDLSVELDRLSEESVNNDISSWTKGRSGEALSLLKKRFSHRPVQEKFVCLNCGFETHADEQAALNIARSWLFLRSQEYKKYQTNKTTGNTDKRAFVETWQSFYRKKLKEVWKPAV

SEQ ID NO: 33962 - protein, 978 aa, synthetic construct
  REGION 1..978: note = engineered CasX variant
QEIKRINKIRRRLVKDSNTKKAGKTGPMKTLLVRVMTPDLRERLENLRKKPPNIPQPISNTSRANLNKLLTDYTEMKKAILHVYWEEFQKDPVGLMSRVAQPASKKIDQNKLKPEMDEKGNLTTAGFACSQCGQPLFVYKLEQVSEKGKAYTNYFGRCNVAEHEKLILLAQLKPEKDSDEAVTYSLGKFGQRALDFYSIHVTKESTHPVKPLAQIAGNRYASTPVGKALSDACMGTIASFLSKYQDIIIEHQKVVKGNQKRLESLRELAGKENLEYPSVTLPPQPHTKEGVDAYNEVIARVRMWVNLNLWQKLKLSRDDAKPLLRLKGFPSFPLVERQANEVDWWDMVCNVKKLINEKKEDGKVFWQNLAGYKRQEALRPYLSSEEDRKKGKKFARYQLGDLLLHLEKKHGEDWGKVYDEAWERIDKKVEGLSKHIKLEEERRSEDAQSKAALTDWLRAKASFVIEGLKEADKDEFCRCELKLQKWYGDLRGKPFAIEAENSILDISGFSKQYNCAFIWQKDGVKKLNLYLIINYFKGGKLRFKKIKPEAFEANRFYTVINKKSGEIVPMEVNFNFDDPNLIILPLAFGKRQGREFIWNDLLSLETGSLKLANGRVIEKTLYNRRTRQDEPALFVALTFERREVLDSSNIKPMNLIGVDRGENIPAVIALTDPEGCPLSRFKDSLGNPTHILRIGESYKEKQRTIQAKKEVEQRRAGGYSRKYASKAKNLADDMVRNTARDLLYYAVTQDAMLIFENLSRGFGRQGKRTFMAERQYTRMEDWLTAKLAYEGLASKTYLSKTLAQYTSKTCSNCGFTITSADYDRVLEKLKKTATGWMTTINGKELKVEGQITYYNRYKRQNVVKDLSVELDRLSEESVNNDISSWTKGRSGEALSLLKKRFSHRPVQEKFVCLNCGFETHADEQAALNIARSWLFLRSQEYKKYQTNKTTGNTDKRAFVETWQSFYRKKLKEVWKPAV

SEQ ID NO: 33963 - protein, 978 aa, synthetic construct
  REGION 1..978: note = engineered CasX variant
QEIKRINKIRRRLVKDSNTKKAGKTGPMKTLLVRVMTPDLRERLENLRKKPPNIPQPISNTSRANLNKLLTDYTEMKKAILHVYWEEFQKDPVGLMSRVAQPASKKIDQNKLKPEMDEKGNLTTAGFACSQCGQPLFVYKLEQVSEKGKAYTNYFGRCNVAEHEKLILLAQLKPEKDSDEAVTYSLGKFGQRALDFYSIHVTKESTHPVKPLAQIAGNRYASAPVGKALSDACMGTIASFLSKYQDIIIEHQKVVKGNQKRLESLRELAGKENLEYPSVTLPPQPHTKEGVDAYNEVIARVRMWVNLNLWQKLKLSRDDAKPLLRLKGFPSFPLVERQANEVDWWDMVCNVKKLINEKKEDGKVFWQNLAGYKRQEALRPYLSSEEDRKKGKKFARYQLGDLLLHLEKKHGEDWGKVYDEAWERIDKKVEGLSKHIKLEEERRSEDAQSKAALTDWLRAKASFVIEGLKEADKDEFCRCELKLQKWYGDLRGKPFAIEAENSILDISGFSKQYNCAFIWQKDGVKKLNLYLIINYFKGGKLRFKKIKPEAFEANRFYTVINKKSGEIVPMEVNFNFDDPNLIILPLAFGKRQGREFIWNDLLSLETGSLKLANGRVIEKTLYNRRTRQDEPALFVALTFERREVLDSSNIKPMNLIGVDRGENIPAVIALTDPEGCPLSRFKDSLGNPTHILRIGESYKEKQRTIQAKKEVEQRRAGGYSRKYASKAKNLADDMVRNTARDLLYYAVTQDAMLIFENLSRGFGRQGKRTFMAERQYTRMEDWLTAKLAYEGLASKTYLSKTLAQYTSKTCSNCGFTITSADYDRVLEKLKKTATGWMTTINGKELKVEGQITYYNRYKRQNVVKDLSVELDRLSEESVNNDISSWTKGRSGEALSLLKKRFSHRPVQEKFVCLNCGFETHADEQAALNIARSWLFLRSQEYKKYQTNKTTGNTDKRAFVETWQSFYRKKLKEVWKPAV

SEQ ID NO: 33964 - protein, 978 aa, synthetic construct
  REGION 1..978: note = engineered CasX variant
QEIKRINKIRRRLVKDSNTKKAGKTGPMKTLLVRVMTPDLRERLENLRKKPPNIPQPISNTSRANLNKLLTDYTEMKKAILHVYWEEFQKDPVGLMSRVAQPASKKIDQNKLKPEMDEKGNLTTAGFACSQCGQPLFVYKLEQVSEKGKAYTNYFGRCNVAEHEKLILLAQLKPEKDSDEAVTYSLGKFGQRALDFYSIHVTKESTHPVKPLAQIAGNRYASVPVGKALSDACMGTIASFLSKYQDIIIEHQKVVKGNQKRLESLRELAGKENLEYPSVTLPPQPHTKEGVDAYNEVIARVRMWVNLNLWQKLKLSRDDAKPLLRLKGFPSFPLVERQANEVDWWDMVCNVKKLINEKKEDGKVFWQNLAGYKRQEALRPYLSSEEDRKKGKKFARYQLGDLLLHLEKKHGEDWGKVYDEAWERIDKKVEGLSKHIKLEEERRSEDAQSKAALTDWLRAKASFVIEGLKEADKDEFCRCELKLQKWYGDLRGKPFAIEAENSILDISGFSKQYNCAFIWQKDGVKKLNLYLIINYFKGGKLRFKKIKPEAFEANRFYTVINKKSGEIVPMEVNFNFDDPNLIILPLAFGKRQGREFIWNDLLSLETGSLKLANGRVIEKTLYNRRTRQDEPALFVALTFERREVLDSSNIKPMNLIGVDRGENIPAVIALTDPEGCPLSRFKDSLGNPTHILRIGESYKEKQRTIQAKKEVEQRRAGGYSRKYASKAKNLADDMVRNTARDLLYYAVTQDAMLIFENLSRGFGRQGKRTFMAERQYTRMEDWLTAKLAYEGLASKTYLSKTLAQYTSKTCSNCGFTITSADYDRVLEKLKKTATGWMTTINGKELKVEGQITYYNRYKRQNVVKDLSVELDRLSEESVNNDISSWTKGRSGEALSLLKKRFSHRPVQEKFVCLNCGFETHADEQAALNIARSWLFLRSQEYKKYQTNKTTGNTDKRAFVETWQSFYRKKLKEVWKPAV

SEQ ID NO: 33965 - protein, 978 aa, synthetic construct
  REGION 1..978: note = engineered CasX variant
QEIKRINKIRRRLVKDSNTKKAGKTGPMKTLLVRVMTPDLRERLENLRKKPPNIPQPISNTSRANLNKLLTDYTEMKKAILHVYWEEFQKDPVGLMSRVAQPASKKIDQNKLKPEMDEKGNLTTAGFACSQCGQPLFVYKLEQVSEKGKAYTNYFGRCNVAEHEKLIKLAQLKPEKDSDEAVTYSLGKFGQRALDFYSIHVTKESTHPVKPLAQIAGNRYASGPVGKALSDACMGTIASFLSKYQDIIIEHQKVVKGNQKRLESLRELAGKENLEYPSVTLPPQPHTKEGVDAYNEVIARVRMWVNLNLWQKLKLSRDDAKPLLRLKGFPSFPLVERQANEVDWWDMVCNVKKLINEKKEDGKVFWQNLAGYKRQEALRPYLSSEEDRKKGKKFARYQLGDLLLHLEKKHGEDWGKVYDEAWERIDKKVEGLSKHIKLEEERRSEDAQSKAALTDWLRAKASFVIEGLKEADKDEFCRCELKLQKWYGDLRGKPFAIEAENSILDISGFSKQYNCAFIWQKDGVKKLNLYLIINYFKGGKLRFKKIKPEAFEANRFYTVINKKSGEIVPMEVNFNFDDPNLIILPLAFGKRQGREFIWNDLLSLETGSLKLANGRVIEKTLYNRRTRQDEPALFVALTFERREVLDSSNIKPMNLIGVDRGENIPAVIALTDPEGCPLSRFKDSLGNPTHILRIGESYKEKQRTIQAKKEVEQRRAGGYSRKYASKAKNLADDMVRNTARDLLYYAVTQDAMLIFENLSRGFGRQGKRTFMAERQYTRMEDWLTAKLAYEGLASKTYLSKTLAQYTSKTCSNCGFTITSADYDRVLEKLKKTATGWMTTINGKELKVEGQITYYNRYKRQNVVKDLSVELDRLSEESVNNDISSWTKGRSGEALSLLKKRFSHRPVQEKFVCLNCGFETHADEQAALNIARSWLFLRSQEYKKYQTNKTTGNTDKRAFVETWQSFYRKKLKEVWKPAV

SEQ ID NO: 33966 - protein, 977 aa, synthetic construct
  REGION 1..977: note = engineered CasX variant
QEIKRINKIRRRLVKDSNTKKAGKTGPMKTLLVRVMTPDLRERLENLRKKPPNIPQPISNTSRANLNKLLTDYTEMKKAILHVYWEEFQKDPVGLMSRVAQPASKKIDQNKLKPEMDEKGNLTTAGFACSQCGQPLFVYKLEQVSEKGKAYTNYFGRCNVAEHEKLILLAQLKPEKDSDEAVTYSLGKFGQRALDFYSIHVTKESTHPVKPLAQIAGNRYASPVGKALSDACMGTIASFLSKYQDIIIEHQKVVKGNQKRLESLRELAGKENLEYPSVTLPPQPHTKEGVDAYNEVIARVRMWVNLNLWQKLKLSRDDAKPLLRLKGFPSFPLVERQANEVDWWDMVCNVKKLINEKKEDGKVFWQNLAGYKRQEALRPYLSSEEDRKKGKKFARYQLGDLLLHLEKKHGEDWGKVYDEAWERIDKKVEGLSKHIKLEEERRSEDAQSKAALTDWLRAKASFVIEGLKEADKDEFCRCELKLQKWYGDLRGKPFAIEAENSILDISGFSKQYNCAFIWQKDGVKKLNLYLIINYFKGGKLRFKKIKPEAFEANRFYTVINKKSGEIVPMEVNFNFDDPNLIILPLAFGKRQGREFIWNDLLSLETGSLKLANGRVIEKTLYNRRTRQDEPALFVALTFERREVLDSSNIKPMNLIGVDRGENIPAVIALTDPEGCPLSRFKDSLGNPTHILRIGESYKEKQRTIQAKKEVEQRRAGGYSRKYASKAKNLADDMVRNTARDLLYYAVTQDAMLIFENLSRGFGRQGKRTFMAERQYTRMEDWLTAKLAYEGLASKTYLSKTLAQYTSKTCSNCGFTITSADYDRVLEKLKKTATGWMTTINGKELKVEGQITYYNRYKRQNVVKDLSVELDRLSEESVNNDISSWTKGRSGEALSLLKKRFSHRPVQEKFVCLNCGFETHADEQAALNIARSWLFLRSQEYKKYQTNKTTGNTDKRAFVETWQSFYRKKLKEVWKPAV

SEQ ID NO: 33967 - protein, 978 aa, synthetic construct
  REGION 1..978: note = engineered CasX variant
QEIKRINKIRRRLVKDSNTKKAGKTGPMKTLLVRVMTPDLRERLENLRKKPPNIPQPISNTSRANLNKLLTDYTEMKKAILHVYWEEFQKDPVGLMSRVAQPASKKIDQNKLKPEMDEKGNLTTAGFACSQCGQPLFVYKLEQVSEKGKAYTNYFGRCNVAEHEKLILLAQLKPEKDSDEAVTYSLGKFGQRALDFYSIHVTKESTHPVKPLAQIAGNRYASYPVGKALSDACMGTIASFLSKYQDIIIEHQKVVKGNQKRLESLRELAGKENLEYPSVTLPPQPHTKEGVDAYNEVIARVRMWVNLNLWQKLKLSRDDAKPLLRLKGFPSFPLVERQANEVDWWDMVCNVKKLINEKKEDGKVFWQNLAGYKRQEALRPYLSSEEDRKKGKKFARYQLGDLLLHLEKKHGEDWGKVYDEAWERIDKKVEGLSKHIKLEEERRSEDAQSKAALTDWLRAKASFVIEGLKEADKDEFCRCELKLQKWYGDLRGKPFAIEAENSILDISGFSKQYNCAFIWQKDGVKKLNLYLIINYFKGGKLRFKKIKPEAFEANRFYTVINKKSGEIVPMEVNFNFDDPNLIILPLAFGKRQGREFIWNDLLSLETGSLKLANGRVIEKTLYNRRTRQDEPALFVALTFERREVLDSSNIKPMNLIGVDRGENIPAVIALTDPEGCPLSRFKDSLGNPTHILRIGESYKEKQRTIQAKKEVEQRRAGGYSRKYASKAKNLADDMVRNTARDLLYYAVTQDAMLIFENLSRGFGRQGKRTFMAERQYTRMEDWLTAKLAYEGLPSKVYLSKTLAQYTSKTCSNCGFTITSADYDRVLEKLKKTATGWMTTINGKELKVEGQITYYNRYKRQNVVKDLSVELDRLSEESVNNDISSWTKGRSGEALSLLKKRFSHRPVQEKFVCLNCGFETHADEQAALNIARSWLFLRSQEYKKYQTNKTTGNTDKRAFVETWQSFYRKKLKEVWKPAV

SEQ ID NO: 33968 - protein, 978 aa, synthetic construct
  REGION 1..978: note = engineered CasX variant
QEIKRINKIRRRLVKDSNTKKAGKTGPMKTLLVRVMTPDLRERLENLRKKPPNIPQPISNTSRANLNKLLTDYTEMKKAILHVYWEEFQKDPVGLMSRVAQPASKKIDQNKLKPEMDEKGNLTTAGFACSQCGQPLFVYKLEQVSEKGKAYTNYFGRCNVAEHEKLILLAQLKPEKDSDEAVTYSLGKFGQRALDFYSIHVTKESTHPVKPLAQIAGNRYASHPVGKALSDACMGTIASFLSKYQDIIIEHQKVVKGNQKRLESLRELAGKENLEYPSVTLPPQPHTKEGVDAYNEVIARVRMWVNLNLWQKLKLSRDDAKPLLRLKGFPSFPLVERQANEVDWWDMVCNVKKLINEKKEDGKVFWQNLAGYKRQEALRPYLSSEEDRKKGKKFARYQLGDLLLHLEKKHGEDWGKVYDEAWERIDKKVEGLSKHIKLEEERRSEDAQSKAALTDWLRAKASFVIEGLKEADKDEFCRCELKLQKWYGDLRGKPFAIEAENSILDISGFSKQYNCAFIWQKDGVKKLNLYLIINYFKGGKLRFKKIKPEAFEANRFYTVINKKSGEIVPMEVNFNFDDPNLIILPLAFGKRQGREFIWNDLLSLETGSLKLANGRVIEKTLYNRRTRQDEPALFVALTFERREVLDSSNIKPMNLIGVDRGENIPAVIALTDPEGCPLSRFKDSLGNPTHILRIGESYKEKQRTIQAKKEVEQRRAGGYSRKYASKAKNLADDMVRNTARDLLYYAVTQDAMLIFENLSRGFGRQGKRTFMAERQYTRMEDWLTAKLAYEGLPSKVYLSKTLAQYTSKTCSNCGFTITSADYDRVLEKLKKTATGWMTTINGKELKVEGQITYYNRYKRQNVVKDLSVELDRLSEESVNNDISSWTKGRSGEALSLLKKRFSHRPVQEKFVCLNCGFETHADEQAALNIARSWLFLRSQEYKKYQTNKTTGNTDKRAFVETWQSFYRKKLKEVWKPAV

SEQ ID NO: 33969 - protein, 978 aa, synthetic construct
  REGION 1..978: note = engineered CasX variant
QEIKRINKIRRRLVKDSNTKKAGKTGPMKTLLVRVMTPDLRERLENLRKKPPNIPQPISNTSRANLNKLLTDYTEMKKAILHVYWEEFQKDPVGLMSRVAQPASKKIDQNKLKPEMDEKGNLTTAGFACSQCGQPLFVYKLEQVSEKGKAYTNYFGRCNVAEHEKLILLAQLKPEKDSDEAVTYSLGKFGQRALDFYSIHVTKESTHPVKPLAQIAGNRYASSPVGKALSDACMGTIASFLSKYQDIIIEHQKVVKGNQKRLESLRELAGKENLEYPSVTLPPQPHTKEGVDAYNEVIARVRMWVNLNLWQKLKLSRDDAKPLLRLKGFPSFPLVERQANEVDWWDMVCNVKKLINEKKEDGKVFWQNLAGYKRQEALRPYLSSEEDRKKGKKFARYQLGDLLLHLEKKHGEDWGKVYDEAWERIDKKVEGLSKHIKLEEERRSEDAQSKAALTDWLRAKASFVIEGLKEADKDEFCRCELKLQKWYGDLRGKPFAIEAENSILDISGFSKQYNCAFIWQKDGVKKLNLYLIINYFKGGKLRFKKIKPEAFEANRFYTVINKKSGEIVPMEVNFNFDDPNLIILPLAFGKRQGREFIWNDLLSLETGSLKLANGRVIEKTLYNRRTRQDEPALFVALTFERREVLDSSNIKPMNLIGVDRGENIPAVIALTDPEGCPLSRFKDSLGNPTHILRIGESYKEKQRTIQAKKEVEQRRAGGYSRKYASKAKNLADDMVRNTARDLLYYAVTQDAMLIFENLSRGFGRQGKRTFMAERQYTRMEDWLTAKLAYEGLPSKVYLSKTLAQYTSKTCSNCGFTITSADYDRVLEKLKKTATGWMTTINGKELKVEGQITYYNRYKRQNVVKDLSVELDRLSEESVNNDISSWTKGRSGEALSLLKKRFSHRPVQEKFVCLNCGFETHADEQAALNIARSWLFLRSQEYKKYQTNKTTGNTDKRAFVETWQSFYRKKLKEVWKPAV

SEQ ID NO: 33970 - protein, 978 aa, synthetic construct
  REGION 1..978: note = engineered CasX variant
QEIKRINKIRRRLVKDSNTKKAGKTGPMKTLLVRVMTPDLRERLENLRKKPPNIPQPISNTSRANLNKLLTDYTEMKKAILHVYWEEFQKDPVGLMSRVAQPASKKIDQNKLKPEMDEKGNLTTAGFACSQCGQPLFVYKLEQVSEKGKAYTNYFGRCNVAEHEKLILLAQLKPEKDSDEAVTYSLGKFGQRALDFYSIHVTKESTHPVKPLAQIAGNRYASTPVGKALSDACMGTIASFLSKYQDIIIEHQKVVKGNQKRLESLRELAGKENLEYPSVTLPPQPHTKEGVDAYNEVIARVRMWVNLNLWQKLKLSRDDAKPLLRLKGFPSFPLVERQANEVDWWDMVCNVKKLINEKKEDGKVFWQNLAGYKRQEALRPYLSSEEDRKKGKKFARYQLGDLLLHLEKKHGEDWGKVYDEAWERIDKKVEGLSKHIKLEEERRSEDAQSKAALTDWLRAKASFVIEGLKEADKDEFCRCELKLQKWYGDLRGKPFAIEAENSILDISGFSKQYNCAFIWQKDGVKKLNLYLIINYFKGGKLRFKKIKPEAFEANRFYTVINKKSGEIVPMEVNFNFDDPNLIILPLAFGKRQGREFIWNDLLSLETGSLKLANGRVIEKTLYNRRTRQDEPALFVALTFERREVLDSSNIKPMNLIGVDRGENIPAVIALTDPEGCPLSRFKDSLGNPTHILRIGESYKEKQRTIQAKKEVEQRRAGGYSRKYASKAKNLADDMVRNTARDLLYYAVTQDAMLIFENLSRGFGRQGKRTFMAERQYTRMEDWLTAKLAYEGLPSKVYLSKTLAQYTSKTCSNCGFTITSADYDRVLEKLKKTATGWMTTINGKELKVEGQITYYNRYKRQNVVKDLSVELDRLSEESVNNDISSWTKGRSGEALSLLKKRFSHRPVQEKFVCLNCGFETHADEQAALNIARSWLFLRSQEYKKYQTNKTTGNTDKRAFVETWQSFYRKKLKEVWKPAV

SEQ ID NO: 33971 - protein, 978 aa, synthetic construct
  REGION 1..978: note = engineered CasX variant
QEIKRINKIRRRLVKDSNTKKAGKTGPMKTLLVRVMTPDLRERLENLRKKPPNIPQPISNTSRANLNKLLTDYTEMKKAILHVYWEEFQKDPVGLMSRVAQPASKKIDQNKLKPEMDEKGNLTTAGFACSQCGQPLFVYKLEQVSEKGKAYTNYFGRCNVAEHEKLILLAQLKPEKDSDEAVTYSLGKFGQRALDFYSIHVTKESTHPVKPLAQIAGNRYASAPVGKALSDACMGTIASFLSKYQDIIIEHQKVVKGNQKRLESLRELAGKENLEYPSVTLPPQPHTKEGVDAYNEVIARVRMWVNLNLWQKLKLSRDDAKPLLRLKGFPSFPLVERQANEVDWWDMVCNVKKLINEKKEDGKVFWQNLAGYKRQEALRPYLSSEEDRKKGKKFARYQLGDLLLHLEKKHGEDWGKVYDEAWERIDKKVEGLSKHIKLEEERRSEDAQSKAALTDWLRAKASFVIEGLKEADKDEFCRCELKLQKWYGDLRGKPFAIEAENSILDISGFSKQYNCAFIWQKDGVKKLNLYLIINYFKGGKLRFKKIKPEAFEANRFYTVINKKSGEIVPMEVNFNFDDPNLIILPLAFGKRQGREFIWNDLLSLETGSLKLANGRVIEKTLYNRRTRQDEPALFVALTFERREVLDSSNIKPMNLIGVDRGENIPAVIALTDPEGCPLSRFKDSLGNPTHILRIGESYKEKQRTIQAKKEVEQRRAGGYSRKYASKAKNLADDMVRNTARDLLYYAVTQDAMLIFENLSRGFGRQGKRTFMAERQYTRMEDWLTAKLAYEGLPSKVYLSKTLAQYTSKTCSNCGFTITSADYDRVLEKLKKTATGWMTTINGKELKVEGQITYYNRYKRQNVVKDLSVELDRLSEESVNNDISSWTKGRSGEALSLLKKRFSHRPVQEKFVCLNCGFETHADEQAALNIARSWLFLRSQEYKKYQTNKTTGNTDKRAFVETWQSFYRKKLKEVWKPAV

SEQ ID NO: 33972 - protein, 978 aa, synthetic construct
  REGION 1..978: note = engineered CasX variant
QEIKRINKIRRRLVKDSNTKKAGKTGPMKTLLVRVMTPDLRERLENLRKKPPNIPQPISNTSRANLNKLLTDYTEMKKAILHVYWEEFQKDPVGLMSRVAQPASKKIDQNKLKPEMDEKGNLTTAGFACSQCGQPLFVYKLEQVSEKGKAYTNYFGRCNVAEHEKLILLAQLKPEKDSDEAVTYSLGKFGQRALDFYSIHVTKESTHPVKPLAQIAGNRYASVPVGKALSDACMGTIASFLSKYQDIIIEHQKVVKGNQKRLESLRELAGKENLEYPSVTLPPQPHTKEGVDAYNEVIARVRMWVNLNLWQKLKLSRDDAKPLLRLKGFPSFPLVERQANEVDWWDMVCNVKKLINEKKEDGKVFWQNLAGYKRQEALRPYLSSEEDRKKGKKFARYQLGDLLLHLEKKHGEDWGKVYDEAWERIDKKVEGLSKHIKLEEERRSEDAQSKAALTDWLRAKASFVIEGLKEADKDEFCRCELKLQKWYGDLRGKPFAIEAENSILDISGFSKQYNCAFIWQKDGVKKLNLYLIINYFKGGKLRFKKIKPEAFEANRFYTVINKKSGEIVPMEVNFNFDDPNLIILPLAFGKRQGREFIWNDLLSLETGSLKLANGRVIEKTLYNRRTRQDEPALFVALTFERREVLDSSNIKPMNLIGVDRGENIPAVIALTDPEGCPLSRFKDSLGNPTHILRIGESYKEKQRTIQAKKEVEQRRAGGYSRKYASKAKNLADDMVRNTARDLLYYAVTQDAMLIFENLSRGFGRQGKRTFMAERQYTRMEDWLTAKLAYEGLPSKVYLSKTLAQYTSKTCSNCGFTITSADYDRVLEKLKKTATGWMTTINGKELKVEGQITYYNRYKRQNVVKDLSVELDRLSEESVNNDISSWTKGRSGEALSLLKKRFSHRPVQEKFVCLNCGFETHADEQAALNIARSWLFLRSQEYKKYQTNKTTGNTDKRAFVETWQSFYRKKLKEVWKPAV

SEQ ID NO: 33973 - protein, 978 aa, synthetic construct
  REGION 1..978: note = engineered CasX variant
QEIKRINKIRRRLVKDSNTKKAGKTGPMKTLLVRVMTPDLRERLENLRKKPPNIPQPISNTSRANLNKLLTDYTEMKKAILHVYWEEFQKDPVGLMSRVAQPASKKIDQNKLKPEMDEKGNLTTAGFACSQCGQPLFVYKLEQVSEKGKAYTNYFGRCNVAEHEKLIKLAQLKPEKDSDEAVTYSLGKFGQRALDFYSIHVTKESTHPVKPLAQIAGNRYASGPVGKALSDACMGTIASFLSKYQDIIIEHQKVVKGNQKRLESLRELAGKENLEYPSVTLPPQPHTKEGVDAYNEVIARVRMWVNLNLWQKLKLSRDDAKPLLRLKGFPSFPLVERQANEVDWWDMVCNVKKLINEKKEDGKVFWQNLAGYKRQEALRPYLSSEEDRKKGKKFARYQLGDLLLHLEKKHGEDWGKVYDEAWERIDKKVEGLSKHIKLEEERRSEDAQSKAALTDWLRAKASFVIEGLKEADKDEFCRCELKLQKWYGDLRGKPFAIEAENSILDISGFSKQYNCAFIWQKDGVKKLNLYLIINYFKGGKLRFKKIKPEAFEANRFYTVINKKSGEIVPMEVNFNFDDPNLIILPLAFGKRQGREFIWNDLLSLETGSLKLANGRVIEKTLYNRRTRQDEPALFVALTFERREVLDSSNIKPMNLIGVDRGENIPAVIALTDPEGCPLSRFKDSLGNPTHILRIGESYKEKQRTIQAKKEVEQRRAGGYSRKYASKAKNLADDMVRNTARDLLYYAVTQDAMLIFENLSRGFGRQGKRTFMAERQYTRMEDWLTAKLAYEGLPSKVYLSKTLAQYTSKTCSNCGFTITSADYDRVLEKLKKTATGWMTTINGKELKVEGQITYYNRYKRQNVVKDLSVELDRLSEESVNNDISSWTKGRSGEALSLLKKRFSHRPVQEKFVCLNCGFETHADEQAALNIARSWLFLRSQEYKKYQTNKTTGNTDKRAFVETWQSFYRKKLKEVWKPAV

SEQ ID NO: 33974 - protein, 977 aa, synthetic construct
  REGION 1..977: note = engineered CasX variant
QEIKRINKIRRRLVKDSNTKKAGKTGPMKTLLVRVMTPDLRERLENLRKKPPNIPQPISNTSRANLNKLLTDYTEMKKAILHVYWEEFQKDPVGLMSRVAQPASKKIDQNKLKPEMDEKGNLTTAGFACSQCGQPLFVYKLEQVSEKGKAYTNYFGRCNVAEHEKLILLAQLKPEKDSDEAVTYSLGKFGQRALDFYSIHVTKESTHPVKPLAQIAGNRYASPVGKALSDACMGTIASFLSKYQDIIIEHQKVVKGNQKRLESLRELAGKENLEYPSVTLPPQPHTKEGVDAYNEVIARVRMWVNLNLWQKLKLSRDDAKPLLRLKGFPSFPLVERQANEVDWWDMVCNVKKLINEKKEDGKVFWQNLAGYKRQEALRPYLSSEEDRKKGKKFARYQLGDLLLHLEKKHGEDWGKVYDEAWERIDKKVEGLSKHIKLEEERRSEDAQSKAALTDWLRAKASFVIEGLKEADKDEFCRCELKLQKWYGDLRGKPFAIEAENSILDISGFSKQYNCAFIWQKDGVKKLNLYLIINYFKGGKLRFKKIKPEAFEANRFYTVINKKSGEIVPMEVNFNFDDPNLIILPLAFGKRQGREFIWNDLLSLETGSLKLANGRVIEKTLYNRRTRQDEPALFVALTFERREVLDSSNIKPMNLIGVDRGENIPAVIALTDPEGCPLSRFKDSLGNPTHILRIGESYKEKQRTIQAKKEVEQRRAGGYSRKYASKAKNLADDMVRNTARDLLYYAVTQDAMLIFENLSRGFGRQGKRTFMAERQYTRMEDWLTAKLAYEGLPSKVYLSKTLAQYTSKTCSNCGFTITSADYDRVLEKLKKTATGWMTTINGKELKVEGQITYYNRYKRQNVVKDLSVELDRLSEESVNNDISSWTKGRSGEALSLLKKRFSHRPVQEKFVCLNCGFETHADEQAALNIARSWLFLRSQEYKKYQTNKTTGNTDKRAFVETWQSFYRKKLKEVWKPAV

SEQ ID NO: 33975 - protein, 979 aa, synthetic construct
  REGION 1..979: note = engineered CasX variant
QEIKRINKIRRRLVKDSNTKKAGKTGPMKTLLVRVMTPDLRERLENLRKKPPNIPQPISNTSRANLNKLLTDYTEMKKAILHVYWEEFQKDPVGLMSRVAQPASKKIDQNKLKPEMDEKGNLTTAGFACSQCGQPLFVYKLEQVSEKGKAYTNYFGRCNVAEHEKLILLAQLKPEKDSDEAVTYSLGKFGQRALDFYSIHVTKESTHPVKPLAQIAGNRYASYPVGKALSDACMGTIASFLSKYQDIIIEHQKVVKGNQKRLESLRELAGKENLEYPSVTLPPQPHTKEGVDAYNEVIARVRMWVNLNLWQKLKLSRDDAKPLLRLKGFPSFPLVERQANEVDWWDMVCNVKKLINEKKEDGKVFWQNLAGYKRQEALRPYLSSEEDRKKGKKFARYQLGDLLLHLEKKHGEDWGKVYDEAWERIDKKVEGLSKHIKLEEERRSEDAQSKAALTDWLRAKASFVIEGLKEADKDEFCRCELKLQKWYGDLRGKPFAIEAENSILDISGFSKQYNCAFIWQKDGVKKLNLYLIINYFKGGKLRFKKIKPEAFEANRFYTVINKKSGEIVPMEVNFNFDDPNLIILPLAFGKRQGREFIWNDLLSLETGSLKLANGRVIEKTLYNRRTRQDEPALFVALTFERREVLDSSNIKPMNLIGVDRGENIPAVIALTDPEGCPLSRFKDSLGNPTHILRIGESYKEKQRTIQAKKEVEQRRAGGYSRKYASKAKNLADDMVRNTARDLLYYAVTQDAMLIFENLSRGFGRQGKRTFMAERQYTRMEDWLTAKLAYEGPLPSKTYLSKTLAQYTSKTCSNCGFTITSADYDRVLEKLKKTATGWMTTINGKELKVEGQITYYNRYKRQNVVKDLSVELDRLSEESVNNDISSWTKGRSGEALSLLKKRFSHRPVQEKFVCLNCGFETHADEQAALNIARSWLFLRSQEYKKYQTNKTTGNTDKRAFVETWQSFYRKKLKEVWKPAV

SEQ ID NO: 33976 - protein, 979 aa, synthetic construct
  REGION 1..979: note = engineered CasX variant
QEIKRINKIRRRLVKDSNTKKAGKTGPMKTLLVRVMTPDLRERLENLRKKPPNIPQPISNTSRANLNKLLTDYTEMKKAILHVYWEEFQKDPVGLMSRVAQPASKKIDQNKLKPEMDEKGNLTTAGFACSQCGQPLFVYKLEQVSEKGKAYTNYFGRCNVAEHEKLILLAQLKPEKDSDEAVTYSLGKFGQRALDFYSIHVTKESTHPVKPLAQIAGNRYASHPVGKALSDACMGTIASFLSKYQDIIIEHQKVVKGNQKRLESLRELAGKENLEYPSVTLPPQPHTKEGVDAYNEVIARVRMWVNLNLWQKLKLSRDDAKPLLRLKGFPSFPLVERQANEVDWWDMVCNVKKLINEKKEDGKVFWQNLAGYKRQEALRPYLSSEEDRKKGKKFARYQLGDLLLHLEKKHGEDWGKVYDEAWERIDKKVEGLSKHIKLEEERRSEDAQSKAALTDWLRAKASFVIEGLKEADKDEFCRCELKLQKWYGDLRGKPFAIEAENSILDISGFSKQYNCAFIWQKDGVKKLNLYLIINYFKGGKLRFKKIKPEAFEANRFYTVINKKSGEIVPMEVNFNFDDPNLIILPLAFGKRQGREFIWNDLLSLETGSLKLANGRVIEKTLYNRRTRQDEPALFVALTFERREVLDSSNIKPMNLIGVDRGENIPAVIALTDPEGCPLSRFKDSLGNPTHILRIGESYKEKQRTIQAKKEVEQRRAGGYSRKYASKAKNLADDMVRNTARDLLYYAVTQDAMLIFENLSRGFGRQGKRTFMAERQYTRMEDWLTAKLAYEGPLPSKTYLSKTLAQYTSKTCSNCGFTITSADYDRVLEKLKKTATGWMTTINGKELKVEGQITYYNRYKRQNVVKDLSVELDRLSEESVNNDISSWTKGRSGEALSLLKKRFSHRPVQEKFVCLNCGFETHADEQAALNIARSWLFLRSQEYKKYQTNKTTGNTDKRAFVETWQSFYRKKLKEVWKPAV

SEQ ID NO: 33977 - protein, 979 aa, synthetic construct
  REGION 1..979: note = engineered CasX variant
QEIKRINKIRRRLVKDSNTKKAGKTGPMKTLLVRVMTPDLRERLENLRKKPPNIPQPISNTSRANLNKLLTDYTEMKKAILHVYWEEFQKDPVGLMSRVAQPASKKIDQNKLKPEMDEKGNLTTAGFACSQCGQPLFVYKLEQVSEKGKAYTNYFGRCNVAEHEKLILLAQLKPEKDSDEAVTYSLGKFGQRALDFYSIHVTKESTHPVKPLAQIAGNRYASSPVGKALSDACMGTIASFLSKYQDIIIEHQKVVKGNQKRLESLRELAGKENLEYPSVTLPPQPHTKEGVDAYNEVIARVRMWVNLNLWQKLKLSRDDAKPLLRLKGFPSFPLVERQANEVDWWDMVCNVKKLINEKKEDGKVFWQNLAGYKRQEALRPYLSSEEDRKKGKKFARYQLGDLLLHLEKKHGEDWGKVYDEAWERIDKKVEGLSKHIKLEEERRSEDAQSKAALTDWLRAKASFVIEGLKEADKDEFCRCELKLQKWYGDLRGKPFAIEAENSILDISGFSKQYNCAFIWQKDGVKKLNLYLIINYFKGGKLRFKKIKPEAFEANRFYTVINKKSGEIVPMEVNFNFDDPNLIILPLAFGKRQGREFIWNDLLSLETGSLKLANGRVIEKTLYNRRTRQDEPALFVALTFERREVLDSSNIKPMNLIGVDRGENIPAVIALTDPEGCPLSRFKDSLGNPTHILRIGESYKEKQRTIQAKKEVEQRRAGGYSRKYASKAKNLADDMVRNTARDLLYYAVTQDAMLIFENLSRGFGRQGKRTFMAERQYTRMEDWLTAKLAYEGPLPSKTYLSKTLAQYTSKTCSNCGFTITSADYDRVLEKLKKTATGWMTTINGKELKVEGQITYYNRYKRQNVVKDLSVELDRLSEESVNNDISSWTKGRSGEALSLLKKRFSHRPVQEKFVCLNCGFETHADEQAALNIARSWLFLRSQEYKKYQTNKTTGNTDKRAFVETWQSFYRKKLKEVWKPAV

SEQ ID NO: 33978 - protein, 979 aa, synthetic construct
  REGION 1..979: note = engineered CasX variant
QEIKRINKIRRRLVKDSNTKKAGKTGPMKTLLVRVMTPDLRERLENLRKKPPNIPQPISNTSRANLNKLLTDYTEMKKAILHVYWEEFQKDPVGLMSRVAQPASKKIDQNKLKPEMDEKGNLTTAGFACSQCGQPLFVYKLEQVSEKGKAYTNYFGRCNVAEHEKLILLAQLKPEKDSDEAVTYSLGKFGQRALDFYSIHVTKESTHPVKPLAQIAGNRYASTPVGKALSDACMGTIASFLSKYQDIIIEHQKVVKGNQKRLESLRELAGKENLEYPSVTLPPQPHTKEGVDAYNEVIARVRMWVNLNLWQKLKLSRDDAKPLLRLKGFPSFPLVERQANEVDWWDMVCNVKKLINEKKEDGKVFWQNLAGYKRQEALRPYLSSEEDRKKGKKFARYQLGDLLLHLEKKHGEDWGKVYDEAWERIDKKVEGLSKHIKLEEERRSEDAQSKAALTDWLRAKASFVIEGLKEADKDEFCRCELKLQKWYGDLRGKPFAIEAENSILDISGFSKQYNCAFIWQKDGVKKLNLYLIINYFKGGKLRFKKIKPEAFEANRFYTVINKKSGEIVPMEVNFNFDDPNLIILPLAFGKRQGREFIWNDLLSLETGSLKLANGRVIEKTLYNRRTRQDEPALFVALTFERREVLDSSNIKPMNLIGVDRGENIPAVIALTDPEGCPLSRFKDSLGNPTHILRIGESYKEKQRTIQAKKEVEQRRAGGYSRKYASKAKNLADDMVRNTARDLLYYAVTQDAMLIFENLSRGFGRQGKRTFMAERQYTRMEDWLTAKLAYEGPLPSKTYLSKTLAQYTSKTCSNCGFTITSADYDRVLEKLKKTATGWMTTINGKELKVEGQITYYNRYKRQNVVKDLSVELDRLSEESVNNDISSWTKGRSGEALSLLKKRFSHRPVQEKFVCLNCGFETHADEQAALNIARSWLFLRSQEYKKYQTNKTTGNTDKRAFVETWQSFYRKKLKEVWKPAV

SEQ ID NO: 33979 - protein, 979 aa, synthetic construct
  REGION 1..979: note = engineered CasX variant
QEIKRINKIRRRLVKDSNTKKAGKTGPMKTLLVRVMTPDLRERLENLRKKPPNIPQPISNTSRANLNKLLTDYTEMKKAILHVYWEEFQKDPVGLMSRVAQPASKKIDQNKLKPEMDEKGNLTTAGFACSQCGQPLFVYKLEQVSEKGKAYTNYFGRCNVAEHEKLILLAQLKPEKDSDEAVTYSLGKFGQRALDFYSIHVTKESTHPVKPLAQIAGNRYASAPVGKALSDACMGTIASFLSKYQDIIIEHQKVVKGNQKRLESLRELAGKENLEYPSVTLPPQPHTKEGVDAYNEVIARVRMWVNLNLWQKLKLSRDDAKPLLRLKGFPSFPLVERQANEVDWWDMVCNVKKLINEKKEDGKVFWQNLAGYKRQEALRPYLSSEEDRKKGKKFARYQLGDLLLHLEKKHGEDWGKVYDEAWERIDKKVEGLSKHIKLEEERRSEDAQSKAALTDWLRAKASFVIEGLKEADKDEFCRCELKLQKWYGDLRGKPFAIEAENSILDISGFSKQYNCAFIWQKDGVKKLNLYLIINYFKGGKLRFKKIKPEAFEANRFYTVINKKSGEIVPMEVNFNFDDPNLIILPLAFGKRQGREFIWNDLLSLETGSLKLANGRVIEKTLYNRRTRQDEPALFVALTFERREVLDSSNIKPMNLIGVDRGENIPAVIALTDPEGCPLSRFKDSLGNPTHILRIGESYKEKQRTIQAKKEVEQRRAGGYSRKYASKAKNLADDMVRNTARDLLYYAVTQDAMLIFENLSRGFGRQGKRTFMAERQYTRMEDWLTAKLAYEGPLPSKTYLSKTLAQYTSKTCSNCGFTITSADYDRVLEKLKKTATGWMTTINGKELKVEGQITYYNRYKRQNVVKDLSVELDRLSEESVNNDISSWTKGRSGEALSLLKKRFSHRPVQEKFVCLNCGFETHADEQAALNIARSWLFLRSQEYKKYQTNKTTGNTDKRAFVETWQSFYRKKLKEVWKPAV

SEQ ID NO: 33980 - protein, 979 aa, synthetic construct
  REGION 1..979: note = engineered CasX variant
QEIKRINKIRRRLVKDSNTKKAGKTGPMKTLLVRVMTPDLRERLENLRKKPPNIPQPISNTSRANLNKLLTDYTEMKKAILHVYWEEFQKDPVGLMSRVAQPASKKIDQNKLKPEMDEKGNLTTAGFACSQCGQPLFVYKLEQVSEKGKAYTNYFGRCNVAEHEKLILLAQLKPEKDSDEAVTYSLGKFGQRALDFYSIHVTKESTHPVKPLAQIAGNRYASVPVGKALSDACMGTIASFLSKYQDIIIEHQKVVKGNQKRLESLRELAGKENLEYPSVTLPPQPHTKEGVDAYNEVIARVRMWVNLNLWQKLKLSRDDAKPLLRLKGFPSFPLVERQANEVDWWDMVCNVKKLINEKKEDGKVFWQNLAGYKRQEALRPYLSSEEDRKKGKKFARYQLGDLLLHLEKKHGEDWGKVYDEAWERIDKKVEGLSKHIKLEEERRSEDAQSKAALTDWLRAKASFVIEGLKEADKDEFCRCELKLQKWYGDLRGKPFAIEAENSILDISGFSKQYNCAFIWQKDGVKKLNLYLIINYFKGGKLRFKKIKPEAFEANRFYTVINKKSGEIVPMEVNFNFDDPNLIILPLAFGKRQGREFIWNDLLSLETGSLKLANGRVIEKTLYNRRTRQDEPALFVALTFERREVLDSSNIKPMNLIGVDRGENIPAVIALTDPEGCPLSRFKDSLGNPTHILRIGESYKEKQRTIQAKKEVEQRRAGGYSRKYASKAKNLADDMVRNTARDLLYYAVTQDAMLIFENLSRGFGRQGKRTFMAERQYTRMEDWLTAKLAYEGPLPSKTYLSKTLAQYTSKTCSNCGFTITSADYDRVLEKLKKTATGWMTTINGKELKVEGQITYYNRYKRQNVVKDLSVELDRLSEESVNNDISSWTKGRSGEALSLLKKRFSHRPVQEKFVCLNCGFETHADEQAALNIARSWLFLRSQEYKKYQTNKTTGNTDKRAFVETWQSFYRKKLKEVWKPAV

SEQ ID NO: 33981 - protein, 979 aa, synthetic construct
  REGION 1..979: note = engineered CasX variant
QEIKRINKIRRRLVKDSNTKKAGKTGPMKTLLVRVMTPDLRERLENLRKKPPNIPQPISNTSRANLNKLLTDYTEMKKAILHVYWEEFQKDPVGLMSRVAQPASKKIDQNKLKPEMDEKGNLTTAGFACSQCGQPLFVYKLEQVSEKGKAYTNYFGRCNVAEHEKLIKLAQLKPEKDSDEAVTYSLGKFGQRALDFYSIHVTKESTHPVKPLAQIAGNRYASGPVGKALSDACMGTIASFLSKYQDIIIEHQKVVKGNQKRLESLRELAGKENLEYPSVTLPPQPHTKEGVDAYNEVIARVRMWVNLNLWQKLKLSRDDAKPLLRLKGFPSFPLVERQANEVDWWDMVCNVKKLINEKKEDGKVFWQNLAGYKRQEALRPYLSSEEDRKKGKKFARYQLGDLLLHLEKKHGEDWGKVYDEAWERIDKKVEGLSKHIKLEEERRSEDAQSKAALTDWLRAKASFVIEGLKEADKDEFCRCELKLQKWYGDLRGKPFAIEAENSILDISGFSKQYNCAFIWQKDGVKKLNLYLIINYFKGGKLRFKKIKPEAFEANRFYTVINKKSGEIVPMEVNFNFDDPNLIILPLAFGKRQGREFIWNDLLSLETGSLKLANGRVIEKTLYNRRTRQDEPALFVALTFERREVLDSSNIKPMNLIGVDRGENIPAVIALTDPEGCPLSRFKDSLGNPTHILRIGESYKEKQRTIQAKKEVEQRRAGGYSRKYASKAKNLADDMVRNTARDLLYYAVTQDAMLIFENLSRGFGRQGKRTFMAERQYTRMEDWLTAKLAYEGPLPSKTYLSKTLAQYTSKTCSNCGFTITSADYDRVLEKLKKTATGWMTTINGKELKVEGQITYYNRYKRQNVVKDLSVELDRLSEESVNNDISSWTKGRSGEALSLLKKRFSHRPVQEKFVCLNCGFETHADEQAALNIARSWLFLRSQEYKKYQTNKTTGNTDKRAFVETWQSFYRKKLKEVWKPAV

SEQ ID NO: 33982 - protein, 978 aa, synthetic construct
  REGION 1..978: note = engineered CasX variant
QEIKRINKIRRRLVKDSNTKKAGKTGPMKTLLVRVMTPDLRERLENLRKKPPNIPQPISNTSRANLNKLLTDYTEMKKAILHVYWEEFQKDPVGLMSRVAQPASKKIDQNKLKPEMDEKGNLTTAGFACSQCGQPLFVYKLEQVSEKGKAYTNYFGRCNVAEHEKLILLAQLKPEKDSDEAVTYSLGKFGQRALDFYSIHVTKESTHPVKPLAQIAGNRYASPVGKALSDACMGTIASFLSKYQDIIIEHQKVVKGNQKRLESLRELAGKENLEYPSVTLPPQPHTKEGVDAYNEVIARVRMWVNLNLWQKLKLSRDDAKPLLRLKGFPSFPLVERQANEVDWWDMVCNVKKLINEKKEDGKVFWQNLAGYKRQEALRPYLSSEEDRKKGKKFARYQLGDLLLHLEKKHGEDWGKVYDEAWERIDKKVEGLSKHIKLEEERRSEDAQSKAALTDWLRAKASFVIEGLKEADKDEFCRCELKLQKWYGDLRGKPFAIEAENSILDISGFSKQYNCAFIWQKDGVKKLNLYLIINYFKGGKLRFKKIKPEAFEANRFYTVINKKSGEIVPMEVNFNFDDPNLIILPLAFGKRQGREFIWNDLLSLETGSLKLANGRVIEKTLYNRRTRQDEPALFVALTFERREVLDSSNIKPMNLIGVDRGENIPAVIALTDPEGCPLSRFKDSLGNPTHILRIGESYKEKQRTIQAKKEVEQRRAGGYSRKYASKAKNLADDMVRNTARDLLYYAVTQDAMLIFENLSRGFGRQGKRTFMAERQYTRMEDWLTAKLAYEGPLPSKTYLSKTLAQYTSKTCSNCGFTITSADYDRVLEKLKKTATGWMTTINGKELKVEGQITYYNRYKRQNVVKDLSVELDRLSEESVNNDISSWTKGRSGEALSLLKKRFSHRPVQEKFVCLNCGFETHADEQAALNIARSWLFLRSQEYKKYQTNKTTGNTDKRAFVETWQSFYRKKLKEVWKPAV

SEQ ID NO: 33983 - protein, 979 aa, synthetic construct
  REGION 1..979: note = engineered CasX variant
QEIKRINKIRRRLVKDSNTKKAGKTGPMKTLLVRVMTPDLRERLENLRKKPPNIPQPISNTSRANLNKLLTDYTEMKKAILHVYWEEFQKDPVGLMSRVAQPASKKIDQNKLKPEMDEKGNLTTAGFACSQCGQPLFVYKLEQVSEKGKAYTNYFGRCNVAEHEKLILLAQLKPEKDSDEAVTYSLGKFGQRALDFYSIHVTKESTHPVKPLAQIAGNRYASYPVGKALSDACMGTIASFLSKYQDIIIEHQKVVKGNQKRLESLRELAGKENLEYPSVTLPPQPHTKEGVDAYNEVIARVRMWVNLNLWQKLKLSRDDAKPLLRLKGFPSFPLVERQANEVDWWDMVCNVKKLINEKKEDGKVFWQNLAGYKRQEALRPYLSSEEDVRKKGKKFARYQLGDLLLHLEKKHGEDWGKVYDEAWERIDKKVEGLSKHIKLEEERRSEDAQSKAALTDWLRAKASFVIEGLKEADKDEFCRCELKLQKWYGDLRGKPFAIEAENSILDISGFSKQYNCAFIWQKDGVKKLNLYLIINYFKGGKLRFKKIKPEAFEANRFYTVINKKSGEIVPMEVNFNFDDPNLIILPLAFGKRQGREFIWNDLLSLETGSLKLANGRVIEKTLYNRRTRQDEPALFVALTFERREVLDSSNIKPMNLIGVDRGENIPAVIALTDPEGCPLSRFKDSLGNPTHILRIGESYKEKQRTIQAKKEVEQRRAGGYSRKYASKAKNLADDMVRNTARDLLYYAVTQDAMLIFENLSRGFGRQGKRTFMAERQYTRMEDWLTAKLAYEGLPSKTYLSKTLAQYTSKTCSNCGFTITSADYDRVLEKLKKTATGWMTTINGKELKVEGQITYYNRYKRQNVVKDLSVELDRLSEESVNNDISSWTKGRSGEALSLLKKRFSHRPVQEKFVCLNCGFETHADEQAALNIARSWLFLRSQEYKKYQTNKTTGNTDKRAFVETWQSFYRKKLKEVWKPAV

SEQ ID NO: 33984 - protein, 979 aa, synthetic construct
  REGION 1..979: note = engineered CasX variant
QEIKRINKIRRRLVKDSNTKKAGKTGPMKTLLVRVMTPDLRERLENLRKKPPNIPQPISNTSRANLNKLLTDYTEMKKAILHVYWEEFQKDPVGLMSRVAQPASKKIDQNKLKPEMDEKGNLTTAGFACSQCGQPLFVYKLEQVSEKGKAYTNYFGRCNVAEHEKLILLAQLKPEKDSDEAVTYSLGKFGQRALDFYSIHVTKESTHPVKPLAQIAGNRYASHPVGKALSDACMGTIASFLSKYQDIIIEHQKVVKGNQKRLESLRELAGKENLEYPSVTLPPQPHTKEGVDAYNEVIARVRMWVNLNLWQKLKLSRDDAKPLLRLKGFPSFPLVERQANEVDWWDMVCNVKKLINEKKEDGKVFWQNLAGYKRQEALRPYLSSEEDVRKKGKKFARYQLGDLLLHLEKKHGEDWGKVYDEAWERIDKKVEGLSKHIKLEEERRSEDAQSKAALTDWLRAKASFVIEGLKEADKDEFCRCELKLQKWYGDLRGKPFAIEAENSILDISGFSKQYNCAFIWQKDGVKKLNLYLIINYFKGGKLRFKKIKPEAFEANRFYTVINKKSGEIVPMEVNFNFDDPNLIILPLAFGKRQGREFIWNDLLSLETGSLKLANGRVIEKTLYNRRTRQDEPALFVALTFERREVLDSSNIKPMNLIGVDRGENIPAVIALTDPEGCPLSRFKDSLGNPTHILRIGESYKEKQRTIQAKKEVEQRRAGGYSRKYASKAKNLADDMVRNTARDLLYYAVTQDAMLIFENLSRGFGRQGKRTFMAERQYTRMEDWLTAKLAYEGLPSKTYLSKTLAQYTSKTCSNCGFTITSADYDRVLEKLKKTATGWMTTINGKELKVEGQITYYNRYKRQNVVKDLSVELDRLSEESVNNDISSWTKGRSGEALSLLKKRFSHRPVQEKFVCLNCGFETHADEQAALNIARSWLFLRSQEYKKYQTNKTTGNTDKRAFVETWQSFYRKKLKEVWKPAV

SEQ ID NO: 33985 - protein, 979 aa, synthetic construct
  REGION 1..979: note = engineered CasX variant
QEIKRINKIRRRLVKDSNTKKAGKTGPMKTLLVRVMTPDLRERLENLRKKPPNIPQPISNTSRANLNKLLTDYTEMKKAILHVYWEEFQKDPVGLMSRVAQPASKKIDQNKLKPEMDEKGNLTTAGFACSQCGQPLFVYKLEQVSEKGKAYTNYFGRCNVAEHEKLILLAQLKPEKDSDEAVTYSLGKFGQRALDFYSIHVTKESTHPVKPLAQIAGNRYASSPVGKALSDACMGTIASFLSKYQDIIIEHQKVVKGNQKRLESLRELAGKENLEYPSVTLPPQPHTKEGVDAYNEVIARVRMWVNLNLWQKLKLSRDDAKPLLRLKGFPSFPLVERQANEVDWWDMVCNVKKLINEKKEDGKVFWQNLAGYKRQEALRPYLSSEEDVRKKGKKFARYQLGDLLLHLEKKHGEDWGKVYDEAWERIDKKVEGLSKHIKLEEERRSEDAQSKAALTDWLRAKASFVIEGLKEADKDEFCRCELKLQKWYGDLRGKPFAIEAENSILDISGFSKQYNCAFIWQKDGVKKLNLYLIINYFKGGKLRFKKIKPEAFEANRFYTVINKKSGEIVPMEVNFNFDDPNLIILPLAFGKRQGREFIWNDLLSLETGSLKLANGRVIEKTLYNRRTRQDEPALFVALTFERREVLDSSNIKPMNLIGVDRGENIPAVIALTDPEGCPLSRFKDSLGNPTHILRIGESYKEKQRTIQAKKEVEQRRAGGYSRKYASKAKNLADDMVRNTARDLLYYAVTQDAMLIFENLSRGFGRQGKRTFMAERQYTRMEDWLTAKLAYEGLPSKTYLSKTLAQYTSKTCSNCGFTITSADYDRVLEKLKKTATGWMTTINGKELKVEGQITYYNRYKRQNVVKDLSVELDRLSEESVNNDISSWTKGRSGEALSLLKKRFSHRPVQEKFVCLNCGFETHADEQAALNIARSWLFLRSQEYKKYQTNKTTGNTDKRAFVETWQSFYRKKLKEVWKPAV

SEQ ID NO: 33986 - protein, 979 aa, synthetic construct
  REGION 1..979: note = engineered CasX variant
QEIKRINKIRRRLVKDSNTKKAGKTGPMKTLLVRVMTPDLRERLENLRKKPPNIPQPISNTSRANLNKLLTDYTEMKKAILHVYWEEFQKDPVGLMSRVAQPASKKIDQNKLKPEMDEKGNLTTAGFACSQCGQPLFVYKLEQVSEKGKAYTNYFGRCNVAEHEKLILLAQLKPEKDSDEAVTYSLGKFGQRALDFYSIHVTKESTHPVKPLAQIAGNRYASTPVGKALSDACMGTIASFLSKYQDIIIEHQKVVKGNQKRLESLRELAGKENLEYPSVTLPPQPHTKEGVDAYNEVIARVRMWVNLNLWQKLKLSRDDAKPLLRLKGFPSFPLVERQANEVDWWDMVCNVKKLINEKKEDGKVFWQNLAGYKRQEALRPYLSSEEDVRKKGKKFARYQLGDLLLHLEKKHGEDWGKVYDEAWERIDKKVEGLSKHIKLEEERRSEDAQSKAALTDWLRAKASFVIEGLKEADKDEFCRCELKLQKWYGDLRGKPFAIEAENSILDISGFSKQYNCAFIWQKDGVKKLNLYLIINYFKGGKLRFKKIKPEAFEANRFYTVINKKSGEIVPMEVNFNFDDPNLIILPLAFGKRQGREFIWNDLLSLETGSLKLANGRVIEKTLYNRRTRQDEPALFVALTFERREVLDSSNIKPMNLIGVDRGENIPAVIALTDPEGCPLSRFKDSLGNPTHILRIGESYKEKQRTIQAKKEVEQRRAGGYSRKYASKAKNLADDMVRNTARDLLYYAVTQDAMLIFENLSRGFGRQGKRTFMAERQYTRMEDWLTAKLAYEGLPSKTYLSKTLAQYTSKTCSNCGFTITSADYDRVLEKLKKTATGWMTTINGKELKVEGQITYYNRYKRQNVVKDLSVELDRLSEESVNNDISSWTKGRSGEALSLLKKRFSHRPVQEKFVCLNCGFETHADEQAALNIARSWLFLRSQEYKKYQTNKTTGNTDKRAFVETWQSFYRKKLKEVWKPAV

SEQ ID NO: 33987 - protein, 979 aa, synthetic construct
  REGION 1..979: note = engineered CasX variant
QEIKRINKIRRRLVKDSNTKKAGKTGPMKTLLVRVMTPDLRERLENLRKKPPNIPQPISNTSRANLNKLLTDYTEMKKAILHVYWEEFQKDPVGLMSRVAQPASKKIDQNKLKPEMDEKGNLTTAGFACSQCGQPLFVYKLEQVSEKGKAYTNYFGRCNVAEHEKLILLAQLKPEKDSDEAVTYSLGKFGQRALDFYSIHVTKESTHPVKPLAQIAGNRYASAPVGKALSDACMGTIASFLSKYQDIIIEHQKVVKGNQKRLESLRELAGKENLEYPSVTLPPQPHTKEGVDAYNEVIARVRMWVNLNLWQKLKLSRDDAKPLLRLKGFPSFPLVERQANEVDWWDMVCNVKKLINEKKEDGKVFWQNLAGYKRQEALRPYLSSEEDVRKKGKKFARYQLGDLLLHLEKKHGEDWGKVYDEAWERIDKKVEGLSKHIKLEEERRSEDAQSKAALTDWLRAKASFVIEGLKEADKDEFCRCELKLQKWYGDLRGKPFAIEAENSILDISGFSKQYNCAFIWQKDGVKKLNLYLIINYFKGGKLRFKKIKPEAFEANRFYTVINKKSGEIVPMEVNFNFDDPNLIILPLAFGKRQGREFIWNDLLSLETGSLKLANGRVIEKTLYNRRTRQDEPALFVALTFERREVLDSSNIKPMNLIGVDRGENIPAVIALTDPEGCPLSRFKDSLGNPTHILRIGESYKEKQRTIQAKKEVEQRRAGGYSRKYASKAKNLADDMVRNTARDLLYYAVTQDAMLIFENLSRGFGRQGKRTFMAERQYTRMEDWLTAKLAYEGLPSKTYLSKTLAQYTSKTCSNCGFTITSADYDRVLEKLKKTATGWMTTINGKELKVEGQITYYNRYKRQNVVKDLSVELDRLSEESVNNDISSWTKGRSGEALSLLKKRFSHRPVQEKFVCLNCGFETHADEQAALNIARSWLFLRSQEYKKYQTNKTTGNTDKRAFVETWQSFYRKKLKEVWKPAV

SEQ ID NO: 33988 - protein, 979 aa, synthetic construct
  REGION 1..979: note = engineered CasX variant
QEIKRINKIRRRLVKDSNTKKAGKTGPMKTLLVRVMTPDLRERLENLRKKPPNIPQPISNTSRANLNKLLTDYTEMKKAILHVYWEEFQKDPVGLMSRVAQPASKKIDQNKLKPEMDEKGNLTTAGFACSQCGQPLFVYKLEQVSEKGKAYTNYFGRCNVAEHEKLILLAQLKPEKDSDEAVTYSLGKFGQRALDFYSIHVTKESTHPVKPLAQIAGNRYASVPVGKALSDACMGTIASFLSKYQDIIIEHQKVVKGNQKRLESLRELAGKENLEYPSVTLPPQPHTKEGVDAYNEVIARVRMWVNLNLWQKLKLSRDDAKPLLRLKGFPSFPLVERQANEVDWWDMVCNVKKLINEKKEDGKVFWQNLAGYKRQEALRPYLSSEEDVRKKGKKFARYQLGDLLLHLEKKHGEDWGKVYDEAWERIDKKVEGLSKHIKLEEERRSEDAQSKAALTDWLRAKASFVIEGLKEADKDEFCRCELKLQKWYGDLRGKPFAIEAENSILDISGFSKQYNCAFIWQKDGVKKLNLYLIINYFKGGKLRFKKIKPEAFEANRFYTVINKKSGEIVPMEVNFNFDDPNLIILPLAFGKRQGREFIWNDLLSLETGSLKLANGRVIEKTLYNRRTRQDEPALFVALTFERREVLDSSNIKPMNLIGVDRGENIPAVIALTDPEGCPLSRFKDSLGNPTHILRIGESYKEKQRTIQAKKEVEQRRAGGYSRKYASKAKNLADDMVRNTARDLLYYAVTQDAMLIFENLSRGFGRQGKRTFMAERQYTRMEDWLTAKLAYEGLPSKTYLSKTLAQYTSKTCSNCGFTITSADYDRVLEKLKKTATGWMTTINGKELKVEGQITYYNRYKRQNVVKDLSVELDRLSEESVNNDISSWTKGRSGEALSLLKKRFSHRPVQEKFVCLNCGFETHADEQAALNIARSWLFLRSQEYKKYQTNKTTGNTDKRAFVETWQSFYRKKLKEVWKPAV

SEQ ID NO: 33989 - protein, 979 aa, synthetic construct
  REGION 1..979: note = engineered CasX variant
QEIKRINKIRRRLVKDSNTKKAGKTGPMKTLLVRVMTPDLRERLENLRKKPPNIPQPISNTSRANLNKLLTDYTEMKKAILHVYWEEFQKDPVGLMSRVAQPASKKIDQNKLKPEMDEKGNLTTAGFACSQCGQPLFVYKLEQVSEKGKAYTNYFGRCNVAEHEKLIKLAQLKPEKDSDEAVTYSLGKFGQRALDFYSIHVTKESTHPVKPLAQIAGNRYASGPVGKALSDACMGTIASFLSKYQDIIIEHQKVVKGNQKRLESLRELAGKENLEYPSVTLPPQPHTKEGVDAYNEVIARVRMWVNLNLWQKLKLSRDDAKPLLRLKGFPSFPLVERQANEVDWWDMVCNVKKLINEKKEDGKVFWQNLAGYKRQEALRPYLSSEEDVRKKGKKFARYQLGDLLLHLEKKHGEDWGKVYDEAWERIDKKVEGLSKHIKLEEERRSEDAQSKAALTDWLRAKASFVIEGLKEADKDEFCRCELKLQKWYGDLRGKPFAIEAENSILDISGFSKQYNCAFIWQKDGVKKLNLYLIINYFKGGKLRFKKIKPEAFEANRFYTVINKKSGEIVPMEVNFNFDDPNLIILPLAFGKRQGREFIWNDLLSLETGSLKLANGRVIEKTLYNRRTRQDEPALFVALTFERREVLDSSNIKPMNLIGVDRGENIPAVIALTDPEGCPLSRFKDSLGNPTHILRIGESYKEKQRTIQAKKEVEQRRAGGYSRKYASKAKNLADDMVRNTARDLLYYAVTQDAMLIFENLSRGFGRQGKRTFMAERQYTRMEDWLTAKLAYEGLPSKTYLSKTLAQYTSKTCSNCGFTITSADYDRVLEKLKKTATGWMTTINGKELKVEGQITYYNRYKRQNVVKDLSVELDRLSEESVNNDISSWTKGRSGEALSLLKKRFSHRPVQEKFVCLNCGFETHADEQAALNIARSWLFLRSQEYKKYQTNKTTGNTDKRAFVETWQSFYRKKLKEVWKPAV

SEQ ID NO: 33990 - protein, 978 aa, synthetic construct
  REGION 1..978: note = engineered CasX variant
QEIKRINKIRRRLVKDSNTKKAGKTGPMKTLLVRVMTPDLRERLENLRKKPPNIPQPISNTSRANLNKLLTDYTEMKKAILHVYWEEFQKDPVGLMSRVAQPASKKIDQNKLKPEMDEKGNLTTAGFACSQCGQPLFVYKLEQVSEKGKAYTNYFGRCNVAEHEKLILLAQLKPEKDSDEAVTYSLGKFGQRALDFYSIHVTKESTHPVKPLAQIAGNRYASPVGKALSDACMGTIASFLSKYQDIIIEHQKVVKGNQKRLESLRELAGKENLEYPSVTLPPQPHTKEGVDAYNEVIARVRMWVNLNLWQKLKLSRDDAKPLLRLKGFPSFPLVERQANEVDWWDMVCNVKKLINEKKEDGKVFWQNLAGYKRQEALRPYLSSEEDVRKKGKKFARYQLGDLLLHLEKKHGEDWGKVYDEAWERIDKKVEGLSKHIKLEEERRSEDAQSKAALTDWLRAKASFVIEGLKEADKDEFCRCELKLQKWYGDLRGKPFAIEAENSILDISGFSKQYNCAFIWQKDGVKKLNLYLIINYFKGGKLRFKKIKPEAFEANRFYTVINKKSGEIVPMEVNFNFDDPNLIILPLAFGKRQGREFIWNDLLSLETGSLKLANGRVIEKTLYNRRTRQDEPALFVALTFERREVLDSSNIKPMNLIGVDRGENIPAVIALTDPEGCPLSRFKDSLGNPTHILRIGESYKEKQRTIQAKKEVEQRRAGGYSRKYASKAKNLADDMVRNTARDLLYYAVTQDAMLIFENLSRGFGRQGKRTFMAERQYTRMEDWLTAKLAYEGLPSKTYLSKTLAQYTSKTCSNCGFTITSADYDRVLEKLKKTATGWMTTINGKELKVEGQITYYNRYKRQNVVKDLSVELDRLSEESVNNDISSWTKGRSGEALSLLKKRFSHRPVQEKFVCLNCGFETHADEQAALNIARSWLFLRSQEYKKYQTNKTTGNTDKRAFVETWQSFYRKKLKEVWKPAV

SEQ ID NO: 33991 - protein, 978 aa, synthetic construct
  REGION 1..978: note = engineered CasX variant
QEIKRINKIRRRLVKDSNTKKAGKTGPMKTLLVRVMTPDLRERLENLRKKPPNIPQPISNTSRANLNKLLTDYTEMKKAILHVYWEEFQKDPVGLMSRVAQPASKKIDQNKLKPEMDEKGNLTTAGFACSQCGQPLFVYKLEQVSEKGKAYTNYFGRCNVAEHEKLILLAQLKPEKDSDEAVTYSLGKFGQRALDFYSIHVTKESTHPVKPLAQIAGNRYASYPVGKALSDACMGTIASFLSKYQDIIIEHQKVVKGNQKRLESLRELAGKENLEYPSVTLPPQPHTKEGVDAYNEVIARVRMWVNLNLWQKLKLSRDDAKPLLRLKGFPSFPLVERQANEVDWWDMVCNVKKLINEKKEDGKVFWQNLAGYKRQEALRPYLSSEEDRKKGKKFARYQLGDLLLHLEKKHGEDWGKVYDEAWERIDKKVEGLSKHIKLEEERRSEDAQSKAALTDWLRAKASFVIEGLKEADKDEFCRCELKLQKWYGDLRGKPFAIEAENSILDISGFSKQYNCAFIWQKDGVKKLNLYLIINYFKGGKLRFKKIKPEAFEANRFYTVINKKSGEIVPMEVNFNFDDPNLIILPLAFGKRQGREFIWNDLLSLETGSLKLANGRVIEKTLYNRRTRQDEPALFVALTFERREVLDSSNIKPMNLIGVDRGENIPAVIALTDPEGCPLSRFKDSLGNPTHILRIGESYKEKQRTIQAKKEVEQRRAGGYSRKYASKAKNLADDMVRNTARDLLYYAVTQDAMLIFENLSRGFGRQGKRTFMAERQYTRMEDWLTAKLAYEGLPSKTYLSKTLAQYTSKTCSNCGFTITSADYDRMLEKLKKTATGWMTTINGKELKVEGQITYYNRYKRQNVVKDLSVELDRLSEESVNNDISSWTKGRSGEALSLLKKRFSHRPVQEKFVCLNCGFETHADEQAALNIARSWLFLRSQEYKKYQTNKTTGNTDKRAFVETWQSFYRKKLKEVWKPAV

SEQ ID NO: 33992 - protein, 978 aa, synthetic construct
  REGION 1..978: note = engineered CasX variant
QEIKRINKIRRRLVKDSNTKKAGKTGPMKTLLVRVMTPDLRERLENLRKKPPNIPQPISNTSRANLNKLLTDYTEMKKAILHVYWEEFQKDPVGLMSRVAQPASKKIDQNKLKPEMDEKGNLTTAGFACSQCGQPLFVYKLEQVSEKGKAYTNYFGRCNVAEHEKLILLAQLKPEKDSDEAVTYSLGKFGQRALDFYSIHVTKESTHPVKPLAQIAGNRYASHPVGKALSDACMGTIASFLSKYQDIIIEHQKVVKGNQKRLESLRELAGKENLEYPSVTLPPQPHTKEGVDAYNEVIARVRMWVNLNLWQKLKLSRDDAKPLLRLKGFPSFPLVERQANEVDWWDMVCNVKKLINEKKEDGKVFWQNLAGYKRQEALRPYLSSEEDRKKGKKFARYQLGDLLLHLEKKHGEDWGKVYDEAWERIDKKVEGLSKHIKLEEERRSEDAQSKAALTDWLRAKASFVIEGLKEADKDEFCRCELKLQKWYGDLRGKPFAIEAENSILDISGFSKQYNCAFIWQKDGVKKLNLYLIINYFKGGKLRFKKIKPEAFEANRFYTVINKKSGEIVPMEVNFNFDDPNLIILPLAFGKRQGREFIWNDLLSLETGSLKLANGRVIEKTLYNRRTRQDEPALFVALTFERREVLDSSNIKPMNLIGVDRGENIPAVIALTDPEGCPLSRFKDSLGNPTHILRIGESYKEKQRTIQAKKEVEQRRAGGYSRKYASKAKNLADDMVRNTARDLLYYAVTQDAMLIFENLSRGFGRQGKRTFMAERQYTRMEDWLTAKLAYEGLPSKTYLSKTLAQYTSKTCSNCGFTITSADYDRMLEKLKKTATGWMTTINGKELKVEGQITYYNRYKRQNVVKDLSVELDRLSEESVNNDISSWTKGRSGEALSLLKKRFSHRPVQEKFVCLNCGFETHADEQAALNIARSWLFLRSQEYKKYQTNKTTGNTDKRAFVETWQSFYRKKLKEVWKPAV

SEQ ID NO: 33993 - protein, 978 aa, synthetic construct
  REGION 1..978: note = engineered CasX variant
QEIKRINKIRRRLVKDSNTKKAGKTGPMKTLLVRVMTPDLRERLENLRKKPPNIPQPISNTSRANLNKLLTDYTEMKKAILHVYWEEFQKDPVGLMSRVAQPASKKIDQNKLKPEMDEKGNLTTAGFACSQCGQPLFVYKLEQVSEKGKAYTNYFGRCNVAEHEKLILLAQLKPEKDSDEAVTYSLGKFGQRALDFYSIHVTKESTHPVKPLAQIAGNRYASSPVGKALSDACMGTIASFLSKYQDIIIEHQKVVKGNQKRLESLRELAGKENLEYPSVTLPPQPHTKEGVDAYNEVIARVRMWVNLNLWQKLKLSRDDAKPLLRLKGFPSFPLVERQANEVDWWDMVCNVKKLINEKKEDGKVFWQNLAGYKRQEALRPYLSSEEDRKKGKKFARYQLGDLLLHLEKKHGEDWGKVYDEAWERIDKKVEGLSKHIKLEEERRSEDAQSKAALTDWLRAKASFVIEGLKEADKDEFCRCELKLQKWYGDLRGKPFAIEAENSILDISGFSKQYNCAFIWQKDGVKKLNLYLIINYFKGGKLRFKKIKPEAFEANRFYTVINKKSGEIVPMEVNFNFDDPNLIILPLAFGKRQGREFIWNDLLSLETGSLKLANGRVIEKTLYNRRTRQDEPALFVALTFERREVLDSSNIKPMNLIGVDRGENIPAVIALTDPEGCPLSRFKDSLGNPTHILRIGESYKEKQRTIQAKKEVEQRRAGGYSRKYASKAKNLADDMVRNTARDLLYYAVTQDAMLIFENLSRGFGRQGKRTFMAERQYTRMEDWLTAKLAYEGLPSKTYLSKTLAQYTSKTCSNCGFTITSADYDRMLEKLKKTATGWMTTINGKELKVEGQITYYNRYKRQNVVKDLSVELDRLSEESVNNDISSWTKGRSGEALSLLKKRFSHRPVQEKFVCLNCGFETHADEQAALNIARSWLFLRSQEYKKYQTNKTTGNTDKRAFVETWQSFYRKKLKEVWKPAV

SEQ ID NO: 33994 - protein, 978 aa, synthetic construct
  REGION 1..978: note = engineered CasX variant
QEIKRINKIRRRLVKDSNTKKAGKTGPMKTLLVRVMTPDLRERLENLRKKPPNIPQPISNTSRANLNKLLTDYTEMKKAILHVYWEEFQKDPVGLMSRVAQPASKKIDQNKLKPEMDEKGNLTTAGFACSQCGQPLFVYKLEQVSEKGKAYTNYFGRCNVAEHEKLILLAQLKPEKDSDEAVTYSLGKFGQRALDFYSIHVTKESTHPVKPLAQIAGNRYASTPVGKALSDACMGTIASFLSKYQDIIIEHQKVVKGNQKRLESLRELAGKENLEYPSVTLPPQPHTKEGVDAYNEVIARVRMWVNLNLWQKLKLSRDDAKPLLRLKGFPSFPLVERQANEVDWWDMVCNVKKLINEKKEDGKVFWQNLAGYKRQEALRPYLSSEEDRKKGKKFARYQLGDLLLHLEKKHGEDWGKVYDEAWERIDKKVEGLSKHIKLEEERRSEDAQSKAALTDWLRAKASFVIEGLKEADKDEFCRCELKLQKWYGDLRGKPFAIEAENSILDISGFSKQYNCAFIWQKDGVKKLNLYLIINYFKGGKLRFKKIKPEAFEANRFYTVINKKSGEIVPMEVNFNFDDPNLIILPLAFGKRQGREFIWNDLLSLETGSLKLANGRVIEKTLYNRRTRQDEPALFVALTFERREVLDSSNIKPMNLIGVDRGENIPAVIALTDPEGCPLSRFKDSLGNPTHILRIGESYKEKQRTIQAKKEVEQRRAGGYSRKYASKAKNLADDMVRNTARDLLYYAVTQDAMLIFENLSRGFGRQGKRTFMAERQYTRMEDWLTAKLAYEGLPSKTYLSKTLAQYTSKTCSNCGFTITSADYDRMLEKLKKTATGWMTTINGKELKVEGQITYYNRYKRQNVVKDLSVELDRLSEESVNNDISSWTKGRSGEALSLLKKRFSHRPVQEKFVCLNCGFETHADEQAALNIARSWLFLRSQEYKKYQTNKTTGNTDKRAFVETWQSFYRKKLKEVWKPAV

SEQ ID NO: 33995 - protein, 978 aa, synthetic construct
  REGION 1..978: note = engineered CasX variant
QEIKRINKIRRRLVKDSNTKKAGKTGPMKTLLVRVMTPDLRERLENLRKKPPNIPQPISNTSRANLNKLLTDYTEMKKAILHVYWEEFQKDPVGLMSRVAQPASKKIDQNKLKPEMDEKGNLTTAGFACSQCGQPLFVYKLEQVSEKGKAYTNYFGRCNVAEHEKLILLAQLKPEKDSDEAVTYSLGKFGQRALDFYSIHVTKESTHPVKPLAQIAGNRYASAPVGKALSDACMGTIASFLSKYQDIIIEHQKVVKGNQKRLESLRELAGKENLEYPSVTLPPQPHTKEGVDAYNEVIARVRMWVNLNLWQKLKLSRDDAKPLLRLKGFPSFPLVERQANEVDWWDMVCNVKKLINEKKEDGKVFWQNLAGYKRQEALRPYLSSEEDRKKGKKFARYQLGDLLLHLEKKHGEDWGKVYDEAWERIDKKVEGLSKHIKLEEERRSEDAQSKAALTDWLRAKASFVIEGLKEADKDEFCRCELKLQKWYGDLRGKPFAIEAENSILDISGFSKQYNCAFIWQKDGVKKLNLYLIINYFKGGKLRFKKIKPEAFEANRFYTVINKKSGEIVPMEVNFNFDDPNLIILPLAFGKRQGREFIWNDLLSLETGSLKLANGRVIEKTLYNRRTRQDEPALFVALTFERREVLDSSNIKPMNLIGVDRGENIPAVIALTDPEGCPLSRFKDSLGNPTHILRIGESYKEKQRTIQAKKEVEQRRAGGYSRKYASKAKNLADDMVRNTARDLLYYAVTQDAMLIFENLSRGFGRQGKRTFMAERQYTRMEDWLTAKLAYEGLPSKTYLSKTLAQYTSKTCSNCGFTITSADYDRMLEKLKKTATGWMTTINGKELKVEGQITYYNRYKRQNVVKDLSVELDRLSEESVNNDISSWTKGRSGEALSLLKKRFSHRPVQEKFVCLNCGFETHADEQAALNIARSWLFLRSQEYKKYQTNKTTGNTDKRAFVETWQSFYRKKLKEVWKPAV

SEQ ID NO: 33996 - protein, 978 aa, synthetic construct
  REGION 1..978: note = engineered CasX variant
QEIKRINKIRRRLVKDSNTKKAGKTGPMKTLLVRVMTPDLRERLENLRKKPPNIPQPISNTSRANLNKLLTDYTEMKKAILHVYWEEFQKDPVGLMSRVAQPASKKIDQNKLKPEMDEKGNLTTAGFACSQCGQPLFVYKLEQVSEKGKAYTNYFGRCNVAEHEKLILLAQLKPEKDSDEAVTYSLGKFGQRALDFYSIHVTKESTHPVKPLAQIAGNRYASVPVGKALSDACMGTIASFLSKYQDIIIEHQKVVKGNQKRLESLRELAGKENLEYPSVTLPPQPHTKEGVDAYNEVIARVRMWVNLNLWQKLKLSRDDAKPLLRLKGFPSFPLVERQANEVDWWDMVCNVKKLINEKKEDGKVFWQNLAGYKRQEALRPYLSSEEDRKKGKKFARYQLGDLLLHLEKKHGEDWGKVYDEAWERIDKKVEGLSKHIKLEEERRSEDAQSKAALTDWLRAKASFVIEGLKEADKDEFCRCELKLQKWYGDLRGKPFAIEAENSILDISGFSKQYNCAFIWQKDGVKKLNLYLIINYFKGGKLRFKKIKPEAFEANRFYTVINKKSGEIVPMEVNFNFDDPNLIILPLAFGKRQGREFIWNDLLSLETGSLKLANGRVIEKTLYNRRTRQDEPALFVALTFERREVLDSSNIKPMNLIGVDRGENIPAVIALTDPEGCPLSRFKDSLGNPTHILRIGESYKEKQRTIQAKKEVEQRRAGGYSRKYASKAKNLADDMVRNTARDLLYYAVTQDAMLIFENLSRGFGRQGKRTFMAERQYTRMEDWLTAKLAYEGLPSKTYLSKTLAQYTSKTCSNCGFTITSADYDRMLEKLKKTATGWMTTINGKELKVEGQITYYNRYKRQNVVKDLSVELDRLSEESVNNDISSWTKGRSGEALSLLKKRFSHRPVQEKFVCLNCGFETHADEQAALNIARSWLFLRSQEYKKYQTNKTTGNTDKRAFVETWQSFYRKKLKEVWKPAV

SEQ ID NO: 33997 - protein, 978 aa, synthetic construct
  REGION 1..978: note = engineered CasX variant
QEIKRINKIRRRLVKDSNTKKAGKTGPMKTLLVRVMTPDLRERLENLRKKPPNIPQPISNTSRANLNKLLTDYTEMKKAILHVYWEEFQKDPVGLMSRVAQPASKKIDQNKLKPEMDEKGNLTTAGFACSQCGQPLFVYKLEQVSEKGKAYTNYFGRCNVAEHEKLIKLAQLKPEKDSDEAVTYSLGKFGQRALDFYSIHVTKESTHPVKPLAQIAGNRYASGPVGKALSDACMGTIASFLSKYQDIIIEHQKVVKGNQKRLESLRELAGKENLEYPSVTLPPQPHTKEGVDAYNEVIARVRMWVNLNLWQKLKLSRDDAKPLLRLKGFPSFPLVERQANEVDWWDMVCNVKKLINEKKEDGKVFWQNLAGYKRQEALRPYLSSEEDRKKGKKFARYQLGDLLLHLEKKHGEDWGKVYDEAWERIDKKVEGLSKHIKLEEERRSEDAQSKAALTDWLRAKASFVIEGLKEADKDEFCRCELKLQKWYGDLRGKPFAIEAENSILDISGFSKQYNCAFIWQKDGVKKLNLYLIINYFKGGKLRFKKIKPEAFEANRFYTVINKKSGEIVPMEVNFNFDDPNLIILPLAFGKRQGREFIWNDLLSLETGSLKLANGRVIEKTLYNRRTRQDEPALFVALTFERREVLDSSNIKPMNLIGVDRGENIPAVIALTDPEGCPLSRFKDSLGNPTHILRIGESYKEKQRTIQAKKEVEQRRAGGYSRKYASKAKNLADDMVRNTARDLLYYAVTQDAMLIFENLSRGFGRQGKRTFMAERQYTRMEDWLTAKLAYEGLPSKTYLSKTLAQYTSKTCSNCGFTITSADYDRMLEKLKKTATGWMTTINGKELKVEGQITYYNRYKRQNVVKDLSVELDRLSEESVNNDISSWTKGRSGEALSLLKKRFSHRPVQEKFVCLNCGFETHADEQAALNIARSWLFLRSQEYKKYQTNKTTGNTDKRAFVETWQSFYRKKLKEVWKPAV

SEQ ID NO: 33998 - protein, 977 aa, synthetic construct
  REGION 1..977: note = engineered CasX variant
QEIKRINKIRRRLVKDSNTKKAGKTGPMKTLLVRVMTPDLRERLENLRKKPPNIPQPISNTSRANLNKLLTDYTEMKKAILHVYWEEFQKDPVGLMSRVAQPASKKIDQNKLKPEMDEKGNLTTAGFACSQCGQPLFVYKLEQVSEKGKAYTNYFGRCNVAEHEKLILLAQLKPEKDSDEAVTYSLGKFGQRALDFYSIHVTKESTHPVKPLAQIAGNRYASPVGKALSDACMGTIASFLSKYQDIIIEHQKVVKGNQKRLESLRELAGKENLEYPSVTLPPQPHTKEGVDAYNEVIARVRMWVNLNLWQKLKLSRDDAKPLLRLKGFPSFPLVERQANEVDWWDMVCNVKKLINEKKEDGKVFWQNLAGYKRQEALRPYLSSEEDRKKGKKFARYQLGDLLLHLEKKHGEDWGKVYDEAWERIDKKVEGLSKHIKLEEERRSEDAQSKAALTDWLRAKASFVIEGLKEADKDEFCRCELKLQKWYGDLRGKPFAIEAENSILDISGFSKQYNCAFIWQKDGVKKLNLYLIINYFKGGKLRFKKIKPEAFEANRFYTVINKKSGEIVPMEVNFNFDDPNLIILPLAFGKRQGREFIWNDLLSLETGSLKLANGRVIEKTLYNRRTRQDEPALFVALTFERREVLDSSNIKPMNLIGVDRGENIPAVIALTDPEGCPLSRFKDSLGNPTHILRIGESYKEKQRTIQAKKEVEQRRAGGYSRKYASKAKNLADDMVRNTARDLLYYAVTQDAMLIFENLSRGFGRQGKRTFMAERQYTRMEDWLTAKLAYEGLPSKTYLSKTLAQYTSKTCSNCGFTITSADYDRMLEKLKKTATGWMTTINGKELKVEGQITYYNRYKRQNVVKDLSVELDRLSEESVNNDISSWTKGRSGEALSLLKKRFSHRPVQEKFVCLNCGFETHADEQAALNIARSWLFLRSQEYKKYQTNKTTGNTDKRAFVETWQSFYRKKLKEVWKPAV

SEQ ID NO: 33999 - protein, 978 aa, synthetic construct
  REGION 1..978: note = engineered CasX variant
QEIKRINKIRRRLVKDSNTKKAGKTGPMKTLLVRVMTPDLRERLENLRKKPPNIPQPISNTSRANLNKLLTDYTEMKKAILHVYWEEFQKDPVGLMSRVAQPASKKIDQNKLKPEMDEKGNLTTAGFACSQCGQPLFVYKLEQVSEKGKAYTNYFGRCNVAEHEKLILLAQLKPEKDSDEAVTYSLGKFGQRALDFYSIHVTKESTHPVKPLAQIAGNRYASYPVGKALSDACMGTIASFLSKYQDIIIEHQKVVKGNQKRLESLRELAGKENLEYPSVTLPPQPHTKEGVDAYNEVIARVRMWVNLNLWQKLKLSRDDAKPLLRLKGFPSFPLVERQANEVDWWDMVCNVKKLINEKKEDGKVFWQNLAGYKRQEALRPYLSSEEDRKKGKKFARYQLGDLLLHLEKKHGEDWGKVYDEAWERIDKKVEGLSKHIKLEEERRSEDAQSKAALTDWLRAKASFVIEGLKEADKDEFCRCELKLQKWYGDLRGKPFAIEAENSILDISGFSKQYNCAFIWQKDGVKKLNLYLIINYFKGGKLRFKKIKPEAFEANRFYTVINKKSGEIVPMEVNFNFDDPNLIILPLAFGKRQGREFIWNDLLSLETGSLKLANGRVIEKTLYNRRTRQDEPALFVALTFERREVLDSSNIKPMNLIGVDRGENIPAVIALTDPEGCPLSRFKDSLGNPTHILRIGESYKEKQRTIQAKKEVEQRRAGGYSRKYASKAKNLADDMVRNTARDLLYYAVTQDAMLIFENLSRGFGRQGKRTFMAERQYTRMEDWLTAKLAYEGLPSKTYLSKTLAQYTSKTCSNCGFTITSADYDRVLEKLKKTATGWMTTINGKELKVEGQITYYNRYKRQNVVKDLSVELDRLSEESVNNDISSWTKGRQGEALSLLKKRFSHRPVQEKFVCLNCGFETHADEQAALNIARSWLFLRSQEYKKYQTNKTTGNTDKRAFVETWQSFYRKKLKEVWKPAV

SEQ ID NO: 34000 - protein, 978 aa, synthetic construct
  REGION 1..978: note = engineered CasX variant
QEIKRINKIRRRLVKDSNTKKAGKTGPMKTLLVRVMTPDLRERLENLRKKPPNIPQPISNTSRANLNKLLTDYTEMKKAILHVYWEEFQKDPVGLMSRVAQPASKKIDQNKLKPEMDEKGNLTTAGFACSQCGQPLFVYKLEQVSEKGKAYTNYFGRCNVAEHEKLILLAQLKPEKDSDEAVTYSLGKFGQRALDFYSIHVTKESTHPVKPLAQIAGNRYASHPVGKALSDACMGTIASFLSKYQDIIIEHQKVVKGNQKRLESLRELAGKENLEYPSVTLPPQPHTKEGVDAYNEVIARVRMWVNLNLWQKLKLSRDDAKPLLRLKGFPSFPLVERQANEVDWWDMVCNVKKLINEKKEDGKVFWQNLAGYKRQEALRPYLSSEEDRKKGKKFARYQLGDLLLHLEKKHGEDWGKVYDEAWERIDKKVEGLSKHIKLEEERRSEDAQSKAALTDWLRAKASFVIEGLKEADKDEFCRCELKLQKWYGDLRGKPFAIEAENSILDISGFSKQYNCAFIWQKDGVKKLNLYLIINYFKGGKLRFKKIKPEAFEANRFYTVINKKSGEIVPMEVNFNFDDPNLIILPLAFGKRQGREFIWNDLLSLETGSLKLANGRVIEKTLYNRRTRQDEPALFVALTFERREVLDSSNIKPMNLIGVDRGENIPAVIALTDPEGCPLSRFKDSLGNPTHILRIGESYKEKQRTIQAKKEVEQRRAGGYSRKYASKAKNLADDMVRNTARDLLYYAVTQDAMLIFENLSRGFGRQGKRTFMAERQYTRMEDWLTAKLAYEGLPSKTYLSKTLAQYTSKTCSNCGFTITSADYDRVLEKLKKTATGWMTTINGKELKVEGQITYYNRYKRQNVVKDLSVELDRLSEESVNNDISSWTKGRQGEALSLLKKRFSHRPVQEKFVCLNCGFETHADEQAALNIARSWLFLRSQEYKKYQTNKTTGNTDKRAFVETWQSFYRKKLKEVWKPAV

SEQ ID NO: 34001 - protein, 978 aa, synthetic construct
  REGION 1..978: note = engineered CasX variant
QEIKRINKIRRRLVKDSNTKKAGKTGPMKTLLVRVMTPDLRERLENLRKKPPNIPQPISNTSRANLNKLLTDYTEMKKAILHVYWEEFQKDPVGLMSRVAQPASKKIDQNKLKPEMDEKGNLTTAGFACSQCGQPLFVYKLEQVSEKGKAYTNYFGRCNVAEHEKLILLAQLKPEKDSDEAVTYSLGKFGQRALDFYSIHVTKESTHPVKPLAQIAGNRYASSPVGKALSDACMGTIASFLSKYQDIIIEHQKVVKGNQKRLESLRELAGKENLEYPSVTLPPQPHTKEGVDAYNEVIARVRMWVNLNLWQKLKLSRDDAKPLLRLKGFPSFPLVERQANEVDWWDMVCNVKKLINEKKEDGKVFWQNLAGYKRQEALRPYLSSEEDRKKGKKFARYQLGDLLLHLEKKHGEDWGKVYDEAWERIDKKVEGLSKHIKLEEERRSEDAQSKAALTDWLRAKASFVIEGLKEADKDEFCRCELKLQKWYGDLRGKPFAIEAENSILDISGFSKQYNCAFIWQKDGVKKLNLYLIINYFKGGKLRFKKIKPEAFEANRFYTVINKKSGEIVPMEVNFNFDDPNLIILPLAFGKRQGREFIWNDLLSLETGSLKLANGRVIEKTLYNRRTRQDEPALFVALTFERREVLDSSNIKPMNLIGVDRGENIPAVIALTDPEGCPLSRFKDSLGNPTHILRIGESYKEKQRTIQAKKEVEQRRAGGYSRKYASKAKNLADDMVRNTARDLLYYAVTQDAMLIFENLSRGFGRQGKRTFMAERQYTRMEDWLTAKLAYEGLPSKTYLSKTLAQYTSKTCSNCGFTITSADYDRVLEKLKKTATGWMTTINGKELKVEGQITYYNRYKRQNVVKDLSVELDRLSEESVNNDISSWTKGRQGEALSLLKKRFSHRPVQEKFVCLNCGFETHADEQAALNIARSWLFLRSQEYKKYQTNKTTGNTDKRAFVETWQSFYRKKLKEVWKPAV

SEQ ID NO: 34002 - protein, 978 aa, synthetic construct
  REGION 1..978: note = engineered CasX variant
QEIKRINKIRRRLVKDSNTKKAGKTGPMKTLLVRVMTPDLRERLENLRKKPPNIPQPISNTSRANLNKLLTDYTEMKKAILHVYWEEFQKDPVGLMSRVAQPASKKIDQNKLKPEMDEKGNLTTAGFACSQCGQPLFVYKLEQVSEKGKAYTNYFGRCNVAEHEKLILLAQLKPEKDSDEAVTYSLGKFGQRALDFYSIHVTKESTHPVKPLAQIAGNRYASTPVGKALSDACMGTIASFLSKYQDIIIEHQKVVKGNQKRLESLRELAGKENLEYPSVTLPPQPHTKEGVDAYNEVIARVRMWVNLNLWQKLKLSRDDAKPLLRLKGFPSFPLVERQANEVDWWDMVCNVKKLINEKKEDGKVFWQNLAGYKRQEALRPYLSSEEDRKKGKKFARYQLGDLLLHLEKKHGEDWGKVYDEAWERIDKKVEGLSKHIKLEEERRSEDAQSKAALTDWLRAKASFVIEGLKEADKDEFCRCELKLQKWYGDLRGKPFAIEAENSILDISGFSKQYNCAFIWQKDGVKKLNLYLIINYFKGGKLRFKKIKPEAFEANRFYTVINKKSGEIVPMEVNFNFDDPNLIILPLAFGKRQGREFIWNDLLSLETGSLKLANGRVIEKTLYNRRTRQDEPALFVALTFERREVLDSSNIKPMNLIGVDRGENIPAVIALTDPEGCPLSRFKDSLGNPTHILRIGESYKEKQRTIQAKKEVEQRRAGGYSRKYASKAKNLADDMVRNTARDLLYYAVTQDAMLIFENLSRGFGRQGKRTFMAERQYTRMEDWLTAKLAYEGLPSKTYLSKTLAQYTSKTCSNCGFTITSADYDRVLEKLKKTATGWMTTINGKELKVEGQITYYNRYKRQNVVKDLSVELDRLSEESVNNDISSWTKGRQGEALSLLKKRFSHRPVQEKFVCLNCGFETHADEQAALNIARSWLFLRSQEYKKYQTNKTTGNTDKRAFVETWQSFYRKKLKEVWKPAV

SEQ ID NO: 34003 - protein, 978 aa, synthetic construct
  REGION 1..978: note = engineered CasX variant
QEIKRINKIRRRLVKDSNTKKAGKTGPMKTLLVRVMTPDLRERLENLRKKPPNIPQPISNTSRANLNKLLTDYTEMKKAILHVYWEEFQKDPVGLMSRVAQPASKKIDQNKLKPEMDEKGNLTTAGFACSQCGQPLFVYKLEQVSEKGKAYTNYFGRCNVAEHEKLILLAQLKPEKDSDEAVTYSLGKFGQRALDFYSIHVTKESTHPVKPLAQIAGNRYASAPVGKALSDACMGTIASFLSKYQDIIIEHQKVVKGNQKRLESLRELAGKENLEYPSVTLPPQPHTKEGVDAYNEVIARVRMWVNLNLWQKLKLSRDDAKPLLRLKGFPSFPLVERQANEVDWWDMVCNVKKLINEKKEDGKVFWQNLAGYKRQEALRPYLSSEEDRKKGKKFARYQLGDLLLHLEKKHGEDWGKVYDEAWERIDKKVEGLSKHIKLEEERRSEDAQSKAALTDWLRAKASFVIEGLKEADKDEFCRCELKLQKWYGDLRGKPFAIEAENSILDISGFSKQYNCAFIWQKDGVKKLNLYLIINYFKGGKLRFKKIKPEAFEANRFYTVINKKSGEIVPMEVNFNFDDPNLIILPLAFGKRQGREFIWNDLLSLETGSLKLANGRVIEKTLYNRRTRQDEPALFVALTFERREVLDSSNIKPMNLIGVDRGENIPAVIALTDPEGCPLSRFKDSLGNPTHILRIGESYKEKQRTIQAKKEVEQRRAGGYSRKYASKAKNLADDMVRNTARDLLYYAVTQDAMLIFENLSRGFGRQGKRTFMAERQYTRMEDWLTAKLAYEGLPSKTYLSKTLAQYTSKTCSNCGFTITSADYDRVLEKLKKTATGWMTTINGKELKVEGQITYYNRYKRQNVVKDLSVELDRLSEESVNNDISSWTKGRQGEALSLLKKRFSHRPVQEKFVCLNCGFETHADEQAALNIARSWLFLRSQEYKKYQTNKTTGNTDKRAFVETWQSFYRKKLKEVWKPAV

SEQ ID NO: 34004 - protein, 978 aa, synthetic construct
  REGION 1..978: note = engineered CasX variant
QEIKRINKIRRRLVKDSNTKKAGKTGPMKTLLVRVMTPDLRERLENLRKKPPNIPQPISNTSRANLNKLLTDYTEMKKAILHVYWEEFQKDPVGLMSRVAQPASKKIDQNKLKPEMDEKGNLTTAGFACSQCGQPLFVYKLEQVSEKGKAYTNYFGRCNVAEHEKLILLAQLKPEKDSDEAVTYSLGKFGQRALDFYSIHVTKESTHPVKPLAQIAGNRYASVPVGKALSDACMGTIASFLSKYQDIIIEHQKVVKGNQKRLESLRELAGKENLEYPSVTLPPQPHTKEGVDAYNEVIARVRMWVNLNLWQKLKLSRDDAKPLLRLKGFPSFPLVERQANEVDWWDMVCNVKKLINEKKEDGKVFWQNLAGYKRQEALRPYLSSEEDRKKGKKFARYQLGDLLLHLEKKHGEDWGKVYDEAWERIDKKVEGLSKHIKLEEERRSEDAQSKAALTDWLRAKASFVIEGLKEADKDEFCRCELKLQKWYGDLRGKPFAIEAENSILDISGFSKQYNCAFIWQKDGVKKLNLYLIINYFKGGKLRFKKIKPEAFEANRFYTVINKKSGEIVPMEVNFNFDDPNLIILPLAFGKRQGREFIWNDLLSLETGSLKLANGRVIEKTLYNRRTRQDEPALFVALTFERREVLDSSNIKPMNLIGVDRGENIPAVIALTDPEGCPLSRFKDSLGNPTHILRIGESYKEKQRTIQAKKEVEQRRAGGYSRKYASKAKNLADDMVRNTARDLLYYAVTQDAMLIFENLSRGFGRQGKRTFMAERQYTRMEDWLTAKLAYEGLPSKTYLSKTLAQYTSKTCSNCGFTITSADYDRVLEKLKKTATGWMTTINGKELKVEGQITYYNRYKRQNVVKDLSVELDRLSEESVNNDISSWTKGRQGEALSLLKKRFSHRPVQEKFVCLNCGFETHADEQAALNIARSWLFLRSQEYKKYQTNKTTGNTDKRAFVETWQSFYRKKLKEVWKPAV

SEQ ID NO: 34005 - protein, 978 aa, synthetic construct
  REGION 1..978: note = engineered CasX variant
QEIKRINKIRRRLVKDSNTKKAGKTGPMKTLLVRVMTPDLRERLENLRKKPPNIPQPISNTSRANLNKLLTDYTEMKKAILHVYWEEFQKDPVGLMSRVAQPASKKIDQNKLKPEMDEKGNLTTAGFACSQCGQPLFVYKLEQVSEKGKAYTNYFGRCNVAEHEKLIKLAQLKPEKDSDEAVTYSLGKFGQRALDFYSIHVTKESTHPVKPLAQIAGNRYASGPVGKALSDACMGTIASFLSKYQDIIIEHQKVVKGNQKRLESLRELAGKENLEYPSVTLPPQPHTKEGVDAYNEVIARVRMWVNLNLWQKLKLSRDDAKPLLRLKGFPSFPLVERQANEVDWWDMVCNVKKLINEKKEDGKVFWQNLAGYKRQEALRPYLSSEEDRKKGKKFARYQLGDLLLHLEKKHGEDWGKVYDEAWERIDKKVEGLSKHIKLEEERRSEDAQSKAALTDWLRAKASFVIEGLKEADKDEFCRCELKLQKWYGDLRGKPFAIEAENSILDISGFSKQYNCAFIWQKDGVKKLNLYLIINYFKGGKLRFKKIKPEAFEANRFYTVINKKSGEIVPMEVNFNFDDPNLIILPLAFGKRQGREFIWNDLLSLETGSLKLANGRVIEKTLYNRRTRQDEPALFVALTFERREVLDSSNIKPMNLIGVDRGENIPAVIALTDPEGCPLSRFKDSLGNPTHILRIGESYKEKQRTIQAKKEVEQRRAGGYSRKYASKAKNLADDMVRNTARDLLYYAVTQDAMLIFENLSRGFGRQGKRTFMAERQYTRMEDWLTAKLAYEGLPSKTYLSKTLAQYTSKTCSNCGFTITSADYDRVLEKLKKTATGWMTTINGKELKVEGQITYYNRYKRQNVVKDLSVELDRLSEESVNNDISSWTKGRQGEALSLLKKRFSHRPVQEKFVCLNCGFETHADEQAALNIARSWLFLRSQEYKKYQTNKTTGNTDKRAFVETWQSFYRKKLKEVWKPAV

SEQ ID NO: 34006 - protein, 977 aa, synthetic construct
  REGION 1..977: note = engineered CasX variant
QEIKRINKIRRRLVKDSNTKKAGKTGPMKTLLVRVMTPDLRERLENLRKKPPNIPQPISNTSRANLNKLLTDYTEMKKAILHVYWEEFQKDPVGLMSRVAQPASKKIDQNKLKPEMDEKGNLTTAGFACSQCGQPLFVYKLEQVSEKGKAYTNYFGRCNVAEHEKLILLAQLKPEKDSDEAVTYSLGKFGQRALDFYSIHVTKESTHPVKPLAQIAGNRYASPVGKALSDACMGTIASFLSKYQDIIIEHQKVVKGNQKRLESLRELAGKENLEYPSVTLPPQPHTKEGVDAYNEVIARVRMWVNLNLWQKLKLSRDDAKPLLRLKGFPSFPLVERQANEVDWWDMVCNVKKLINEKKEDGKVFWQNLAGYKRQEALRPYLSSEEDRKKGKKFARYQLGDLLLHLEKKHGEDWGKVYDEAWERIDKKVEGLSKHIKLEEERRSEDAQSKAALTDWLRAKASFVIEGLKEADKDEFCRCELKLQKWYGDLRGKPFAIEAENSILDISGFSKQYNCAFIWQKDGVKKLNLYLIINYFKGGKLRFKKIKPEAFEANRFYTVINKKSGEIVPMEVNFNFDDPNLIILPLAFGKRQGREFIWNDLLSLETGSLKLANGRVIEKTLYNRRTRQDEPALFVALTFERREVLDSSNIKPMNLIGVDRGENIPAVIALTDPEGCPLSRFKDSLGNPTHILRIGESYKEKQRTIQAKKEVEQRRAGGYSRKYASKAKNLADDMVRNTARDLLYYAVTQDAMLIFENLSRGFGRQGKRTFMAERQYTRMEDWLTAKLAYEGLPSKTYLSKTLAQYTSKTCSNCGFTITSADYDRVLEKLKKTATGWMTTINGKELKVEGQITYYNRYKRQNVVKDLSVELDRLSEESVNNDISSWTKGRQGEALSLLKKRFSHRPVQEKFVCLNCGFETHADEQAALNIARSWLFLRSQEYKKYQTNKTTGNTDKRAFVETWQSFYRKKLKEVWKPAV

SEQ ID NO: 34007 - protein, 978 aa, synthetic construct
  REGION 1..978: note = engineered CasX variant
QEIKRINKIRRRLVKDSNTKKAGKTGPMKTLLVRVMTPDLRERLENLRKKPPNIPQPISNTSRANLNKLLTDYTEMKKAILHVYWEEFQKDPVGLMSRVAQPASKKIDQNKLKPEMDEKGNLTTAGFACSQCGQPLFVYKLEQVSEKGKAYTNYFGRCNVAEHEKLILLAQLKPEKDSDEAVTYSLGKFGQRALDFYSIHVTKESTHPVKPLAQIAGNRYASYPVGKALSDACMGTIASFLSKYQDIIIEHQKVVKGNQKRLESLRELAGKENLEYPSVTLPPQPHTKEGVDAYNEVIARVRMWVNLNLWQKLKLSRDDAKPLLRLKGFPSFPLVERQANEVDWWDMVCNVKKLINEKKEDGKVFWQNLAGYKRQEALRPYLSSEEDRKKGKKFARYQLGDLLLHLEKKHGEDWGKVYDEAWERIDKKVEGLSKHIKLEEERRSEDAQSKAALTDWLRAKASFVIEGLKEADKDEFCRCELKLQKWYGDLRGKPFAIEAENSILDISGFSKQYNCAFIWQKDGVKKLNLYLIINYFKGGKLRFKKIKPEAFEANRFYTVINKKSGEIVPMEVNFNFDDPNLIILPLAFGKRQGREFIWNDLLSLETGSLKLANGRVIEKTLYNRRTRQDEPALFVALTFERREVLDSSNIKPMNLIGVDRGENIPAVIALTDPEGCPLSRFKDSLGNPTHILRIGESYKEKQRTIQAKKEVEQRRAGGYSRKYASKAKNLADDMVRNTARDLLYYAVTQDAMLIFENLSRGFGRQGKRTFMAERQYTRMEDWLTAKLAYEGLPSKTYLSKTLAQYTSKTCSNCGFTITSADYDRVLEKLKKTATGWMTTINGKELKVEGQITYYNRYKRQNVVKDLSVELDRLSEESVNNDISSWTKGRSGEALSLLKKRFSHRPVQEKFVCLNCEFETHADEQAALNIARSWLFLRSQEYKKYQTNKTTGNTDKRAFVETWQSFYRKKLKEVWKPAV

SEQ ID NO: 34008 - protein, 978 aa, synthetic construct
  REGION 1..978: note = engineered CasX variant
QEIKRINKIRRRLVKDSNTKKAGKTGPMKTLLVRVMTPDLRERLENLRKKPPNIPQPISNTSRANLNKLLTDYTEMKKAILHVYWEEFQKDPVGLMSRVAQPASKKIDQNKLKPEMDEKGNLTTAGFACSQCGQPLFVYKLEQVSEKGKAYTNYFGRCNVAEHEKLILLAQLKPEKDSDEAVTYSLGKFGQRALDFYSIHVTKESTHPVKPLAQIAGNRYASHPVGKALSDACMGTIASFLSKYQDIIIEHQKVVKGNQKRLESLRELAGKENLEYPSVTLPPQPHTKEGVDAYNEVIARVRMWVNLNLWQKLKLSRDDAKPLLRLKGFPSFPLVERQANEVDWWDMVCNVKKLINEKKEDGKVFWQNLAGYKRQEALRPYLSSEEDRKKGKKFARYQLGDLLLHLEKKHGEDWGKVYDEAWERIDKKVEGLSKHIKLEEERRSEDAQSKAALTDWLRAKASFVIEGLKEADKDEFCRCELKLQKWYGDLRGKPFAIEAENSILDISGFSKQYNCAFIWQKDGVKKLNLYLIINYFKGGKLRFKKIKPEAFEANRFYTVINKKSGEIVPMEVNFNFDDPNLIILPLAFGKRQGREFIWNDLLSLETGSLKLANGRVIEKTLYNRRTRQDEPALFVALTFERREVLDSSNIKPMNLIGVDRGENIPAVIALTDPEGCPLSRFKDSLGNPTHILRIGESYKEKQRTIQAKKEVEQRRAGGYSRKYASKAKNLADDMVRNTARDLLYYAVTQDAMLIFENLSRGFGRQGKRTFMAERQYTRMEDWLTAKLAYEGLPSKTYLSKTLAQYTSKTCSNCGFTITSADYDRVLEKLKKTATGWMTTINGKELKVEGQITYYNRYKRQNVVKDLSVELDRLSEESVNNDISSWTKGRSGEALSLLKKRFSHRPVQEKFVCLNCEFETHADEQAALNIARSWLFLRSQEYKKYQTNKTTGNTDKRAFVETWQSFYRKKLKEVWKPAV

SEQ ID NO: 34009 - protein, 978 aa, synthetic construct
  REGION 1..978: note = engineered CasX variant
QEIKRINKIRRRLVKDSNTKKAGKTGPMKTLLVRVMTPDLRERLENLRKKPPNIPQPISNTSRANLNKLLTDYTEMKKAILHVYWEEFQKDPVGLMSRVAQPASKKIDQNKLKPEMDEKGNLTTAGFACSQCGQPLFVYKLEQVSEKGKAYTNYFGRCNVAEHEKLILLAQLKPEKDSDEAVTYSLGKFGQRALDFYSIHVTKESTHPVKPLAQIAGNRYASSPVGKALSDACMGTIASFLSKYQDIIIEHQKVVKGNQKRLESLRELAGKENLEYPSVTLPPQPHTKEGVDAYNEVIARVRMWVNLNLWQKLKLSRDDAKPLLRLKGFPSFPLVERQANEVDWWDMVCNVKKLINEKKEDGKVFWQNLAGYKRQEALRPYLSSEEDRKKGKKFARYQLGDLLLHLEKKHGEDWGKVYDEAWERIDKKVEGLSKHIKLEEERRSEDAQSKAALTDWLRAKASFVIEGLKEADKDEFCRCELKLQKWYGDLRGKPFAIEAENSILDISGFSKQYNCAFIWQKDGVKKLNLYLIINYFKGGKLRFKKIKPEAFEANRFYTVINKKSGEIVPMEVNFNFDDPNLIILPLAFGKRQGREFIWNDLLSLETGSLKLANGRVIEKTLYNRRTRQDEPALFVALTFERREVLDSSNIKPMNLIGVDRGENIPAVIALTDPEGCPLSRFKDSLGNPTHILRIGESYKEKQRTIQAKKEVEQRRAGGYSRKYASKAKNLADDMVRNTARDLLYYAVTQDAMLIFENLSRGFGRQGKRTFMAERQYTRMEDWLTAKLAYEGLPSKTYLSKTLAQYTSKTCSNCGFTITSADYDRVLEKLKKTATGWMTTINGKELKVEGQITYYNRYKRQNVVKDLSVELDRLSEESVNNDISSWTKGRSGEALSLLKKRFSHRPVQEKFVCLNCEFETHADEQAALNIARSWLFLRSQEYKKYQTNKTTGNTDKRAFVETWQSFYRKKLKEVWKPAV

SEQ ID NO: 34010 - protein, 978 aa, synthetic construct
  REGION 1..978: note = engineered CasX variant
QEIKRINKIRRRLVKDSNTKKAGKTGPMKTLLVRVMTPDLRERLENLRKKPPNIPQPISNTSRANLNKLLTDYTEMKKAILHVYWEEFQKDPVGLMSRVAQPASKKIDQNKLKPEMDEKGNLTTAGFACSQCGQPLFVYKLEQVSEKGKAYTNYFGRCNVAEHEKLILLAQLKPEKDSDEAVTYSLGKFGQRALDFYSIHVTKESTHPVKPLAQIAGNRYASTPVGKALSDACMGTIASFLSKYQDIIIEHQKVVKGNQKRLESLRELAGKENLEYPSVTLPPQPHTKEGVDAYNEVIARVRMWVNLNLWQKLKLSRDDAKPLLRLKGFPSFPLVERQANEVDWWDMVCNVKKLINEKKEDGKVFWQNLAGYKRQEALRPYLSSEEDRKKGKKFARYQLGDLLLHLEKKHGEDWGKVYDEAWERIDKKVEGLSKHIKLEEERRSEDAQSKAALTDWLRAKASFVIEGLKEADKDEFCRCELKLQKWYGDLRGKPFAIEAENSILDISGFSKQYNCAFIWQKDGVKKLNLYLIINYFKGGKLRFKKIKPEAFEANRFYTVINKKSGEIVPMEVNFNFDDPNLIILPLAFGKRQGREFIWNDLLSLETGSLKLANGRVIEKTLYNRRTRQDEPALFVALTFERREVLDSSNIKPMNLIGVDRGENIPAVIALTDPEGCPLSRFKDSLGNPTHILRIGESYKEKQRTIQAKKEVEQRRAGGYSRKYASKAKNLADDMVRNTARDLLYYAVTQDAMLIFENLSRGFGRQGKRTFMAERQYTRMEDWLTAKLAYEGLPSKTYLSKTLAQYTSKTCSNCGFTITSADYDRVLEKLKKTATGWMTTINGKELKVEGQITYYNRYKRQNVVKDLSVELDRLSEESVNNDISSWTKGRSGEALSLLKKRFSHRPVQEKFVCLNCEFETHADEQAALNIARSWLFLRSQEYKKYQTNKTTGNTDKRAFVETWQSFYRKKLKEVWKPAV

SEQ ID NO: 34011 - protein, 978 aa, synthetic construct
  REGION 1..978: note = engineered CasX variant
QEIKRINKIRRRLVKDSNTKKAGKTGPMKTLLVRVMTPDLRERLENLRKKPPNIPQPISNTSRANLNKLLTDYTEMKKAILHVYWEEFQKDPVGLMSRVAQPASKKIDQNKLKPEMDEKGNLTTAGFACSQCGQPLFVYKLEQVSEKGKAYTNYFGRCNVAEHEKLILLAQLKPEKDSDEAVTYSLGKFGQRALDFYSIHVTKESTHPVKPLAQIAGNRYASAPVGKALSDACMGTIASFLSKYQDIIIEHQKVVKGNQKRLESLRELAGKENLEYPSVTLPPQPHTKEGVDAYNEVIARVRMWVNLNLWQKLKLSRDDAKPLLRLKGFPSFPLVERQANEVDWWDMVCNVKKLINEKKEDGKVFWQNLAGYKRQEALRPYLSSEEDRKKGKKFARYQLGDLLLHLEKKHGEDWGKVYDEAWERIDKKVEGLSKHIKLEEERRSEDAQSKAALTDWLRAKASFVIEGLKEADKDEFCRCELKLQKWYGDLRGKPFAIEAENSILDISGFSKQYNCAFIWQKDGVKKLNLYLIINYFKGGKLRFKKIKPEAFEANRFYTVINKKSGEIVPMEVNFNFDDPNLIILPLAFGKRQGREFIWNDLLSLETGSLKLANGRVIEKTLYNRRTRQDEPALFVALTFERREVLDSSNIKPMNLIGVDRGENIPAVIALTDPEGCPLSRFKDSLGNPTHILRIGESYKEKQRTIQAKKEVEQRRAGGYSRKYASKAKNLADDMVRNTARDLLYYAVTQDAMLIFENLSRGFGRQGKRTFMAERQYTRMEDWLTAKLAYEGLPSKTYLSKTLAQYTSKTCSNCGFTITSADYDRVLEKLKKTATGWMTTINGKELKVEGQITYYNRYKRQNVVKDLSVELDRLSEESVNNDISSWTKGRSGEALSLLKKRFSHRPVQEKFVCLNCEFETHADEQAALNIARSWLFLRSQEYKKYQTNKTTGNTDKRAFVETWQSFYRKKLKEVWKPAV

SEQ ID NO: 34012 - protein, 978 aa, synthetic construct
  REGION 1..978: note = engineered CasX variant
QEIKRINKIRRRLVKDSNTKKAGKTGPMKTLLVRVMTPDLRERLENLRKKPPNIPQPISNTSRANLNKLLTDYTEMKKAILHVYWEEFQKDPVGLMSRVAQPASKKIDQNKLKPEMDEKGNLTTAGFACSQCGQPLFVYKLEQVSEKGKAYTNYFGRCNVAEHEKLILLAQLKPEKDSDEAVTYSLGKFGQRALDFYSIHVTKESTHPVKPLAQIAGNRYASVPVGKALSDACMGTIASFLSKYQDIIIEHQKVVKGNQKRLESLRELAGKENLEYPSVTLPPQPHTKEGVDAYNEVIARVRMWVNLNLWQKLKLSRDDAKPLLRLKGFPSFPLVERQANEVDWWDMVCNVKKLINEKKEDGKVFWQNLAGYKRQEALRPYLSSEEDRKKGKKFARYQLGDLLLHLEKKHGEDWGKVYDEAWERIDKKVEGLSKHIKLEEERRSEDAQSKAALTDWLRAKASFVIEGLKEADKDEFCRCELKLQKWYGDLRGKPFAIEAENSILDISGFSKQYNCAFIWQKDGVKKLNLYLIINYFKGGKLRFKKIKPEAFEANRFYTVINKKSGEIVPMEVNFNFDDPNLIILPLAFGKRQGREFIWNDLLSLETGSLKLANGRVIEKTLYNRRTRQDEPALFVALTFERREVLDSSNIKPMNLIGVDRGENIPAVIALTDPEGCPLSRFKDSLGNPTHILRIGESYKEKQRTIQAKKEVEQRRAGGYSRKYASKAKNLADDMVRNTARDLLYYAVTQDAMLIFENLSRGFGRQGKRTFMAERQYTRMEDWLTAKLAYEGLPSKTYLSKTLAQYTSKTCSNCGFTITSADYDRVLEKLKKTATGWMTTINGKELKVEGQITYYNRYKRQNVVKDLSVELDRLSEESVNNDISSWTKGRSGEALSLLKKRFSHRPVQEKFVCLNCEFETHADEQAALNIARSWLFLRSQEYKKYQTNKTTGNTDKRAFVETWQSFYRKKLKEVWKPAV

SEQ ID NO: 34013 - protein, 978 aa, synthetic construct
  REGION 1..978: note = engineered CasX variant
QEIKRINKIRRRLVKDSNTKKAGKTGPMKTLLVRVMTPDLRERLENLRKKPPNIPQPISNTSRANLNKLLTDYTEMKKAILHVYWEEFQKDPVGLMSRVAQPASKKIDQNKLKPEMDEKGNLTTAGFACSQCGQPLFVYKLEQVSEKGKAYTNYFGRCNVAEHEKLIKLAQLKPEKDSDEAVTYSLGKFGQRALDFYSIHVTKESTHPVKPLAQIAGNRYASGPVGKALSDACMGTIASFLSKYQDIIIEHQKVVKGNQKRLESLRELAGKENLEYPSVTLPPQPHTKEGVDAYNEVIARVRMWVNLNLWQKLKLSRDDAKPLLRLKGFPSFPLVERQANEVDWWDMVCNVKKLINEKKEDGKVFWQNLAGYKRQEALRPYLSSEEDRKKGKKFARYQLGDLLLHLEKKHGEDWGKVYDEAWERIDKKVEGLSKHIKLEEERRSEDAQSKAALTDWLRAKASFVIEGLKEADKDEFCRCELKLQKWYGDLRGKPFAIEAENSILDISGFSKQYNCAFIWQKDGVKKLNLYLIINYFKGGKLRFKKIKPEAFEANRFYTVINKKSGEIVPMEVNFNFDDPNLIILPLAFGKRQGREFIWNDLLSLETGSLKLANGRVIEKTLYNRRTRQDEPALFVALTFERREVLDSSNIKPMNLIGVDRGENIPAVIALTDPEGCPLSRFKDSLGNPTHILRIGESYKEKQRTIQAKKEVEQRRAGGYSRKYASKAKNLADDMVRNTARDLLYYAVTQDAMLIFENLSRGFGRQGKRTFMAERQYTRMEDWLTAKLAYEGLPSKTYLSKTLAQYTSKTCSNCGFTITSADYDRVLEKLKKTATGWMTTINGKELKVEGQITYYNRYKRQNVVKDLSVELDRLSEESVNNDISSWTKGRSGEALSLLKKRFSHRPVQEKFVCLNCEFETHADEQAALNIARSWLFLRSQEYKKYQTNKTTGNTDKRAFVETWQSFYRKKLKEVWKPAV

SEQ ID NO: 34014 - protein, 977 aa, synthetic construct
  REGION 1..977: note = engineered CasX variant
QEIKRINKIRRRLVKDSNTKKAGKTGPMKTLLVRVMTPDLRERLENLRKKPPNIPQPISNTSRANLNKLLTDYTEMKKAILHVYWEEFQKDPVGLMSRVAQPASKKIDQNKLKPEMDEKGNLTTAGFACSQCGQPLFVYKLEQVSEKGKAYTNYFGRCNVAEHEKLILLAQLKPEKDSDEAVTYSLGKFGQRALDFYSIHVTKESTHPVKPLAQIAGNRYASPVGKALSDACMGTIASFLSKYQDIIIEHQKVVKGNQKRLESLRELAGKENLEYPSVTLPPQPHTKEGVDAYNEVIARVRMWVNLNLWQKLKLSRDDAKPLLRLKGFPSFPLVERQANEVDWWDMVCNVKKLINEKKEDGKVFWQNLAGYKRQEALRPYLSSEEDRKKGKKFARYQLGDLLLHLEKKHGEDWGKVYDEAWERIDKKVEGLSKHIKLEEERRSEDAQSKAALTDWLRAKASFVIEGLKEADKDEFCRCELKLQKWYGDLRGKPFAIEAENSILDISGFSKQYNCAFIWQKDGVKKLNLYLIINYFKGGKLRFKKIKPEAFEANRFYTVINKKSGEIVPMEVNFNFDDPNLIILPLAFGKRQGREFIWNDLLSLETGSLKLANGRVIEKTLYNRRTRQDEPALFVALTFERREVLDSSNIKPMNLIGVDRGENIPAVIALTDPEGCPLSRFKDSLGNPTHILRIGESYKEKQRTIQAKKEVEQRRAGGYSRKYASKAKNLADDMVRNTARDLLYYAVTQDAMLIFENLSRGFGRQGKRTFMAERQYTRMEDWLTAKLAYEGLPSKTYLSKTLAQYTSKTCSNCGFTITSADYDRVLEKLKKTATGWMTTINGKELKVEGQITYYNRYKRQNVVKDLSVELDRLSEESVNNDISSWTKGRSGEALSLLKKRFSHRPVQEKFVCLNCEFETHADEQAALNIARSWLFLRSQEYKKYQTNKTTGNTDKRAFVETWQSFYRKKLKEVWKPAV

SEQ ID NO: 34015 - protein, 979 aa, synthetic construct
  REGION 1..979: note = engineered CasX variant
QEIKRINKIRRRLVKDSNTKKAGKTGPMKTLLVRVMTPDLRERLENLRKKPPNIPQPISNTSRANLNKLLTDYTEMKKAILHVYWEEFQKDPVGLMSRVAQPASKKIDQNKLKPEMDEKGNLTTAGFACSQCGQPLFVYKLEQVSEKGKAYTNYFGRCNVAEHEKLILLAQLKPEKDSDEAVTYSLGKFGQRALDFYSIHVTKESTHPVKPLAQIAGNRYASYPVGKALSDACMGTIASFLSKYQDIIIEHQKVVKGNQKRLESLRELAGKENLEYPSVTLPPQPHTKEGVDAYNEVIARVRMWVNLNLWQKLKLSRDDAKPLLRLKGFPSFPLVERQANEVDWWDMVCNVKKLINEKKEDGKVFWQNLAGYKRQEALRPYLSSEEDRKKGKKFARYQLGDLLLHLEKKHGEDWGKVYDEAWERIDKKVEGLSKHIKLEEERRSEDAQSKAALTDWLRAKASFVIEGLKEADKDEFCRCELKLQKWYGDLRGKPFAIEAENSILDISGFSKQYNCAFIWQKDGVKKLNLYLIINYFKGGKLRFKKIKPEAFEANRFYTVINKKSGEIVPMEVNFNFDDPNLIILPLAFGKRQGREFIWNDLLSLETGSLKLANGRVIEKTLYNRRTRQDEPALFVALTFERREVLDSSNIKPMNLIGVDRGENIPAVIALTDPEGCPLSRFKDSLGNPTHILRIGESYKEKQRTIQAKKEVEQRRAGGYSRKYASKAKNLADDMVRNTARDLLYYAVTQDAMLIFENLSRGFGRQGKRTFMAERQYTRMEDWLTAKLAYEGLPSKTYLSKTLAQYTSKTCSNCGFTITSADYDRVLEKLKKTATGWMTTINGKELKVEGQITYYNRYKRQNVVKDLSVELDRLSEESVNNDISSWTKGRSGEALSLLKKRFSHRPVQEKFVCLNCGFETHADEQAALNIARSWLFLRSQEYKKYQTNKTSTGNTDKRAFVETWQSFYRKKLKEVWKPAV

SEQ ID NO: 34016 - protein, 979 aa, synthetic construct
  REGION 1..979: note = engineered CasX variant
QEIKRINKIRRRLVKDSNTKKAGKTGPMKTLLVRVMTPDLRERLENLRKKPPNIPQPISNTSRANLNKLLTDYTEMKKAILHVYWEEFQKDPVGLMSRVAQPASKKIDQNKLKPEMDEKGNLTTAGFACSQCGQPLFVYKLEQVSEKGKAYTNYFGRCNVAEHEKLILLAQLKPEKDSDEAVTYSLGKFGQRALDFYSIHVTKESTHPVKPLAQIAGNRYASHPVGKALSDACMGTIASFLSKYQDIIIEHQKVVKGNQKRLESLRELAGKENLEYPSVTLPPQPHTKEGVDAYNEVIARVRMWVNLNLWQKLKLSRDDAKPLLRLKGFPSFPLVERQANEVDWWDMVCNVKKLINEKKEDGKVFWQNLAGYKRQEALRPYLSSEEDRKKGKKFARYQLGDLLLHLEKKHGEDWGKVYDEAWERIDKKVEGLSKHIKLEEERRSEDAQSKAALTDWLRAKASFVIEGLKEADKDEFCRCELKLQKWYGDLRGKPFAIEAENSILDISGFSKQYNCAFIWQKDGVKKLNLYLIINYFKGGKLRFKKIKPEAFEANRFYTVINKKSGEIVPMEVNFNFDDPNLIILPLAFGKRQGREFIWNDLLSLETGSLKLANGRVIEKTLYNRRTRQDEPALFVALTFERREVLDSSNIKPMNLIGVDRGENIPAVIALTDPEGCPLSRFKDSLGNPTHILRIGESYKEKQRTIQAKKEVEQRRAGGYSRKYASKAKNLADDMVRNTARDLLYYAVTQDAMLIFENLSRGFGRQGKRTFMAERQYTRMEDWLTAKLAYEGLPSKTYLSKTLAQYTSKTCSNCGFTITSADYDRVLEKLKKTATGWMTTINGKELKVEGQITYYNRYKRQNVVKDLSVELDRLSEESVNNDISSWTKGRSGEALSLLKKRFSHRPVQEKFVCLNCGFETHADEQAALNIARSWLFLRSQEYKKYQTNKTSTGNTDKRAFVETWQSFYRKKLKEVWKPAV

SEQ ID NO: 34017 - protein, 979 aa, synthetic construct
  REGION 1..979: note = engineered CasX variant
QEIKRINKIRRRLVKDSNTKKAGKTGPMKTLLVRVMTPDLRERLENLRKKPPNIPQPISNTSRANLNKLLTDYTEMKKAILHVYWEEFQKDPVGLMSRVAQPASKKIDQNKLKPEMDEKGNLTTAGFACSQCGQPLFVYKLEQVSEKGKAYTNYFGRCNVAEHEKLILLAQLKPEKDSDEAVTYSLGKFGQRALDFYSIHVTKESTHPVKPLAQIAGNRYASSPVGKALSDACMGTIASFLSKYQDIIIEHQKVVKGNQKRLESLRELAGKENLEYPSVTLPPQPHTKEGVDAYNEVIARVRMWVNLNLWQKLKLSRDDAKPLLRLKGFPSFPLVERQANEVDWWDMVCNVKKLINEKKEDGKVFWQNLAGYKRQEALRPYLSSEEDRKKGKKFARYQLGDLLLHLEKKHGEDWGKVYDEAWERIDKKVEGLSKHIKLEEERRSEDAQSKAALTDWLRAKASFVIEGLKEADKDEFCRCELKLQKWYGDLRGKPFAIEAENSILDISGFSKQYNCAFIWQKDGVKKLNLYLIINYFKGGKLRFKKIKPEAFEANRFYTVINKKSGEIVPMEVNFNFDDPNLIILPLAFGKRQGREFIWNDLLSLETGSLKLANGRVIEKTLYNRRTRQDEPALFVALTFERREVLDSSNIKPMNLIGVDRGENIPAVIALTDPEGCPLSRFKDSLGNPTHILRIGESYKEKQRTIQAKKEVEQRRAGGYSRKYASKAKNLADDMVRNTARDLLYYAVTQDAMLIFENLSRGFGRQGKRTFMAERQYTRMEDWLTAKLAYEGLPSKTYLSKTLAQYTSKTCSNCGFTITSADYDRVLEKLKKTATGWMTTINGKELKVEGQITYYNRYKRQNVVKDLSVELDRLSEESVNNDISSWTKGRSGEALSLLKKRFSHRPVQEKFVCLNCGFETHADEQAALNIARSWLFLRSQEYKKYQTNKTSTGNTDKRAFVETWQSFYRKKLKEVWKPAV

SEQ ID NO: 34018 - protein, 979 aa, synthetic construct
  REGION 1..979: note = engineered CasX variant
QEIKRINKIRRRLVKDSNTKKAGKTGPMKTLLVRVMTPDLRERLENLRKKPPNIPQPISNTSRANLNKLLTDYTEMKKAILHVYWEEFQKDPVGLMSRVAQPASKKIDQNKLKPEMDEKGNLTTAGFACSQCGQPLFVYKLEQVSEKGKAYTNYFGRCNVAEHEKLILLAQLKPEKDSDEAVTYSLGKFGQRALDFYSIHVTKESTHPVKPLAQIAGNRYASTPVGKALSDACMGTIASFLSKYQDIIIEHQKVVKGNQKRLESLRELAGKENLEYPSVTLPPQPHTKEGVDAYNEVIARVRMWVNLNLWQKLKLSRDDAKPLLRLKGFPSFPLVERQANEVDWWDMVCNVKKLINEKKEDGKVFWQNLAGYKRQEALRPYLSSEEDRKKGKKFARYQLGDLLLHLEKKHGEDWGKVYDEAWERIDKKVEGLSKHIKLEEERRSEDAQSKAALTDWLRAKASFVIEGLKEADKDEFCRCELKLQKWYGDLRGKPFAIEAENSILDISGFSKQYNCAFIWQKDGVKKLNLYLIINYFKGGKLRFKKIKPEAFEANRFYTVINKKSGEIVPMEVNFNFDDPNLIILPLAFGKRQGREFIWNDLLSLETGSLKLANGRVIEKTLYNRRTRQDEPALFVALTFERREVLDSSNIKPMNLIGVDRGENIPAVIALTDPEGCPLSRFKDSLGNPTHILRIGESYKEKQRTIQAKKEVEQRRAGGYSRKYASKAKNLADDMVRNTARDLLYYAVTQDAMLIFENLSRGFGRQGKRTFMAERQYTRMEDWLTAKLAYEGLPSKTYLSKTLAQYTSKTCSNCGFTITSADYDRVLEKLKKTATGWMTTINGKELKVEGQITYYNRYKRQNVVKDLSVELDRLSEESVNNDISSWTKGRSGEALSLLKKRFSHRPVQEKFVCLNCGFETHADEQAALNIARSWLFLRSQEYKKYQTNKTSTGNTDKRAFVETWQSFYRKKLKEVWKPAV

SEQ ID NO: 34019 - protein, 979 aa, synthetic construct
  REGION 1..979: note = engineered CasX variant
QEIKRINKIRRRLVKDSNTKKAGKTGPMKTLLVRVMTPDLRERLENLRKKPPNIPQPISNTSRANLNKLLTDYTEMKKAILHVYWEEFQKDPVGLMSRVAQPASKKIDQNKLKPEMDEKGNLTTAGFACSQCGQPLFVYKLEQVSEKGKAYTNYFGRCNVAEHEKLILLAQLKPEKDSDEAVTYSLGKFGQRALDFYSIHVTKESTHPVKPLAQIAGNRYASAPVGKALSDACMGTIASFLSKYQDIIIEHQKVVKGNQKRLESLRELAGKENLEYPSVTLPPQPHTKEGVDAYNEVIARVRMWVNLNLWQKLKLSRDDAKPLLRLKGFPSFPLVERQANEVDWWDMVCNVKKLINEKKEDGKVFWQNLAGYKRQEALRPYLSSEEDRKKGKKFARYQLGDLLLHLEKKHGEDWGKVYDEAWERIDKKVEGLSKHIKLEEERRSEDAQSKAALTDWLRAKASFVIEGLKEADKDEFCRCELKLQKWYGDLRGKPFAIEAENSILDISGFSKQYNCAFIWQKDGVKKLNLYLIINYFKGGKLRFKKIKPEAFEANRFYTVINKKSGEIVPMEVNFNFDDPNLIILPLAFGKRQGREFIWNDLLSLETGSLKLANGRVIEKTLYNRRTRQDEPALFVALTFERREVLDSSNIKPMNLIGVDRGENIPAVIALTDPEGCPLSRFKDSLGNPTHILRIGESYKEKQRTIQAKKEVEQRRAGGYSRKYASKAKNLADDMVRNTARDLLYYAVTQDAMLIFENLSRGFGRQGKRTFMAERQYTRMEDWLTAKLAYEGLPSKTYLSKTLAQYTSKTCSNCGFTITSADYDRVLEKLKKTATGWMTTINGKELKVEGQITYYNRYKRQNVVKDLSVELDRLSEESVNNDISSWTKGRSGEALSLLKKRFSHRPVQEKFVCLNCGFETHADEQAALNIARSWLFLRSQEYKKYQTNKTSTGNTDKRAFVETWQSFYRKKLKEVWKPAV

SEQ ID NO: 34020 - protein, 979 aa, synthetic construct
  REGION 1..979: note = engineered CasX variant
QEIKRINKIRRRLVKDSNTKKAGKTGPMKTLLVRVMTPDLRERLENLRKKPPNIPQPISNTSRANLNKLLTDYTEMKKAILHVYWEEFQKDPVGLMSRVAQPASKKIDQNKLKPEMDEKGNLTTAGFACSQCGQPLFVYKLEQVSEKGKAYTNYFGRCNVAEHEKLILLAQLKPEKDSDEAVTYSLGKFGQRALDFYSIHVTKESTHPVKPLAQIAGNRYASVPVGKALSDACMGTIASFLSKYQDIIIEHQKVVKGNQKRLESLRELAGKENLEYPSVTLPPQPHTKEGVDAYNEVIARVRMWVNLNLWQKLKLSRDDAKPLLRLKGFPSFPLVERQANEVDWWDMVCNVKKLINEKKEDGKVFWQNLAGYKRQEALRPYLSSEEDRKKGKKFARYQLGDLLLHLEKKHGEDWGKVYDEAWERIDKKVEGLSKHIKLEEERRSEDAQSKAALTDWLRAKASFVIEGLKEADKDEFCRCELKLQKWYGDLRGKPFAIEAENSILDISGFSKQYNCAFIWQKDGVKKLNLYLIINYFKGGKLRFKKIKPEAFEANRFYTVINKKSGEIVPMEVNFNFDDPNLIILPLAFGKRQGREFIWNDLLSLETGSLKLANGRVIEKTLYNRRTRQDEPALFVALTFERREVLDSSNIKPMNLIGVDRGENIPAVIALTDPEGCPLSRFKDSLGNPTHILRIGESYKEKQRTIQAKKEVEQRRAGGYSRKYASKAKNLADDMVRNTARDLLYYAVTQDAMLIFENLSRGFGRQGKRTFMAERQYTRMEDWLTAKLAYEGLPSKTYLSKTLAQYTSKTCSNCGFTITSADYDRVLEKLKKTATGWMTTINGKELKVEGQITYYNRYKRQNVVKDLSVELDRLSEESVNNDISSWTKGRSGEALSLLKKRFSHRPVQEKFVCLNCGFETHADEQAALNIARSWLFLRSQEYKKYQTNKTSTGNTDKRAFVETWQSFYRKKLKEVWKPAV

SEQ ID NO: 34021 - protein, 979 aa, synthetic construct
  REGION 1..979: note = engineered CasX variant
QEIKRINKIRRRLVKDSNTKKAGKTGPMKTLLVRVMTPDLRERLENLRKKPPNIPQPISNTSRANLNKLLTDYTEMKKAILHVYWEEFQKDPVGLMSRVAQPASKKIDQNKLKPEMDEKGNLTTAGFACSQCGQPLFVYKLEQVSEKGKAYTNYFGRCNVAEHEKLIKLAQLKPEKDSDEAVTYSLGKFGQRALDFYSIHVTKESTHPVKPLAQIAGNRYASGPVGKALSDACMGTIASFLSKYQDIIIEHQKVVKGNQKRLESLRELAGKENLEYPSVTLPPQPHTKEGVDAYNEVIARVRMWVNLNLWQKLKLSRDDAKPLLRLKGFPSFPLVERQANEVDWWDMVCNVKKLINEKKEDGKVFWQNLAGYKRQEALRPYLSSEEDRKKGKKFARYQLGDLLLHLEKKHGEDWGKVYDEAWERIDKKVEGLSKHIKLEEERRSEDAQSKAALTDWLRAKASFVIEGLKEADKDEFCRCELKLQKWYGDLRGKPFAIEAENSILDISGFSKQYNCAFIWQKDGVKKLNLYLIINYFKGGKLRFKKIKPEAFEANRFYTVINKKSGEIVPMEVNFNFDDPNLIILPLAFGKRQGREFIWNDLLSLETGSLKLANGRVIEKTLYNRRTRQDEPALFVALTFERREVLDSSNIKPMNLIGVDRGENIPAVIALTDPEGCPLSRFKDSLGNPTHILRIGESYKEKQRTIQAKKEVEQRRAGGYSRKYASKAKNLADDMVRNTARDLLYYAVTQDAMLIFENLSRGFGRQGKRTFMAERQYTRMEDWLTAKLAYEGLPSKTYLSKTLAQYTSKTCSNCGFTITSADYDRVLEKLKKTATGWMTTINGKELKVEGQITYYNRYKRQNVVKDLSVELDRLSEESVNNDISSWTKGRSGEALSLLKKRFSHRPVQEKFVCLNCGFETHADEQAALNIARSWLFLRSQEYKKYQTNKTSTGNTDKRAFVETWQSFYRKKLKEVWKPAV

SEQ ID NO: 34022 - protein, 978 aa, synthetic construct
  REGION 1..978: note = engineered CasX variant
QEIKRINKIRRRLVKDSNTKKAGKTGPMKTLLVRVMTPDLRERLENLRKKPPNIPQPISNTSRANLNKLLTDYTEMKKAILHVYWEEFQKDPVGLMSRVAQPASKKIDQNKLKPEMDEKGNLTTAGFACSQCGQPLFVYKLEQVSEKGKAYTNYFGRCNVAEHEKLILLAQLKPEKDSDEAVTYSLGKFGQRALDFYSIHVTKESTHPVKPLAQIAGNRYASPVGKALSDACMGTIASFLSKYQDIIIEHQKVVKGNQKRLESLRELAGKENLEYPSVTLPPQPHTKEGVDAYNEVIARVRMWVNLNLWQKLKLSRDDAKPLLRLKGFPSFPLVERQANEVDWWDMVCNVKKLINEKKEDGKVFWQNLAGYKRQEALRPYLSSEEDRKKGKKFARYQLGDLLLHLEKKHGEDWGKVYDEAWERIDKKVEGLSKHIKLEEERRSEDAQSKAALTDWLRAKASFVIEGLKEADKDEFCRCELKLQKWYGDLRGKPFAIEAENSILDISGFSKQYNCAFIWQKDGVKKLNLYLIINYFKGGKLRFKKIKPEAFEANRFYTVINKKSGEIVPMEVNFNFDDPNLIILPLAFGKRQGREFIWNDLLSLETGSLKLANGRVIEKTLYNRRTRQDEPALFVALTFERREVLDSSNIKPMNLIGVDRGENIPAVIALTDPEGCPLSRFKDSLGNPTHILRIGESYKEKQRTIQAKKEVEQRRAGGYSRKYASKAKNLADDMVRNTARDLLYYAVTQDAMLIFENLSRGFGRQGKRTFMAERQYTRMEDWLTAKLAYEGLPSKTYLSKTLAQYTSKTCSNCGFTITSADYDRVLEKLKKTATGWMTTINGKELKVEGQITYYNRYKRQNVVKDLSVELDRLSEESVNNDISSWTKGRSGEALSLLKKRFSHRPVQEKFVCLNCGFETHADEQAALNIARSWLFLRSQEYKKYQTNKTSTGNTDKRAFVETWQSFYRKKLKEVWKPAV

SEQ ID NO: 34023 - protein, 979 aa, synthetic construct
  REGION 1..979: note = engineered CasX variant
QEIKRINKIRRRLVKDSNTKKAGKTGPMKTLLVRVMTPDLRERLENLRKKPPNIPQPISNTSRANLNKLLTDYTEMKKAILHVYWEEFQKDPVGLMSRVAQPASKKIDQNKLKPEMDEKGNLTTAGFACSQCGQPLFVYKLEQVSEKGKAYTNYFGRCNVAEHEKLILLAQLKPEKDSDEAVTYSLGKFGQRALDFYSIHVTKESTHPVKPLAQIAGNRYASYPVGKALSDACMGTIASFLSKYQDIIIEHQKVVKGNQKRLESLRELAGKENLEYPSVTLPPQPHTKEGVDAYNEVIARVRMWVNLNLWQKLKLSRDDAKPLLRLKGFPSFPLVERQANEVDWWDMVCNVKKLINEKKEDGKVFWQNLAGYKRQEALRPYLSSEEDRKKGKKFARYQLGDLLLHLEKKHGEDWGKVYDEAWERIDKKVEGLSKHIKLEEERRSEDAQSKAALTDWLRAKASFVIEGLKEADKDEFCRCELKLQKWYGDLRGKPFAIEAENSILDISGFSKQYNCAFIWQKDGVKKLNLYLIINYFKGGKLRFKKIKPEAFEANRFYTVINKKSGEIVPMEVNFNFDDPNLIILPLAFGKRQGREFIWNDLLSLETGSLKLANGRVIEKTLYNRRTRQDEPALFVALTFERREVLDSSNIKPMNLIGVDRGENIPAVIALTDPEGCPLSRFKDSLGNPTHILRIGESYKEKQRTIQAKKEVEQRRAGGYSRKYASKAKNLADDMVRNTARDLLYYAVTQDAMLIFENLSRGFGRQGKRTFMAERQYTRMEDWLTAKLAYEGLPSKTYLSKTLAQYTSKTCSNCGFTITSADYDRVLEKLKKTATGWMTTINGKELKVEGQITYYNRYKRQNVVKDLSVELDRLSEESVNNDISSWTKGRSGEALSLLKKRFSHRPVQEKFVCLNCGFETHADEQAALNIARSWLFLRSQEYKKYQTNKTTGKNTDKRAFVETWQSFYRKKLKEVWKPAV

SEQ ID NO: 34024 - protein, 979 aa, synthetic construct
  REGION 1..979: note = engineered CasX variant
QEIKRINKIRRRLVKDSNTKKAGKTGPMKTLLVRVMTPDLRERLENLRKKPPNIPQPISNTSRANLNKLLTDYTEMKKAILHVYWEEFQKDPVGLMSRVAQPASKKIDQNKLKPEMDEKGNLTTAGFACSQCGQPLFVYKLEQVSEKGKAYTNYFGRCNVAEHEKLILLAQLKPEKDSDEAVTYSLGKFGQRALDFYSIHVTKESTHPVKPLAQIAGNRYASHPVGKALSDACMGTIASFLSKYQDIIIEHQKVVKGNQKRLESLRELAGKENLEYPSVTLPPQPHTKEGVDAYNEVIARVRMWVNLNLWQKLKLSRDDAKPLLRLKGFPSFPLVERQANEVDWWDMVCNVKKLINEKKEDGKVFWQNLAGYKRQEALRPYLSSEEDRKKGKKFARYQLGDLLLHLEKKHGEDWGKVYDEAWERIDKKVEGLSKHIKLEEERRSEDAQSKAALTDWLRAKASFVIEGLKEADKDEFCRCELKLQKWYGDLRGKPFAIEAENSILDISGFSKQYNCAFIWQKDGVKKLNLYLIINYFKGGKLRFKKIKPEAFEANRFYTVINKKSGEIVPMEVNFNFDDPNLIILPLAFGKRQGREFIWNDLLSLETGSLKLANGRVIEKTLYNRRTRQDEPALFVALTFERREVLDSSNIKPMNLIGVDRGENIPAVIALTDPEGCPLSRFKDSLGNPTHILRIGESYKEKQRTIQAKKEVEQRRAGGYSRKYASKAKNLADDMVRNTARDLLYYAVTQDAMLIFENLSRGFGRQGKRTFMAERQYTRMEDWLTAKLAYEGLPSKTYLSKTLAQYTSKTCSNCGFTITSADYDRVLEKLKKTATGWMTTINGKELKVEGQITYYNRYKRQNVVKDLSVELDRLSEESVNNDISSWTKGRSGEALSLLKKRFSHRPVQEKFVCLNCGFETHADEQAALNIARSWLFLRSQEYKKYQTNKTTGKNTDKRAFVETWQSFYRKKLKEVWKPAV

SEQ ID NO: 34025 - protein, 979 aa, synthetic construct
  REGION 1..979: note = engineered CasX variant
QEIKRINKIRRRLVKDSNTKKAGKTGPMKTLLVRVMTPDLRERLENLRKKPPNIPQPISNTSRANLNKLLTDYTEMKKAILHVYWEEFQKDPVGLMSRVAQPASKKIDQNKLKPEMDEKGNLTTAGFACSQCGQPLFVYKLEQVSEKGKAYTNYFGRCNVAEHEKLILLAQLKPEKDSDEAVTYSLGKFGQRALDFYSIHVTKESTHPVKPLAQIAGNRYASSPVGKALSDACMGTIASFLSKYQDIIIEHQKVVKGNQKRLESLRELAGKENLEYPSVTLPPQPHTKEGVDAYNEVIARVRMWVNLNLWQKLKLSRDDAKPLLRLKGFPSFPLVERQANEVDWWDMVCNVKKLINEKKEDGKVFWQNLAGYKRQEALRPYLSSEEDRKKGKKFARYQLGDLLLHLEKKHGEDWGKVYDEAWERIDKKVEGLSKHIKLEEERRSEDAQSKAALTDWLRAKASFVIEGLKEADKDEFCRCELKLQKWYGDLRGKPFAIEAENSILDISGFSKQYNCAFIWQKDGVKKLNLYLIINYFKGGKLRFKKIKPEAFEANRFYTVINKKSGEIVPMEVNFNFDDPNLIILPLAFGKRQGREFIWNDLLSLETGSLKLANGRVIEKTLYNRRTRQDEPALFVALTFERREVLDSSNIKPMNLIGVDRGENIPAVIALTDPEGCPLSRFKDSLGNPTHILRIGESYKEKQRTIQAKKEVEQRRAGGYSRKYASKAKNLADDMVRNTARDLLYYAVTQDAMLIFENLSRGFGRQGKRTFMAERQYTRMEDWLTAKLAYEGLPSKTYLSKTLAQYTSKTCSNCGFTITSADYDRVLEKLKKTATGWMTTINGKELKVEGQITYYNRYKRQNVVKDLSVELDRLSEESVNNDISSWTKGRSGEALSLLKKRFSHRPVQEKFVCLNCGFETHADEQAALNIARSWLFLRSQEYKKYQTNKTTGKNTDKRAFVETWQSFYRKKLKEVWKPAV

SEQ ID NO: 34026 - protein, 979 aa, synthetic construct
  REGION 1..979: note = engineered CasX variant
QEIKRINKIRRRLVKDSNTKKAGKTGPMKTLLVRVMTPDLRERLENLRKKPPNIPQPISNTSRANLNKLLTDYTEMKKAILHVYWEEFQKDPVGLMSRVAQPASKKIDQNKLKPEMDEKGNLTTAGFACSQCGQPLFVYKLEQVSEKGKAYTNYFGRCNVAEHEKLILLAQLKPEKDSDEAVTYSLGKFGQRALDFYSIHVTKESTHPVKPLAQIAGNRYASTPVGKALSDACMGTIASFLSKYQDIIIEHQKVVKGNQKRLESLRELAGKENLEYPSVTLPPQPHTKEGVDAYNEVIARVRMWVNLNLWQKLKLSRDDAKPLLRLKGFPSFPLVERQANEVDWWDMVCNVKKLINEKKEDGKVFWQNLAGYKRQEALRPYLSSEEDRKKGKKFARYQLGDLLLHLEKKHGEDWGKVYDEAWERIDKKVEGLSKHIKLEEERRSEDAQSKAALTDWLRAKASFVIEGLKEADKDEFCRCELKLQKWYGDLRGKPFAIEAENSILDISGFSKQYNCAFIWQKDGVKKLNLYLIINYFKGGKLRFKKIKPEAFEANRFYTVINKKSGEIVPMEVNFNFDDPNLIILPLAFGKRQGREFIWNDLLSLETGSLKLANGRVIEKTLYNRRTRQDEPALFVALTFERREVLDSSNIKPMNLIGVDRGENIPAVIALTDPEGCPLSRFKDSLGNPTHILRIGESYKEKQRTIQAKKEVEQRRAGGYSRKYASKAKNLADDMVRNTARDLLYYAVTQDAMLIFENLSRGFGRQGKRTFMAERQYTRMEDWLTAKLAYEGLPSKTYLSKTLAQYTSKTCSNCGFTITSADYDRVLEKLKKTATGWMTTINGKELKVEGQITYYNRYKRQNVVKDLSVELDRLSEESVNNDISSWTKGRSGEALSLLKKRFSHRPVQEKFVCLNCGFETHADEQAALNIARSWLFLRSQEYKKYQTNKTTGKNTDKRAFVETWQSFYRKKLKEVWKPAV

SEQ ID NO: 34027 - protein, 979 aa, synthetic construct
  REGION 1..979: note = engineered CasX variant
QEIKRINKIRRRLVKDSNTKKAGKTGPMKTLLVRVMTPDLRERLENLRKKPPNIPQPISNTSRANLNKLLTDYTEMKKAILHVYWEEFQKDPVGLMSRVAQPASKKIDQNKLKPEMDEKGNLTTAGFACSQCGQPLFVYKLEQVSEKGKAYTNYFGRCNVAEHEKLILLAQLKPEKDSDEAVTYSLGKFGQRALDFYSIHVTKESTHPVKPLAQIAGNRYASAPVGKALSDACMGTIASFLSKYQDIIIEHQKVVKGNQKRLESLRELAGKENLEYPSVTLPPQPHTKEGVDAYNEVIARVRMWVNLNLWQKLKLSRDDAKPLLRLKGFPSFPLVERQANEVDWWDMVCNVKKLINEKKEDGKVFWQNLAGYKRQEALRPYLSSEEDRKKGKKFARYQLGDLLLHLEKKHGEDWGKVYDEAWERIDKKVEGLSKHIKLEEERRSEDAQSKAALTDWLRAKASFVIEGLKEADKDEFCRCELKLQKWYGDLRGKPFAIEAENSILDISGFSKQYNCAFIWQKDGVKKLNLYLIINYFKGGKLRFKKIKPEAFEANRFYTVINKKSGEIVPMEVNFNFDDPNLIILPLAFGKRQGREFIWNDLLSLETGSLKLANGRVIEKTLYNRRTRQDEPALFVALTFERREVLDSSNIKPMNLIGVDRGENIPAVIALTDPEGCPLSRFKDSLGNPTHILRIGESYKEKQRTIQAKKEVEQRRAGGYSRKYASKAKNLADDMVRNTARDLLYYAVTQDAMLIFENLSRGFGRQGKRTFMAERQYTRMEDWLTAKLAYEGLPSKTYLSKTLAQYTSKTCSNCGFTITSADYDRVLEKLKKTATGWMTTINGKELKVEGQITYYNRYKRQNVVKDLSVELDRLSEESVNNDISSWTKGRSGEALSLLKKRFSHRPVQEKFVCLNCGFETHADEQAALNIARSWLFLRSQEYKKYQTNKTTGKNTDKRAFVETWQSFYRKKLKEVWKPAV

SEQ ID NO: 34028 - protein, 979 aa, synthetic construct
  REGION 1..979: note = engineered CasX variant
QEIKRINKIRRRLVKDSNTKKAGKTGPMKTLLVRVMTPDLRERLENLRKKPPNIPQPISNTSRANLNKLLTDYTEMKKAILHVYWEEFQKDPVGLMSRVAQPASKKIDQNKLKPEMDEKGNLTTAGFACSQCGQPLFVYKLEQVSEKGKAYTNYFGRCNVAEHEKLILLAQLKPEKDSDEAVTYSLGKFGQRALDFYSIHVTKESTHPVKPLAQIAGNRYASVPVGKALSDACMGTIASFLSKYQDIIIEHQKVVKGNQKRLESLRELAGKENLEYPSVTLPPQPHTKEGVDAYNEVIARVRMWVNLNLWQKLKLSRDDAKPLLRLKGFPSFPLVERQANEVDWWDMVCNVKKLINEKKEDGKVFWQNLAGYKRQEALRPYLSSEEDRKKGKKFARYQLGDLLLHLEKKHGEDWGKVYDEAWERIDKKVEGLSKHIKLEEERRSEDAQSKAALTDWLRAKASFVIEGLKEADKDEFCRCELKLQKWYGDLRGKPFAIEAENSILDISGFSKQYNCAFIWQKDGVKKLNLYLIINYFKGGKLRFKKIKPEAFEANRFYTVINKKSGEIVPMEVNFNFDDPNLIILPLAFGKRQGREFIWNDLLSLETGSLKLANGRVIEKTLYNRRTRQDEPALFVALTFERREVLDSSNIKPMNLIGVDRGENIPAVIALTDPEGCPLSRFKDSLGNPTHILRIGESYKEKQRTIQAKKEVEQRRAGGYSRKYASKAKNLADDMVRNTARDLLYYAVTQDAMLIFENLSRGFGRQGKRTFMAERQYTRMEDWLTAKLAYEGLPSKTYLSKTLAQYTSKTCSNCGFTITSADYDRVLEKLKKTATGWMTTINGKELKVEGQITYYNRYKRQNVVKDLSVELDRLSEESVNNDISSWTKGRSGEALSLLKKRFSHRPVQEKFVCLNCGFETHADEQAALNIARSWLFLRSQEYKKYQTNKTTGKNTDKRAFVETWQSFYRKKLKEVWKPAV

SEQ ID NO: 34029 - protein, 979 aa, synthetic construct
  REGION 1..979: note = engineered CasX variant
QEIKRINKIRRRLVKDSNTKKAGKTGPMKTLLVRVMTPDLRERLENLRKKPPNIPQPISNTSRANLNKLLTDYTEMKKAILHVYWEEFQKDPVGLMSRVAQPASKKIDQNKLKPEMDEKGNLTTAGFACSQCGQPLFVYKLEQVSEKGKAYTNYFGRCNVAEHEKLIKLAQLKPEKDSDEAVTYSLGKFGQRALDFYSIHVTKESTHPVKPLAQIAGNRYASGPVGKALSDACMGTIASFLSKYQDIIIEHQKVVKGNQKRLESLRELAGKENLEYPSVTLPPQPHTKEGVDAYNEVIARVRMWVNLNLWQKLKLSRDDAKPLLRLKGFPSFPLVERQANEVDWWDMVCNVKKLINEKKEDGKVFWQNLAGYKRQEALRPYLSSEEDRKKGKKFARYQLGDLLLHLEKKHGEDWGKVYDEAWERIDKKVEGLSKHIKLEEERRSEDAQSKAALTDWLRAKASFVIEGLKEADKDEFCRCELKLQKWYGDLRGKPFAIEAENSILDISGFSKQYNCAFIWQKDGVKKLNLYLIINYFKGGKLRFKKIKPEAFEANRFYTVINKKSGEIVPMEVNFNFDDPNLIILPLAFGKRQGREFIWNDLLSLETGSLKLANGRVIEKTLYNRRTRQDEPALFVALTFERREVLDSSNIKPMNLIGVDRGENIPAVIALTDPEGCPLSRFKDSLGNPTHILRIGESYKEKQRTIQAKKEVEQRRAGGYSRKYASKAKNLADDMVRNTARDLLYYAVTQDAMLIFENLSRGFGRQGKRTFMAERQYTRMEDWLTAKLAYEGLPSKTYLSKTLAQYTSKTCSNCGFTITSADYDRVLEKLKKTATGWMTTINGKELKVEGQITYYNRYKRQNVVKDLSVELDRLSEESVNNDISSWTKGRSGEALSLLKKRFSHRPVQEKFVCLNCGFETHADEQAALNIARSWLFLRSQEYKKYQTNKTTGKNTDKRAFVETWQSFYRKKLKEVWKPAV

SEQ ID NO: 34030 - protein, 978 aa, synthetic construct
  REGION 1..978: note = engineered CasX variant
QEIKRINKIRRRLVKDSNTKKAGKTGPMKTLLVRVMTPDLRERLENLRKKPPNIPQPISNTSRANLNKLLTDYTEMKKAILHVYWEEFQKDPVGLMSRVAQPASKKIDQNKLKPEMDEKGNLTTAGFACSQCGQPLFVYKLEQVSEKGKAYTNYFGRCNVAEHEKLILLAQLKPEKDSDEAVTYSLGKFGQRALDFYSIHVTKESTHPVKPLAQIAGNRYASPVGKALSDACMGTIASFLSKYQDIIIEHQKVVKGNQKRLESLRELAGKENLEYPSVTLPPQPHTKEGVDAYNEVIARVRMWVNLNLWQKLKLSRDDAKPLLRLKGFPSFPLVERQANEVDWWDMVCNVKKLINEKKEDGKVFWQNLAGYKRQEALRPYLSSEEDRKKGKKFARYQLGDLLLHLEKKHGEDWGKVYDEAWERIDKKVEGLSKHIKLEEERRSEDAQSKAALTDWLRAKASFVIEGLKEADKDEFCRCELKLQKWYGDLRGKPFAIEAENSILDISGFSKQYNCAFIWQKDGVKKLNLYLIINYFKGGKLRFKKIKPEAFEANRFYTVINKKSGEIVPMEVNFNFDDPNLIILPLAFGKRQGREFIWNDLLSLETGSLKLANGRVIEKTLYNRRTRQDEPALFVALTFERREVLDSSNIKPMNLIGVDRGENIPAVIALTDPEGCPLSRFKDSLGNPTHILRIGESYKEKQRTIQAKKEVEQRRAGGYSRKYASKAKNLADDMVRNTARDLLYYAVTQDAMLIFENLSRGFGRQGKRTFMAERQYTRMEDWLTAKLAYEGLPSKTYLSKTLAQYTSKTCSNCGFTITSADYDRVLEKLKKTATGWMTTINGKELKVEGQITYYNRYKRQNVVKDLSVELDRLSEESVNNDISSWTKGRSGEALSLLKKRFSHRPVQEKFVCLNCGFETHADEQAALNIARSWLFLRSQEYKKYQTNKTTGKNTDKRAFVETWQSFYRKKLKEVWKPAV

SEQ ID NO: 34031 - protein, 978 aa, synthetic construct
  REGION 1..978: note = engineered CasX variant
QEIKRINKIRRRLVKDSNTKKAGKTGPMKTLLVRVMTPDLRERLENLRKKPPNIPQPISNTSRANLNKLLTDYTEMKKAILHVYWEEFQKDPVGLMSRVAQPASKKIDQNKLKPEMDEKGNLTTAGFACSQCGQPLFVYKLEQVSEKGKAYTNYFGRCNVAEHEKLILLAQLKPEKDSDEAVTYSLGKFGQRALDFYSIHVTKESTHPVKPLAQIAGNRYASYPVGKALSDACMGTIASFLSKYQDIIIEHQKVVKGNQKRLESLRELAGKENLEYPSVTLPPQPHTKEGVDAYNEVIARVRMWVNLNLWQKLKLSRDDAKPLLRLKKFPSFPLVERQANEVDWWDMVCNVKKLINEKKEDGKVFWQNLAGYKRQEALRPYLSSEEDRKKGKKFARYQLGDLLLHLEKKHGEDWGKVYDEAWERIDKKVEGLSKHIKLEEERRSEDAQSKAALTDWLRAKASFVIEGLKEADKDEFCRCELKLQKWYGDLRGKPFAIEAENSILDISGFSKQYNCAFIWQKDGVKKLNLYLIINYFKGGKLRFKKIKPEAFEANRFYTVINKKSGEIVPMEVNFNFDDPNLIILPLAFGKRQGREFIWNDLLSLETGSLKLANGRVIEKTLYNRRTRQDEPALFVALTFERREVLDSSNIKPMNLIGVDRGENIPAVIALTDPEGCPLSRFKDSLGNPTHILRIGESYKEKQRTIQAKKEVEQRRAGGYSRKYASKAKNLADDMVRNTARDLLYYAVTQDAMLIFENLSRGFGRQGKRTFMAERQYTRMEDWLTAKLAYEGLPSKTYLSKTLAQYTSKTCSNCGFTITSADYDRVLEKLKKTATGWMTTINGKELKVEGQITYYNRYKRQNVVKDLSVELDRLSEESVNNDISSWTKGRSGEALSLLKKRFSHRPVQEKFVCLNCGFETHADEQAALNIARSWLFLRSQEYKKYQTNKTTGNTDKRAFVETWQSFYRKKLKEVWKPAV

SEQ ID NO: 34032 - protein, 978 aa, synthetic construct
  REGION 1..978: note = engineered CasX variant
QEIKRINKIRRRLVKDSNTKKAGKTGPMKTLLVRVMTPDLRERLENLRKKPPNIPQPISNTSRANLNKLLTDYTEMKKAILHVYWEEFQKDPVGLMSRVAQPASKKIDQNKLKPEMDEKGNLTTAGFACSQCGQPLFVYKLEQVSEKGKAYTNYFGRCNVAEHEKLILLAQLKPEKDSDEAVTYSLGKFGQRALDFYSIHVTKESTHPVKPLAQIAGNRYASHPVGKALSDACMGTIASFLSKYQDIIIEHQKVVKGNQKRLESLRELAGKENLEYPSVTLPPQPHTKEGVDAYNEVIARVRMWVNLNLWQKLKLSRDDAKPLLRLKKFPSFPLVERQANEVDWWDMVCNVKKLINEKKEDGKVFWQNLAGYKRQEALRPYLSSEEDRKKGKKFARYQLGDLLLHLEKKHGEDWGKVYDEAWERIDKKVEGLSKHIKLEEERRSEDAQSKAALTDWLRAKASFVIEGLKEADKDEFCRCELKLQKWYGDLRGKPFAIEAENSILDISGFSKQYNCAFIWQKDGVKKLNLYLIINYFKGGKLRFKKIKPEAFEANRFYTVINKKSGEIVPMEVNFNFDDPNLIILPLAFGKRQGREFIWNDLLSLETGSLKLANGRVIEKTLYNRRTRQDEPALFVALTFERREVLDSSNIKPMNLIGVDRGENIPAVIALTDPEGCPLSRFKDSLGNPTHILRIGESYKEKQRTIQAKKEVEQRRAGGYSRKYASKAKNLADDMVRNTARDLLYYAVTQDAMLIFENLSRGFGRQGKRTFMAERQYTRMEDWLTAKLAYEGLPSKTYLSKTLAQYTSKTCSNCGFTITSADYDRVLEKLKKTATGWMTTINGKELKVEGQITYYNRYKRQNVVKDLSVELDRLSEESVNNDISSWTKGRSGEALSLLKKRFSHRPVQEKFVCLNCGFETHADEQAALNIARSWLFLRSQEYKKYQTNKTTGNTDKRAFVETWQSFYRKKLKEVWKPAV

SEQ ID NO: 34033 - protein, 978 aa, synthetic construct
  REGION 1..978: note = engineered CasX variant
QEIKRINKIRRRLVKDSNTKKAGKTGPMKTLLVRVMTPDLRERLENLRKKPPNIPQPISNTSRANLNKLLTDYTEMKKAILHVYWEEFQKDPVGLMSRVAQPASKKIDQNKLKPEMDEKGNLTTAGFACSQCGQPLFVYKLEQVSEKGKAYTNYFGRCNVAEHEKLILLAQLKPEKDSDEAVTYSLGKFGQRALDFYSIHVTKESTHPVKPLAQIAGNRYASSPVGKALSDACMGTIASFLSKYQDIIIEHQKVVKGNQKRLESLRELAGKENLEYPSVTLPPQPHTKEGVDAYNEVIARVRMWVNLNLWQKLKLSRDDAKPLLRLKKFPSFPLVERQANEVDWWDMVCNVKKLINEKKEDGKVFWQNLAGYKRQEALRPYLSSEEDRKKGKKFARYQLGDLLLHLEKKHGEDWGKVYDEAWERIDKKVEGLSKHIKLEEERRSEDAQSKAALTDWLRAKASFVIEGLKEADKDEFCRCELKLQKWYGDLRGKPFAIEAENSILDISGFSKQYNCAFIWQKDGVKKLNLYLIINYFKGGKLRFKKIKPEAFEANRFYTVINKKSGEIVPMEVNFNFDDPNLIILPLAFGKRQGREFIWNDLLSLETGSLKLANGRVIEKTLYNRRTRQDEPALFVALTFERREVLDSSNIKPMNLIGVDRGENIPAVIALTDPEGCPLSRFKDSLGNPTHILRIGESYKEKQRTIQAKKEVEQRRAGGYSRKYASKAKNLADDMVRNTARDLLYYAVTQDAMLIFENLSRGFGRQGKRTFMAERQYTRMEDWLTAKLAYEGLPSKTYLSKTLAQYTSKTCSNCGFTITSADYDRVLEKLKKTATGWMTTINGKELKVEGQITYYNRYKRQNVVKDLSVELDRLSEESVNNDISSWTKGRSGEALSLLKKRFSHRPVQEKFVCLNCGFETHADEQAALNIARSWLFLRSQEYKKYQTNKTTGNTDKRAFVETWQSFYRKKLKEVWKPAV

SEQ ID NO: 34034 - protein, 978 aa, synthetic construct
  REGION 1..978: note = engineered CasX variant
QEIKRINKIRRRLVKDSNTKKAGKTGPMKTLLVRVMTPDLRERLENLRKKPPNIPQPISNTSRANLNKLLTDYTEMKKAILHVYWEEFQKDPVGLMSRVAQPASKKIDQNKLKPEMDEKGNLTTAGFACSQCGQPLFVYKLEQVSEKGKAYTNYFGRCNVAEHEKLILLAQLKPEKDSDEAVTYSLGKFGQRALDFYSIHVTKESTHPVKPLAQIAGNRYASTPVGKALSDACMGTIASFLSKYQDIIIEHQKVVKGNQKRLESLRELAGKENLEYPSVTLPPQPHTKEGVDAYNEVIARVRMWVNLNLWQKLKLSRDDAKPLLRLKKFPSFPLVERQANEVDWWDMVCNVKKLINEKKEDGKVFWQNLAGYKRQEALRPYLSSEEDRKKGKKFARYQLGDLLLHLEKKHGEDWGKVYDEAWERIDKKVEGLSKHIKLEEERRSEDAQSKAALTDWLRAKASFVIEGLKEADKDEFCRCELKLQKWYGDLRGKPFAIEAENSILDISGFSKQYNCAFIWQKDGVKKLNLYLIINYFKGGKLRFKKIKPEAFEANRFYTVINKKSGEIVPMEVNFNFDDPNLIILPLAFGKRQGREFIWNDLLSLETGSLKLANGRVIEKTLYNRRTRQDEPALFVALTFERREVLDSSNIKPMNLIGVDRGENIPAVIALTDPEGCPLSRFKDSLGNPTHILRIGESYKEKQRTIQAKKEVEQRRAGGYSRKYASKAKNLADDMVRNTARDLLYYAVTQDAMLIFENLSRGFGRQGKRTFMAERQYTRMEDWLTAKLAYEGLPSKTYLSKTLAQYTSKTCSNCGFTITSADYDRVLEKLKKTATGWMTTINGKELKVEGQITYYNRYKRQNVVKDLSVELDRLSEESVNNDISSWTKGRSGEALSLLKKRFSHRPVQEKFVCLNCGFETHADEQAALNIARSWLFLRSQEYKKYQTNKTTGNTDKRAFVETWQSFYRKKLKEVWKPAV

SEQ ID NO: 34035 - protein, 978 aa, synthetic construct
  REGION 1..978: note = engineered CasX variant
QEIKRINKIRRRLVKDSNTKKAGKTGPMKTLLVRVMTPDLRERLENLRKKPPNIPQPISNTSRANLNKLLTDYTEMKKAILHVYWEEFQKDPVGLMSRVAQPASKKIDQNKLKPEMDEKGNLTTAGFACSQCGQPLFVYKLEQVSEKGKAYTNYFGRCNVAEHEKLILLAQLKPEKDSDEAVTYSLGKFGQRALDFYSIHVTKESTHPVKPLAQIAGNRYASAPVGKALSDACMGTIASFLSKYQDIIIEHQKVVKGNQKRLESLRELAGKENLEYPSVTLPPQPHTKEGVDAYNEVIARVRMWVNLNLWQKLKLSRDDAKPLLRLKKFPSFPLVERQANEVDWWDMVCNVKKLINEKKEDGKVFWQNLAGYKRQEALRPYLSSEEDRKKGKKFARYQLGDLLLHLEKKHGEDWGKVYDEAWERIDKKVEGLSKHIKLEEERRSEDAQSKAALTDWLRAKASFVIEGLKEADKDEFCRCELKLQKWYGDLRGKPFAIEAENSILDISGFSKQYNCAFIWQKDGVKKLNLYLIINYFKGGKLRFKKIKPEAFEANRFYTVINKKSGEIVPMEVNFNFDDPNLIILPLAFGKRQGREFIWNDLLSLETGSLKLANGRVIEKTLYNRRTRQDEPALFVALTFERREVLDSSNIKPMNLIGVDRGENIPAVIALTDPEGCPLSRFKDSLGNPTHILRIGESYKEKQRTIQAKKEVEQRRAGGYSRKYASKAKNLADDMVRNTARDLLYYAVTQDAMLIFENLSRGFGRQGKRTFMAERQYTRMEDWLTAKLAYEGLPSKTYLSKTLAQYTSKTCSNCGFTITSADYDRVLEKLKKTATGWMTTINGKELKVEGQITYYNRYKRQNVVKDLSVELDRLSEESVNNDISSWTKGRSGEALSLLKKRFSHRPVQEKFVCLNCGFETHADEQAALNIARSWLFLRSQEYKKYQTNKTTGNTDKRAFVETWQSFYRKKLKEVWKPAV

SEQ ID NO: 34036 - protein, 978 aa, synthetic construct
  REGION 1..978: note = engineered CasX variant
QEIKRINKIRRRLVKDSNTKKAGKTGPMKTLLVRVMTPDLRERLENLRKKPPNIPQPISNTSRANLNKLLTDYTEMKKAILHVYWEEFQKDPVGLMSRVAQPASKKIDQNKLKPEMDEKGNLTTAGFACSQCGQPLFVYKLEQVSEKGKAYTNYFGRCNVAEHEKLILLAQLKPEKDSDEAVTYSLGKFGQRALDFYSIHVTKESTHPVKPLAQIAGNRYASVPVGKALSDACMGTIASFLSKYQDIIIEHQKVVKGNQKRLESLRELAGKENLEYPSVTLPPQPHTKEGVDAYNEVIARVRMWVNLNLWQKLKLSRDDAKPLLRLKKFPSFPLVERQANEVDWWDMVCNVKKLINEKKEDGKVFWQNLAGYKRQEALRPYLSSEEDRKKGKKFARYQLGDLLLHLEKKHGEDWGKVYDEAWERIDKKVEGLSKHIKLEEERRSEDAQSKAALTDWLRAKASFVIEGLKEADKDEFCRCELKLQKWYGDLRGKPFAIEAENSILDISGFSKQYNCAFIWQKDGVKKLNLYLIINYFKGGKLRFKKIKPEAFEANRFYTVINKKSGEIVPMEVNFNFDDPNLIILPLAFGKRQGREFIWNDLLSLETGSLKLANGRVIEKTLYNRRTRQDEPALFVALTFERREVLDSSNIKPMNLIGVDRGENIPAVIALTDPEGCPLSRFKDSLGNPTHILRIGESYKEKQRTIQAKKEVEQRRAGGYSRKYASKAKNLADDMVRNTARDLLYYAVTQDAMLIFENLSRGFGRQGKRTFMAERQYTRMEDWLTAKLAYEGLPSKTYLSKTLAQYTSKTCSNCGFTITSADYDRVLEKLKKTATGWMTTINGKELKVEGQITYYNRYKRQNVVKDLSVELDRLSEESVNNDISSWTKGRSGEALSLLKKRFSHRPVQEKFVCLNCGFETHADEQAALNIARSWLFLRSQEYKKYQTNKTTGNTDKRAFVETWQSFYRKKLKEVWKPAV

SEQ ID NO: 34037 - protein, 978 aa, synthetic construct
  REGION 1..978: note = engineered CasX variant
QEIKRINKIRRRLVKDSNTKKAGKTGPMKTLLVRVMTPDLRERLENLRKKPPNIPQPISNTSRANLNKLLTDYTEMKKAILHVYWEEFQKDPVGLMSRVAQPASKKIDQNKLKPEMDEKGNLTTAGFACSQCGQPLFVYKLEQVSEKGKAYTNYFGRCNVAEHEKLIKLAQLKPEKDSDEAVTYSLGKFGQRALDFYSIHVTKESTHPVKPLAQIAGNRYASGPVGKALSDACMGTIASFLSKYQDIIIEHQKVVKGNQKRLESLRELAGKENLEYPSVTLPPQPHTKEGVDAYNEVIARVRMWVNLNLWQKLKLSRDDAKPLLRLKKFPSFPLVERQANEVDWWDMVCNVKKLINEKKEDGKVFWQNLAGYKRQEALRPYLSSEEDRKKGKKFARYQLGDLLLHLEKKHGEDWGKVYDEAWERIDKKVEGLSKHIKLEEERRSEDAQSKAALTDWLRAKASFVIEGLKEADKDEFCRCELKLQKWYGDLRGKPFAIEAENSILDISGFSKQYNCAFIWQKDGVKKLNLYLIINYFKGGKLRFKKIKPEAFEANRFYTVINKKSGEIVPMEVNFNFDDPNLIILPLAFGKRQGREFIWNDLLSLETGSLKLANGRVIEKTLYNRRTRQDEPALFVALTFERREVLDSSNIKPMNLIGVDRGENIPAVIALTDPEGCPLSRFKDSLGNPTHILRIGESYKEKQRTIQAKKEVEQRRAGGYSRKYASKAKNLADDMVRNTARDLLYYAVTQDAMLIFENLSRGFGRQGKRTFMAERQYTRMEDWLTAKLAYEGLPSKTYLSKTLAQYTSKTCSNCGFTITSADYDRVLEKLKKTATGWMTTINGKELKVEGQITYYNRYKRQNVVKDLSVELDRLSEESVNNDISSWTKGRSGEALSLLKKRFSHRPVQEKFVCLNCGFETHADEQAALNIARSWLFLRSQEYKKYQTNKTTGNTDKRAFVETWQSFYRKKLKEVWKPAV

SEQ ID NO: 34038 - protein, 977 aa, synthetic construct
  REGION 1..977: note = engineered CasX variant
QEIKRINKIRRRLVKDSNTKKAGKTGPMKTLLVRVMTPDLRERLENLRKKPPNIPQPISNTSRANLNKLLTDYTEMKKAILHVYWEEFQKDPVGLMSRVAQPASKKIDQNKLKPEMDEKGNLTTAGFACSQCGQPLFVYKLEQVSEKGKAYTNYFGRCNVAEHEKLILLAQLKPEKDSDEAVTYSLGKFGQRALDFYSIHVTKESTHPVKPLAQIAGNRYASPVGKALSDACMGTIASFLSKYQDIIIEHQKVVKGNQKRLESLRELAGKENLEYPSVTLPPQPHTKEGVDAYNEVIARVRMWVNLNLWQKLKLSRDDAKPLLRLKKFPSFPLVERQANEVDWWDMVCNVKKLINEKKEDGKVFWQNLAGYKRQEALRPYLSSEEDRKKGKKFARYQLGDLLLHLEKKHGEDWGKVYDEAWERIDKKVEGLSKHIKLEEERRSEDAQSKAALTDWLRAKASFVIEGLKEADKDEFCRCELKLQKWYGDLRGKPFAIEAENSILDISGFSKQYNCAFIWQKDGVKKLNLYLIINYFKGGKLRFKKIKPEAFEANRFYTVINKKSGEIVPMEVNFNFDDPNLIILPLAFGKRQGREFIWNDLLSLETGSLKLANGRVIEKTLYNRRTRQDEPALFVALTFERREVLDSSNIKPMNLIGVDRGENIPAVIALTDPEGCPLSRFKDSLGNPTHILRIGESYKEKQRTIQAKKEVEQRRAGGYSRKYASKAKNLADDMVRNTARDLLYYAVTQDAMLIFENLSRGFGRQGKRTFMAERQYTRMEDWLTAKLAYEGLPSKTYLSKTLAQYTSKTCSNCGFTITSADYDRVLEKLKKTATGWMTTINGKELKVEGQITYYNRYKRQNVVKDLSVELDRLSEESVNNDISSWTKGRSGEALSLLKKRFSHRPVQEKFVCLNCGFETHADEQAALNIARSWLFLRSQEYKKYQTNKTTGNTDKRAFVETWQSFYRKKLKEVWKPAV

SEQ ID NO: 34039 - protein, 978 aa, synthetic construct
  REGION 1..978: note = engineered CasX variant
QEIKRINKIRRRLVKDSNTKKAGKTGPMKTLLVRVMTPDLRERLENLRKKPPNIPQPISNTSRANLNKLLTDYTEMKKAILHVYWEEFQKDPVGLMSRVAQPASKKIDQNKLKPEMDEKGNLTTAGFACSQCGQPLFVYKLEQVSEKGKAYTNYFGRCNVAEHEKLILLAQLKPEKDSDEAVTYSLGKFGQRALDFYSIHVTKESTHPVKPLAQIAGNRYASYPVGKALSDACMGTIASFLSKYQDIIIEHQKVVKGNQKRLESLRELAGKENLEYPSVTLPPQPHTKEGVDAYNEVIARVRMWVNLNLWQKLKLSRDDAKPLLRLKGFPSFPLVERQANEVDWWDMVCNVKKLINEKKEDGKVFWQNLAGYKRQEALRPYLSSEEDRKKGKKFARYQLGDLLLHLEKKHGEDWGKVYDEAWERIDKKVEGLSKHIKLEEERRSEDAQSKAALTDWLRAKASFVIEGLKEADKDEFCRCELKLQKWYGDLRGKPFAIEAENSILDISGFSKQYNCAFIWQKDGVKKLNLYLIINYFKGGKLRFKKIKPEAFEANRFYTVINKKSGEIVPMEVNFNFDDPNLIILPLAFGKRQGREFIWNDLLSLETGSLKLANGRVIEKTLYNRRTRQDEPALFVALTFERREVLDSSNIKPMNLIGVDRGENIPAVIALTDPEGCPLSRFKDSLGNPTHILRIGERYKEKQRTIQAKKEVEQRRAGGYSRKYASKAKNLADDMVRNTARDLLYYAVTQDAMLIFENLSRGFGRQGKRTFMAERQYTRMEDWLTAKLAYEGLPSKTYLSKTLAQYTSKTCSNCGFTITSADYDRVLEKLKKTATGWMTTINGKELKVEGQITYYNRYKRQNVVKDLSVELDRLSEESVNNDISSWTKGRSGEALSLLKKRFSHRPVQEKFVCLNCGFETHADEQAALNIARSWLFLRSQEYKKYQTNKTTGNTDKRAFVETWQSFYRKKLKEVWKPAV

SEQ ID NO: 34040 - protein, 978 aa, synthetic construct
  REGION 1..978: note = engineered CasX variant
QEIKRINKIRRRLVKDSNTKKAGKTGPMKTLLVRVMTPDLRERLENLRKKPPNIPQPISNTSRANLNKLLTDYTEMKKAILHVYWEEFQKDPVGLMSRVAQPASKKIDQNKLKPEMDEKGNLTTAGFACSQCGQPLFVYKLEQVSEKGKAYTNYFGRCNVAEHEKLILLAQLKPEKDSDEAVTYSLGKFGQRALDFYSIHVTKESTHPVKPLAQIAGNRYASHPVGKALSDACMGTIASFLSKYQDIIIEHQKVVKGNQKRLESLRELAGKENLEYPSVTLPPQPHTKEGVDAYNEVIARVRMWVNLNLWQKLKLSRDDAKPLLRLKGFPSFPLVERQANEVDWWDMVCNVKKLINEKKEDGKVFWQNLAGYKRQEALRPYLSSEEDRKKGKKFARYQLGDLLLHLEKKHGEDWGKVYDEAWERIDKKVEGLSKHIKLEEERRSEDAQSKAALTDWLRAKASFVIEGLKEADKDEFCRCELKLQKWYGDLRGKPFAIEAENSILDISGFSKQYNCAFIWQKDGVKKLNLYLIINYFKGGKLRFKKIKPEAFEANRFYTVINKKSGEIVPMEVNFNFDDPNLIILPLAFGKRQGREFIWNDLLSLETGSLKLANGRVIEKTLYNRRTRQDEPALFVALTFERREVLDSSNIKPMNLIGVDRGENIPAVIALTDPEGCPLSRFKDSLGNPTHILRIGERYKEKQRTIQAKKEVEQRRAGGYSRKYASKAKNLADDMVRNTARDLLYYAVTQDAMLIFENLSRGFGRQGKRTFMAERQYTRMEDWLTAKLAYEGLPSKTYLSKTLAQYTSKTCSNCGFTITSADYDRVLEKLKKTATGWMTTINGKELKVEGQITYYNRYKRQNVVKDLSVELDRLSEESVNNDISSWTKGRSGEALSLLKKRFSHRPVQEKFVCLNCGFETHADEQAALNIARSWLFLRSQEYKKYQTNKTTGNTDKRAFVETWQSFYRKKLKEVWKPAV

SEQ ID NO: 34041 - protein, 978 aa, synthetic construct
  REGION 1..978: note = engineered CasX variant
QEIKRINKIRRRLVKDSNTKKAGKTGPMKTLLVRVMTPDLRERLENLRKKPPNIPQPISNTSRANLNKLLTDYTEMKKAILHVYWEEFQKDPVGLMSRVAQPASKKIDQNKLKPEMDEKGNLTTAGFACSQCGQPLFVYKLEQVSEKGKAYTNYFGRCNVAEHEKLILLAQLKPEKDSDEAVTYSLGKFGQRALDFYSIHVTKESTHPVKPLAQIAGNRYASSPVGKALSDACMGTIASFLSKYQDIIIEHQKVVKGNQKRLESLRELAGKENLEYPSVTLPPQPHTKEGVDAYNEVIARVRMWVNLNLWQKLKLSRDDAKPLLRLKGFPSFPLVERQANEVDWWDMVCNVKKLINEKKEDGKVFWQNLAGYKRQEALRPYLSSEEDRKKGKKFARYQLGDLLLHLEKKHGEDWGKVYDEAWERIDKKVEGLSKHIKLEEERRSEDAQSKAALTDWLRAKASFVIEGLKEADKDEFCRCELKLQKWYGDLRGKPFAIEAENSILDISGFSKQYNCAFIWQKDGVKKLNLYLIINYFKGGKLRFKKIKPEAFEANRFYTVINKKSGEIVPMEVNFNFDDPNLIILPLAFGKRQGREFIWNDLLSLETGSLKLANGRVIEKTLYNRRTRQDEPALFVALTFERREVLDSSNIKPMNLIGVDRGENIPAVIALTDPEGCPLSRFKDSLGNPTHILRIGERYKEKQRTIQAKKEVEQRRAGGYSRKYASKAKNLADDMVRNTARDLLYYAVTQDAMLIFENLSRGFGRQGKRTFMAERQYTRMEDWLTAKLAYEGLPSKTYLSKTLAQYTSKTCSNCGFTITSADYDRVLEKLKKTATGWMTTINGKELKVEGQITYYNRYKRQNVVKDLSVELDRLSEESVNNDISSWTKGRSGEALSLLKKRFSHRPVQEKFVCLNCGFETHADEQAALNIARSWLFLRSQEYKKYQTNKTTGNTDKRAFVETWQSFYRKKLKEVWKPAV

SEQ ID NO: 34042 - protein, 978 aa, synthetic construct
  REGION 1..978: note = engineered CasX variant
QEIKRINKIRRRLVKDSNTKKAGKTGPMKTLLVRVMTPDLRERLENLRKKPPNIPQPISNTSRANLNKLLTDYTEMKKAILHVYWEEFQKDPVGLMSRVAQPASKKIDQNKLKPEMDEKGNLTTAGFACSQCGQPLFVYKLEQVSEKGKAYTNYFGRCNVAEHEKLILLAQLKPEKDSDEAVTYSLGKFGQRALDFYSIHVTKESTHPVKPLAQIAGNRYASTPVGKALSDACMGTIASFLSKYQDIIIEHQKVVKGNQKRLESLRELAGKENLEYPSVTLPPQPHTKEGVDAYNEVIARVRMWVNLNLWQKLKLSRDDAKPLLRLKGFPSFPLVERQANEVDWWDMVCNVKKLINEKKEDGKVFWQNLAGYKRQEALRPYLSSEEDRKKGKKFARYQLGDLLLHLEKKHGEDWGKVYDEAWERIDKKVEGLSKHIKLEEERRSEDAQSKAALTDWLRAKASFVIEGLKEADKDEFCRCELKLQKWYGDLRGKPFAIEAENSILDISGFSKQYNCAFIWQKDGVKKLNLYLIINYFKGGKLRFKKIKPEAFEANRFYTVINKKSGEIVPMEVNFNFDDPNLIILPLAFGKRQGREFIWNDLLSLETGSLKLANGRVIEKTLYNRRTRQDEPALFVALTFERREVLDSSNIKPMNLIGVDRGENIPAVIALTDPEGCPLSRFKDSLGNPTHILRIGERYKEKQRTIQAKKEVEQRRAGGYSRKYASKAKNLADDMVRNTARDLLYYAVTQDAMLIFENLSRGFGRQGKRTFMAERQYTRMEDWLTAKLAYEGLPSKTYLSKTLAQYTSKTCSNCGFTITSADYDRVLEKLKKTATGWMTTINGKELKVEGQITYYNRYKRQNVVKDLSVELDRLSEESVNNDISSWTKGRSGEALSLLKKRFSHRPVQEKFVCLNCGFETHADEQAALNIARSWLFLRSQEYKKYQTNKTTGNTDKRAFVETWQSFYRKKLKEVWKPAV

SEQ ID NO: 34043 - protein, 978 aa, synthetic construct
  REGION 1..978: note = engineered CasX variant
QEIKRINKIRRRLVKDSNTKKAGKTGPMKTLLVRVMTPDLRERLENLRKKPPNIPQPISNTSRANLNKLLTDYTEMKKAILHVYWEEFQKDPVGLMSRVAQPASKKIDQNKLKPEMDEKGNLTTAGFACSQCGQPLFVYKLEQVSEKGKAYTNYFGRCNVAEHEKLILLAQLKPEKDSDEAVTYSLGKFGQRALDFYSIHVTKESTHPVKPLAQIAGNRYASAPVGKALSDACMGTIASFLSKYQDIIIEHQKVVKGNQKRLESLRELAGKENLEYPSVTLPPQPHTKEGVDAYNEVIARVRMWVNLNLWQKLKLSRDDAKPLLRLKGFPSFPLVERQANEVDWWDMVCNVKKLINEKKEDGKVFWQNLAGYKRQEALRPYLSSEEDRKKGKKFARYQLGDLLLHLEKKHGEDWGKVYDEAWERIDKKVEGLSKHIKLEEERRSEDAQSKAALTDWLRAKASFVIEGLKEADKDEFCRCELKLQKWYGDLRGKPFAIEAENSILDISGFSKQYNCAFIWQKDGVKKLNLYLIINYFKGGKLRFKKIKPEAFEANRFYTVINKKSGEIVPMEVNFNFDDPNLIILPLAFGKRQGREFIWNDLLSLETGSLKLANGRVIEKTLYNRRTRQDEPALFVALTFERREVLDSSNIKPMNLIGVDRGENIPAVIALTDPEGCPLSRFKDSLGNPTHILRIGERYKEKQRTIQAKKEVEQRRAGGYSRKYASKAKNLADDMVRNTARDLLYYAVTQDAMLIFENLSRGFGRQGKRTFMAERQYTRMEDWLTAKLAYEGLPSKTYLSKTLAQYTSKTCSNCGFTITSADYDRVLEKLKKTATGWMTTINGKELKVEGQITYYNRYKRQNVVKDLSVELDRLSEESVNNDISSWTKGRSGEALSLLKKRFSHRPVQEKFVCLNCGFETHADEQAALNIARSWLFLRSQEYKKYQTNKTTGNTDKRAFVETWQSFYRKKLKEVWKPAV

SEQ ID NO: 34044 - protein, 978 aa, synthetic construct
  REGION 1..978: note = engineered CasX variant
QEIKRINKIRRRLVKDSNTKKAGKTGPMKTLLVRVMTPDLRERLENLRKKPPNIPQPISNTSRANLNKLLTDYTEMKKAILHVYWEEFQKDPVGLMSRVAQPASKKIDQNKLKPEMDEKGNLTTAGFACSQCGQPLFVYKLEQVSEKGKAYTNYFGRCNVAEHEKLILLAQLKPEKDSDEAVTYSLGKFGQRALDFYSIHVTKESTHPVKPLAQIAGNRYASVPVGKALSDACMGTIASFLSKYQDIIIEHQKVVKGNQKRLESLRELAGKENLEYPSVTLPPQPHTKEGVDAYNEVIARVRMWVNLNLWQKLKLSRDDAKPLLRLKGFPSFPLVERQANEVDWWDMVCNVKKLINEKKEDGKVFWQNLAGYKRQEALRPYLSSEEDRKKGKKFARYQLGDLLLHLEKKHGEDWGKVYDEAWERIDKKVEGLSKHIKLEEERRSEDAQSKAALTDWLRAKASFVIEGLKEADKDEFCRCELKLQKWYGDLRGKPFAIEAENSILDISGFSKQYNCAFIWQKDGVKKLNLYLIINYFKGGKLRFKKIKPEAFEANRFYTVINKKSGEIVPMEVNFNFDDPNLIILPLAFGKRQGREFIWNDLLSLETGSLKLANGRVIEKTLYNRRTRQDEPALFVALTFERREVLDSSNIKPMNLIGVDRGENIPAVIALTDPEGCPLSRFKDSLGNPTHILRIGERYKEKQRTIQAKKEVEQRRAGGYSRKYASKAKNLADDMVRNTARDLLYYAVTQDAMLIFENLSRGFGRQGKRTFMAERQYTRMEDWLTAKLAYEGLPSKTYLSKTLAQYTSKTCSNCGFTITSADYDRVLEKLKKTATGWMTTINGKELKVEGQITYYNRYKRQNVVKDLSVELDRLSEESVNNDISSWTKGRSGEALSLLKKRFSHRPVQEKFVCLNCGFETHADEQAALNIARSWLFLRSQEYKKYQTNKTTGNTDKRAFVETWQSFYRKKLKEVWKPAV

SEQ ID NO: 34045 - protein, 978 aa, synthetic construct
  REGION 1..978: note = engineered CasX variant
QEIKRINKIRRRLVKDSNTKKAGKTGPMKTLLVRVMTPDLRERLENLRKKPPNIPQPISNTSRANLNKLLTDYTEMKKAILHVYWEEFQKDPVGLMSRVAQPASKKIDQNKLKPEMDEKGNLTTAGFACSQCGQPLFVYKLEQVSEKGKAYTNYFGRCNVAEHEKLIKLAQLKPEKDSDEAVTYSLGKFGQRALDFYSIHVTKESTHPVKPLAQIAGNRYASGPVGKALSDACMGTIASFLSKYQDIIIEHQKVVKGNQKRLESLRELAGKENLEYPSVTLPPQPHTKEGVDAYNEVIARVRMWVNLNLWQKLKLSRDDAKPLLRLKGFPSFPLVERQANEVDWWDMVCNVKKLINEKKEDGKVFWQNLAGYKRQEALRPYLSSEEDRKKGKKFARYQLGDLLLHLEKKHGEDWGKVYDEAWERIDKKVEGLSKHIKLEEERRSEDAQSKAALTDWLRAKASFVIEGLKEADKDEFCRCELKLQKWYGDLRGKPFAIEAENSILDISGFSKQYNCAFIWQKDGVKKLNLYLIINYFKGGKLRFKKIKPEAFEANRFYTVINKKSGEIVPMEVNFNFDDPNLIILPLAFGKRQGREFIWNDLLSLETGSLKLANGRVIEKTLYNRRTRQDEPALFVALTFERREVLDSSNIKPMNLIGVDRGENIPAVIALTDPEGCPLSRFKDSLGNPTHILRIGERYKEKQRTIQAKKEVEQRRAGGYSRKYASKAKNLADDMVRNTARDLLYYAVTQDAMLIFENLSRGFGRQGKRTFMAERQYTRMEDWLTAKLAYEGLPSKTYLSKTLAQYTSKTCSNCGFTITSADYDRVLEKLKKTATGWMTTINGKELKVEGQITYYNRYKRQNVVKDLSVELDRLSEESVNNDISSWTKGRSGEALSLLKKRFSHRPVQEKFVCLNCGFETHADEQAALNIARSWLFLRSQEYKKYQTNKTTGNTDKRAFVETWQSFYRKKLKEVWKPAV

SEQ ID NO: 34046 - protein, 977 aa, synthetic construct
  REGION 1..977: note = engineered CasX variant
QEIKRINKIRRRLVKDSNTKKAGKTGPMKTLLVRVMTPDLRERLENLRKKPPNIPQPISNTSRANLNKLLTDYTEMKKAILHVYWEEFQKDPVGLMSRVAQPASKKIDQNKLKPEMDEKGNLTTAGFACSQCGQPLFVYKLEQVSEKGKAYTNYFGRCNVAEHEKLILLAQLKPEKDSDEAVTYSLGKFGQRALDFYSIHVTKESTHPVKPLAQIAGNRYASPVGKALSDACMGTIASFLSKYQDIIIEHQKVVKGNQKRLESLRELAGKENLEYPSVTLPPQPHTKEGVDAYNEVIARVRMWVNLNLWQKLKLSRDDAKPLLRLKGFPSFPLVERQANEVDWWDMVCNVKKLINEKKEDGKVFWQNLAGYKRQEALRPYLSSEEDRKKGKKFARYQLGDLLLHLEKKHGEDWGKVYDEAWERIDKKVEGLSKHIKLEEERRSEDAQSKAALTDWLRAKASFVIEGLKEADKDEFCRCELKLQKWYGDLRGKPFAIEAENSILDISGFSKQYNCAFIWQKDGVKKLNLYLIINYFKGGKLRFKKIKPEAFEANRFYTVINKKSGEIVPMEVNFNFDDPNLIILPLAFGKRQGREFIWNDLLSLETGSLKLANGRVIEKTLYNRRTRQDEPALFVALTFERREVLDSSNIKPMNLIGVDRGENIPAVIALTDPEGCPLSRFKDSLGNPTHILRIGERYKEKQRTIQAKKEVEQRRAGGYSRKYASKAKNLADDMVRNTARDLLYYAVTQDAMLIFENLSRGFGRQGKRTFMAERQYTRMEDWLTAKLAYEGLPSKTYLSKTLAQYTSKTCSNCGFTITSADYDRVLEKLKKTATGWMTTINGKELKVEGQITYYNRYKRQNVVKDLSVELDRLSEESVNNDISSWTKGRSGEALSLLKKRFSHRPVQEKFVCLNCGFETHADEQAALNIARSWLFLRSQEYKKYQTNKTTGNTDKRAFVETWQSFYRKKLKEVWKPAV

SEQ ID NO: 34047 - protein, 978 aa, synthetic construct
  REGION 1..978: note = engineered CasX variant
QEIKRINKIRRRLVKDSNTKKAGKTGPMKTLLVRVMTPDLRERLENLRKKPPNIPQPISNTSRANLNKLLTDYTEMKKAILHVYWEEFQKDPVGLMSRVAQPASKKIDQNKLKPEMDEKGNLTTAGFACSQCGQPLFVYKLEQVSEKGKAYTNYFGRCNVAEHEKLILLAQLKPEKDSDEAVTYSLGKFGQRALDFYSIHVTKESTHPVKPLAQIAGNRYASYPVGKALSDACMGTIASFLSKYQDIIIEHQKVVKGNQKRLESLRELAGKENLEYPSVTLPPQPHTKEGVDAYNEVIARVRMWVNLNLWQKLKLSRDDAKPLLRLKGFPSFPLVERQANEVDWWDMVCNVKKLINEKKEDGKVFWQNLAGYKRQEALRPYLSSEEDRKKGKKFARYQLGDLLLHLEKKHGEDWGKVYDEAWERIDKKVEGLSKHIKLEEERRSEDAQSKAALTDWLRAKASFVIEGLKEADKDEFCRCELKLQKWYGDLRGKPFAIEAENSILDISGFSKQYNCAFIWQKDGVKKLNLYLIINYFKGGKLRFKKIKPEAFEANRFYTVINKKSGEIVPMEVNFNFDDPNLIILPLAFGKRQGREFIWNDLLSLETGSLQLANGRVIEKTLYNRRTRQDEPALFVALTFERREVLDSSNIKPMNLIGVDRGENIPAVIALTDPEGCPLSRFKDSLGNPTHILRIGESYKEKQRTIQAKKEVEQRRAGGYSRKYASKAKNLADDMVRNTARDLLYYAVTQDAMLIFENLSRGFGRQGKRTFMAERQYTRMEDWLTAKLAYEGLPSKTYLSKTLAQYTSKTCSNCGFTITSADYDRVLEKLKKTATGWMTTINGKELKVEGQITYYNRYKRQNVVKDLSVELDRLSEESVNNDISSWTKGRSGEALSLLKKRFSHRPVQEKFVCLNCGFETHADEQAALNIARSWLFLRSQEYKKYQTNKTTGNTDKRAFVETWQSFYRKKLKEVWKPAV

SEQ ID NO: 34048 - protein, 978 aa, synthetic construct
  REGION 1..978: note = engineered CasX variant
QEIKRINKIRRRLVKDSNTKKAGKTGPMKTLLVRVMTPDLRERLENLRKKPPNIPQPISNTSRANLNKLLTDYTEMKKAILHVYWEEFQKDPVGLMSRVAQPASKKIDQNKLKPEMDEKGNLTTAGFACSQCGQPLFVYKLEQVSEKGKAYTNYFGRCNVAEHEKLILLAQLKPEKDSDEAVTYSLGKFGQRALDFYSIHVTKESTHPVKPLAQIAGNRYASHPVGKALSDACMGTIASFLSKYQDIIIEHQKVVKGNQKRLESLRELAGKENLEYPSVTLPPQPHTKEGVDAYNEVIARVRMWVNLNLWQKLKLSRDDAKPLLRLKGFPSFPLVERQANEVDWWDMVCNVKKLINEKKEDGKVFWQNLAGYKRQEALRPYLSSEEDRKKGKKFARYQLGDLLLHLEKKHGEDWGKVYDEAWERIDKKVEGLSKHIKLEEERRSEDAQSKAALTDWLRAKASFVIEGLKEADKDEFCRCELKLQKWYGDLRGKPFAIEAENSILDISGFSKQYNCAFIWQKDGVKKLNLYLIINYFKGGKLRFKKIKPEAFEANRFYTVINKKSGEIVPMEVNFNFDDPNLIILPLAFGKRQGREFIWNDLLSLETGSLQLANGRVIEKTLYNRRTRQDEPALFVALTFERREVLDSSNIKPMNLIGVDRGENIPAVIALTDPEGCPLSRFKDSLGNPTHILRIGESYKEKQRTIQAKKEVEQRRAGGYSRKYASKAKNLADDMVRNTARDLLYYAVTQDAMLIFENLSRGFGRQGKRTFMAERQYTRMEDWLTAKLAYEGLPSKTYLSKTLAQYTSKTCSNCGFTITSADYDRVLEKLKKTATGWMTTINGKELKVEGQITYYNRYKRQNVVKDLSVELDRLSEESVNNDISSWTKGRSGEALSLLKKRFSHRPVQEKFVCLNCGFETHADEQAALNIARSWLFLRSQEYKKYQTNKTTGNTDKRAFVETWQSFYRKKLKEVWKPAV

SEQ ID NO: 34049 - protein, 978 aa, synthetic construct
  REGION 1..978: note = engineered CasX variant
QEIKRINKIRRRLVKDSNTKKAGKTGPMKTLLVRVMTPDLRERLENLRKKPPNIPQPISNTSRANLNKLLTDYTEMKKAILHVYWEEFQKDPVGLMSRVAQPASKKIDQNKLKPEMDEKGNLTTAGFACSQCGQPLFVYKLEQVSEKGKAYTNYFGRCNVAEHEKLILLAQLKPEKDSDEAVTYSLGKFGQRALDFYSIHVTKESTHPVKPLAQIAGNRYASSPVGKALSDACMGTIASFLSKYQDIIIEHQKVVKGNQKRLESLRELAGKENLEYPSVTLPPQPHTKEGVDAYNEVIARVRMWVNLNLWQKLKLSRDDAKPLLRLKGFPSFPLVERQANEVDWWDMVCNVKKLINEKKEDGKVFWQNLAGYKRQEALRPYLSSEEDRKKGKKFARYQLGDLLLHLEKKHGEDWGKVYDEAWERIDKKVEGLSKHIKLEEERRSEDAQSKAALTDWLRAKASFVIEGLKEADKDEFCRCELKLQKWYGDLRGKPFAIEAENSILDISGFSKQYNCAFIWQKDGVKKLNLYLIINYFKGGKLRFKKIKPEAFEANRFYTVINKKSGEIVPMEVNFNFDDPNLIILPLAFGKRQGREFIWNDLLSLETGSLQLANGRVIEKTLYNRRTRQDEPALFVALTFERREVLDSSNIKPMNLIGVDRGENIPAVIALTDPEGCPLSRFKDSLGNPTHILRIGESYKEKQRTIQAKKEVEQRRAGGYSRKYASKAKNLADDMVRNTARDLLYYAVTQDAMLIFENLSRGFGRQGKRTFMAERQYTRMEDWLTAKLAYEGLPSKTYLSKTLAQYTSKTCSNCGFTITSADYDRVLEKLKKTATGWMTTINGKELKVEGQITYYNRYKRQNVVKDLSVELDRLSEESVNNDISSWTKGRSGEALSLLKKRFSHRPVQEKFVCLNCGFETHADEQAALNIARSWLFLRSQEYKKYQTNKTTGNTDKRAFVETWQSFYRKKLKEVWKPAV

SEQ ID NO: 34050 - protein, 978 aa, synthetic construct
  REGION 1..978: note = engineered CasX variant
QEIKRINKIRRRLVKDSNTKKAGKTGPMKTLLVRVMTPDLRERLENLRKKPPNIPQPISNTSRANLNKLLTDYTEMKKAILHVYWEEFQKDPVGLMSRVAQPASKKIDQNKLKPEMDEKGNLTTAGFACSQCGQPLFVYKLEQVSEKGKAYTNYFGRCNVAEHEKLILLAQLKPEKDSDEAVTYSLGKFGQRALDFYSIHVTKESTHPVKPLAQIAGNRYASTPVGKALSDACMGTIASFLSKYQDIIIEHQKVVKGNQKRLESLRELAGKENLEYPSVTLPPQPHTKEGVDAYNEVIARVRMWVNLNLWQKLKLSRDDAKPLLRLKGFPSFPLVERQANEVDWWDMVCNVKKLINEKKEDGKVFWQNLAGYKRQEALRPYLSSEEDRKKGKKFARYQLGDLLLHLEKKHGEDWGKVYDEAWERIDKKVEGLSKHIKLEEERRSEDAQSKAALTDWLRAKASFVIEGLKEADKDEFCRCELKLQKWYGDLRGKPFAIEAENSILDISGFSKQYNCAFIWQKDGVKKLNLYLIINYFKGGKLRFKKIKPEAFEANRFYTVINKKSGEIVPMEVNFNFDDPNLIILPLAFGKRQGREFIWNDLLSLETGSLQLANGRVIEKTLYNRRTRQDEPALFVALTFERREVLDSSNIKPMNLIGVDRGENIPAVIALTDPEGCPLSRFKDSLGNPTHILRIGESYKEKQRTIQAKKEVEQRRAGGYSRKYASKAKNLADDMVRNTARDLLYYAVTQDAMLIFENLSRGFGRQGKRTFMAERQYTRMEDWLTAKLAYEGLPSKTYLSKTLAQYTSKTCSNCGFTITSADYDRVLEKLKKTATGWMTTINGKELKVEGQITYYNRYKRQNVVKDLSVELDRLSEESVNNDISSWTKGRSGEALSLLKKRFSHRPVQEKFVCLNCGFETHADEQAALNIARSWLFLRSQEYKKYQTNKTTGNTDKRAFVETWQSFYRKKLKEVWKPAV

SEQ ID NO: 34051 - protein, 978 aa, synthetic construct
  REGION 1..978: note = engineered CasX variant
QEIKRINKIRRRLVKDSNTKKAGKTGPMKTLLVRVMTPDLRERLENLRKKPPNIPQPISNTSRANLNKLLTDYTEMKKAILHVYWEEFQKDPVGLMSRVAQPASKKIDQNKLKPEMDEKGNLTTAGFACSQCGQPLFVYKLEQVSEKGKAYTNYFGRCNVAEHEKLILLAQLKPEKDSDEAVTYSLGKFGQRALDFYSIHVTKESTHPVKPLAQIAGNRYASAPVGKALSDACMGTIASFLSKYQDIIIEHQKVVKGNQKRLESLRELAGKENLEYPSVTLPPQPHTKEGVDAYNEVIARVRMWVNLNLWQKLKLSRDDAKPLLRLKGFPSFPLVERQANEVDWWDMVCNVKKLINEKKEDGKVFWQNLAGYKRQEALRPYLSSEEDRKKGKKFARYQLGDLLLHLEKKHGEDWGKVYDEAWERIDKKVEGLSKHIKLEEERRSEDAQSKAALTDWLRAKASFVIEGLKEADKDEFCRCELKLQKWYGDLRGKPFAIEAENSILDISGFSKQYNCAFIWQKDGVKKLNLYLIINYFKGGKLRFKKIKPEAFEANRFYTVINKKSGEIVPMEVNFNFDDPNLIILPLAFGKRQGREFIWNDLLSLETGSLQLANGRVIEKTLYNRRTRQDEPALFVALTFERREVLDSSNIKPMNLIGVDRGENIPAVIALTDPEGCPLSRFKDSLGNPTHILRIGESYKEKQRTIQAKKEVEQRRAGGYSRKYASKAKNLADDMVRNTARDLLYYAVTQDAMLIFENLSRGFGRQGKRTFMAERQYTRMEDWLTAKLAYEGLPSKTYLSKTLAQYTSKTCSNCGFTITSADYDRVLEKLKKTATGWMTTINGKELKVEGQITYYNRYKRQNVVKDLSVELDRLSEESVNNDISSWTKGRSGEALSLLKKRFSHRPVQEKFVCLNCGFETHADEQAALNIARSWLFLRSQEYKKYQTNKTTGNTDKRAFVETWQSFYRKKLKEVWKPAV

SEQ ID NO: 34052 - protein, 978 aa, synthetic construct
  REGION 1..978: note = engineered CasX variant
QEIKRINKIRRRLVKDSNTKKAGKTGPMKTLLVRVMTPDLRERLENLRKKPPNIPQPISNTSRANLNKLLTDYTEMKKAILHVYWEEFQKDPVGLMSRVAQPASKKIDQNKLKPEMDEKGNLTTAGFACSQCGQPLFVYKLEQVSEKGKAYTNYFGRCNVAEHEKLILLAQLKPEKDSDEAVTYSLGKFGQRALDFYSIHVTKESTHPVKPLAQIAGNRYASVPVGKALSDACMGTIASFLSKYQDIIIEHQKVVKGNQKRLESLRELAGKENLEYPSVTLPPQPHTKEGVDAYNEVIARVRMWVNLNLWQKLKLSRDDAKPLLRLKGFPSFPLVERQANEVDWWDMVCNVKKLINEKKEDGKVFWQNLAGYKRQEALRPYLSSEEDRKKGKKFARYQLGDLLLHLEKKHGEDWGKVYDEAWERIDKKVEGLSKHIKLEEERRSEDAQSKAALTDWLRAKASFVIEGLKEADKDEFCRCELKLQKWYGDLRGKPFAIEAENSILDISGFSKQYNCAFIWQKDGVKKLNLYLIINYFKGGKLRFKKIKPEAFEANRFYTVINKKSGEIVPMEVNFNFDDPNLIILPLAFGKRQGREFIWNDLLSLETGSLQLANGRVIEKTLYNRRTRQDEPALFVALTFERREVLDSSNIKPMNLIGVDRGENIPAVIALTDPEGCPLSRFKDSLGNPTHILRIGESYKEKQRTIQAKKEVEQRRAGGYSRKYASKAKNLADDMVRNTARDLLYYAVTQDAMLIFENLSRGFGRQGKRTFMAERQYTRMEDWLTAKLAYEGLPSKTYLSKTLAQYTSKTCSNCGFTITSADYDRVLEKLKKTATGWMTTINGKELKVEGQITYYNRYKRQNVVKDLSVELDRLSEESVNNDISSWTKGRSGEALSLLKKRFSHRPVQEKFVCLNCGFETHADEQAALNIARSWLFLRSQEYKKYQTNKTTGNTDKRAFVETWQSFYRKKLKEVWKPAV

SEQ ID NO: 34053 - protein, 978 aa, synthetic construct
  REGION 1..978: note = engineered CasX variant
QEIKRINKIRRRLVKDSNTKKAGKTGPMKTLLVRVMTPDLRERLENLRKKPPNIPQPISNTSRANLNKLLTDYTEMKKAILHVYWEEFQKDPVGLMSRVAQPASKKIDQNKLKPEMDEKGNLTTAGFACSQCGQPLFVYKLEQVSEKGKAYTNYFGRCNVAEHEKLIKLAQLKPEKDSDEAVTYSLGKFGQRALDFYSIHVTKESTHPVKPLAQIAGNRYASGPVGKALSDACMGTIASFLSKYQDIIIEHQKVVKGNQKRLESLRELAGKENLEYPSVTLPPQPHTKEGVDAYNEVIARVRMWVNLNLWQKLKLSRDDAKPLLRLKGFPSFPLVERQANEVDWWDMVCNVKKLINEKKEDGKVFWQNLAGYKRQEALRPYLSSEEDRKKGKKFARYQLGDLLLHLEKKHGEDWGKVYDEAWERIDKKVEGLSKHIKLEEERRSEDAQSKAALTDWLRAKASFVIEGLKEADKDEFCRCELKLQKWYGDLRGKPFAIEAENSILDISGFSKQYNCAFIWQKDGVKKLNLYLIINYFKGGKLRFKKIKPEAFEANRFYTVINKKSGEIVPMEVNFNFDDPNLIILPLAFGKRQGREFIWNDLLSLETGSLQLANGRVIEKTLYNRRTRQDEPALFVALTFERREVLDSSNIKPMNLIGVDRGENIPAVIALTDPEGCPLSRFKDSLGNPTHILRIGESYKEKQRTIQAKKEVEQRRAGGYSRKYASKAKNLADDMVRNTARDLLYYAVTQDAMLIFENLSRGFGRQGKRTFMAERQYTRMEDWLTAKLAYEGLPSKTYLSKTLAQYTSKTCSNCGFTITSADYDRVLEKLKKTATGWMTTINGKELKVEGQITYYNRYKRQNVVKDLSVELDRLSEESVNNDISSWTKGRSGEALSLLKKRFSHRPVQEKFVCLNCGFETHADEQAALNIARSWLFLRSQEYKKYQTNKTTGNTDKRAFVETWQSFYRKKLKEVWKPAV

SEQ ID NO: 34054 - protein, 977 aa, synthetic construct
  REGION 1..977: note = engineered CasX variant
QEIKRINKIRRRLVKDSNTKKAGKTGPMKTLLVRVMTPDLRERLENLRKKPPNIPQPISNTSRANLNKLLTDYTEMKKAILHVYWEEFQKDPVGLMSRVAQPASKKIDQNKLKPEMDEKGNLTTAGFACSQCGQPLFVYKLEQVSEKGKAYTNYFGRCNVAEHEKLILLAQLKPEKDSDEAVTYSLGKFGQRALDFYSIHVTKESTHPVKPLAQIAGNRYASPVGKALSDACMGTIASFLSKYQDIIIEHQKVVKGNQKRLESLRELAGKENLEYPSVTLPPQPHTKEGVDAYNEVIARVRMWVNLNLWQKLKLSRDDAKPLLRLKGFPSFPLVERQANEVDWWDMVCNVKKLINEKKEDGKVFWQNLAGYKRQEALRPYLSSEEDRKKGKKFARYQLGDLLLHLEKKHGEDWGKVYDEAWERIDKKVEGLSKHIKLEEERRSEDAQSKAALTDWLRAKASFVIEGLKEADKDEFCRCELKLQKWYGDLRGKPFAIEAENSILDISGFSKQYNCAFIWQKDGVKKLNLYLIINYFKGGKLRFKKIKPEAFEANRFYTVINKKSGEIVPMEVNFNFDDPNLIILPLAFGKRQGREFIWNDLLSLETGSLQLANGRVIEKTLYNRRTRQDEPALFVALTFERREVLDSSNIKPMNLIGVDRGENIPAVIALTDPEGCPLSRFKDSLGNPTHILRIGESYKEKQRTIQAKKEVEQRRAGGYSRKYASKAKNLADDMVRNTARDLLYYAVTQDAMLIFENLSRGFGRQGKRTFMAERQYTRMEDWLTAKLAYEGLPSKTYLSKTLAQYTSKTCSNCGFTITSADYDRVLEKLKKTATGWMTTINGKELKVEGQITYYNRYKRQNVVKDLSVELDRLSEESVNNDISSWTKGRSGEALSLLKKRFSHRPVQEKFVCLNCGFETHADEQAALNIARSWLFLRSQEYKKYQTNKTTGNTDKRAFVETWQSFYRKKLKEVWKPAV

SEQ ID NO: 34055 - protein, 978 aa, synthetic construct
  REGION 1..978: note = engineered CasX variant
QEIKRINKIRRRLVKDSNTKKAGKTGPMKTLLVRVMTPDLRERLENLRKKPENIPQPISNTSQANLNKLLTDYTEMKKAILHVYDEEFQKDPVGLMSRVAQPASKKIDQNKLKPEMDEKGNLTTAGFACSQCGQPLFVYKLEQVSEKGKAYTNYFGRCNVAEHEKLILLAQLKPEKDSDEAVTYSLGKFGQRALDFYSIHVTKESTHPVKPLAQIAGNRYASYPVGKALSDACMGTIASFLSKYQDIIIEHQKVVKGNQKRLESLRELAGKENLEYPSVTLPPQPHTKEGVDAYNEVIARVRMWVNLNLWQKLKLSRDDAKPLLRLKGFPSFPLVERQANEVDWWDMVCNVKKLINEKKEDGKVFWQNLAGYKRQEALRPYLSSEEDRKKGKKFARYQLGDLLLHLEKKHGEDWGKVYDEAWERIDKKVEGLSKHIKLEEERRSEDAQSKAALTDWLRAKASFVIEGLKEADKDEFCRCELKLQKWYGDLRGKPFAIEAENSILDISGFSKQYNCAFIWQKDGVKKLNLYLIINYFKGGKLRFKKIKPEAFEANRFYTVINKKSGEIVPMEVNFNFDDPNLIILPLAFGKRQGREFIWNDLLSLETGSLKLANGRVIEKTLYNRRTRQDEPALFVALTFERREVLDSSNIKPMNLIGVDRGENIPAVIALTDPEGCPLSRFKDSLGNPTHILRIGESYKEKQRTIQAKKEVEQRRAGGYSRKYASKAKNLADDMVRNTARDLLYYAVTQDAMLIFENLSRGFGRQGKRTFMAERQYTRMEDWLTAKLAYEGLPSKTYLSKTLAQYTSKTCSNCGFTITSADYDRVLEKLKKTATGWMTTINGKELKVEGQITYYNRYKRQNVVKDLSVELDRLSEESVNNDISSWTKGRSGEALSLLKKRFSHRPVQEKFVCLNCGFETHADEQAALNIARSWLFLRSQEYKKYQTNKTTGNTDKRAFVETWQSFYRKKLKEVWKPAV

SEQ ID NO: 34056 - protein, 978 aa, synthetic construct
  REGION 1..978: note = engineered CasX variant
QEIKRINKIRRRLVKDSNTKKAGKTGPMKTLLVRVMTPDLRERLENLRKKPENIPQPISNTSQANLNKLLTDYTEMKKAILHVYDEEFQKDPVGLMSRVAQPASKKIDQNKLKPEMDEKGNLTTAGFACSQCGQPLFVYKLEQVSEKGKAYTNYFGRCNVAEHEKLILLAQLKPEKDSDEAVTYSLGKFGQRALDFYSIHVTKESTHPVKPLAQIAGNRYASHPVGKALSDACMGTIASFLSKYQDIIIEHQKVVKGNQKRLESLRELAGKENLEYPSVTLPPQPHTKEGVDAYNEVIARVRMWVNLNLWQKLKLSRDDAKPLLRLKGFPSFPLVERQANEVDWWDMVCNVKKLINEKKEDGKVFWQNLAGYKRQEALRPYLSSEEDRKKGKKFARYQLGDLLLHLEKKHGEDWGKVYDEAWERIDKKVEGLSKHIKLEEERRSEDAQSKAALTDWLRAKASFVIEGLKEADKDEFCRCELKLQKWYGDLRGKPFAIEAENSILDISGFSKQYNCAFIWQKDGVKKLNLYLIINYFKGGKLRFKKIKPEAFEANRFYTVINKKSGEIVPMEVNFNFDDPNLIILPLAFGKRQGREFIWNDLLSLETGSLKLANGRVIEKTLYNRRTRQDEPALFVALTFERREVLDSSNIKPMNLIGVDRGENIPAVIALTDPEGCPLSRFKDSLGNPTHILRIGESYKEKQRTIQAKKEVEQRRAGGYSRKYASKAKNLADDMVRNTARDLLYYAVTQDAMLIFENLSRGFGRQGKRTFMAERQYTRMEDWLTAKLAYEGLPSKTYLSKTLAQYTSKTCSNCGFTITSADYDRVLEKLKKTATGWMTTINGKELKVEGQITYYNRYKRQNVVKDLSVELDRLSEESVNNDISSWTKGRSGEALSLLKKRFSHRPVQEKFVCLNCGFETHADEQAALNIARSWLFLRSQEYKKYQTNKTTGNTDKRAFVETWQSFYRKKLKEVWKPAV

SEQ ID NO: 34057 - protein, 978 aa, synthetic construct
  REGION 1..978: note = engineered CasX variant
QEIKRINKIRRRLVKDSNTKKAGKTGPMKTLLVRVMTPDLRERLENLRKKPENIPQPISNTSQANLNKLLTDYTEMKKAILHVYDEEFQKDPVGLMSRVAQPASKKIDQNKLKPEMDEKGNLTTAGFACSQCGQPLFVYKLEQVSEKGKAYTNYFGRCNVAEHEKLILLAQLKPEKDSDEAVTYSLGKFGQRALDFYSIHVTKESTHPVKPLAQIAGNRYASSPVGKALSDACMGTIASFLSKYQDIIIEHQKVVKGNQKRLESLRELAGKENLEYPSVTLPPQPHTKEGVDAYNEVIARVRMWVNLNLWQKLKLSRDDAKPLLRLKGFPSFPLVERQANEVDWWDMVCNVKKLINEKKEDGKVFWQNLAGYKRQEALRPYLSSEEDRKKGKKFARYQLGDLLLHLEKKHGEDWGKVYDEAWERIDKKVEGLSKHIKLEEERRSEDAQSKAALTDWLRAKASFVIEGLKEADKDEFCRCELKLQKWYGDLRGKPFAIEAENSILDISGFSKQYNCAFIWQKDGVKKLNLYLIINYFKGGKLRFKKIKPEAFEANRFYTVINKKSGEIVPMEVNFNFDDPNLIILPLAFGKRQGREFIWNDLLSLETGSLKLANGRVIEKTLYNRRTRQDEPALFVALTFERREVLDSSNIKPMNLIGVDRGENIPAVIALTDPEGCPLSRFKDSLGNPTHILRIGESYKEKQRTIQAKKEVEQRRAGGYSRKYASKAKNLADDMVRNTARDLLYYAVTQDAMLIFENLSRGFGRQGKRTFMAERQYTRMEDWLTAKLAYEGLPSKTYLSKTLAQYTSKTCSNCGFTITSADYDRVLEKLKKTATGWMTTINGKELKVEGQITYYNRYKRQNVVKDLSVELDRLSEESVNNDISSWTKGRSGEALSLLKKRFSHRPVQEKFVCLNCGFETHADEQAALNIARSWLFLRSQEYKKYQTNKTTGNTDKRAFVETWQSFYRKKLKEVWKPAV

SEQ ID NO: 34058 - protein, 978 aa, synthetic construct
  REGION 1..978: note = engineered CasX variant
QEIKRINKIRRRLVKDSNTKKAGKTGPMKTLLVRVMTPDLRERLENLRKKPENIPQPISNTSQANLNKLLTDYTEMKKAILHVYDEEFQKDPVGLMSRVAQPASKKIDQNKLKPEMDEKGNLTTAGFACSQCGQPLFVYKLEQVSEKGKAYTNYFGRCNVAEHEKLILLAQLKPEKDSDEAVTYSLGKFGQRALDFYSIHVTKESTHPVKPLAQIAGNRYASTPVGKALSDACMGTIASFLSKYQDIIIEHQKVVKGNQKRLESLRELAGKENLEYPSVTLPPQPHTKEGVDAYNEVIARVRMWVNLNLWQKLKLSRDDAKPLLRLKGFPSFPLVERQANEVDWWDMVCNVKKLINEKKEDGKVFWQNLAGYKRQEALRPYLSSEEDRKKGKKFARYQLGDLLLHLEKKHGEDWGKVYDEAWERIDKKVEGLSKHIKLEEERRSEDAQSKAALTDWLRAKASFVIEGLKEADKDEFCRCELKLQKWYGDLRGKPFAIEAENSILDISGFSKQYNCAFIWQKDGVKKLNLYLIINYFKGGKLRFKKIKPEAFEANRFYTVINKKSGEIVPMEVNFNFDDPNLIILPLAFGKRQGREFIWNDLLSLETGSLKLANGRVIEKTLYNRRTRQDEPALFVALTFERREVLDSSNIKPMNLIGVDRGENIPAVIALTDPEGCPLSRFKDSLGNPTHILRIGESYKEKQRTIQAKKEVEQRRAGGYSRKYASKAKNLADDMVRNTARDLLYYAVTQDAMLIFENLSRGFGRQGKRTFMAERQYTRMEDWLTAKLAYEGLPSKTYLSKTLAQYTSKTCSNCGFTITSADYDRVLEKLKKTATGWMTTINGKELKVEGQITYYNRYKRQNVVKDLSVELDRLSEESVNNDISSWTKGRSGEALSLLKKRFSHRPVQEKFVCLNCGFETHADEQAALNIARSWLFLRSQEYKKYQTNKTTGNTDKRAFVETWQSFYRKKLKEVWKPAV

SEQ ID NO: 34059 - protein, 978 aa, synthetic construct
  REGION 1..978: note = engineered CasX variant
QEIKRINKIRRRLVKDSNTKKAGKTGPMKTLLVRVMTPDLRERLENLRKKPENIPQPISNTSQANLNKLLTDYTEMKKAILHVYDEEFQKDPVGLMSRVAQPASKKIDQNKLKPEMDEKGNLTTAGFACSQCGQPLFVYKLEQVSEKGKAYTNYFGRCNVAEHEKLILLAQLKPEKDSDEAVTYSLGKFGQRALDFYSIHVTKESTHPVKPLAQIAGNRYASAPVGKALSDACMGTIASFLSKYQDIIIEHQKVVKGNQKRLESLRELAGKENLEYPSVTLPPQPHTKEGVDAYNEVIARVRMWVNLNLWQKLKLSRDDAKPLLRLKGFPSFPLVERQANEVDWWDMVCNVKKLINEKKEDGKVFWQNLAGYKRQEALRPYLSSEEDRKKGKKFARYQLGDLLLHLEKKHGEDWGKVYDEAWERIDKKVEGLSKHIKLEEERRSEDAQSKAALTDWLRAKASFVIEGLKEADKDEFCRCELKLQKWYGDLRGKPFAIEAENSILDISGFSKQYNCAFIWQKDGVKKLNLYLIINYFKGGKLRFKKIKPEAFEANRFYTVINKKSGEIVPMEVNFNFDDPNLIILPLAFGKRQGREFIWNDLLSLETGSLKLANGRVIEKTLYNRRTRQDEPALFVALTFERREVLDSSNIKPMNLIGVDRGENIPAVIALTDPEGCPLSRFKDSLGNPTHILRIGESYKEKQRTIQAKKEVEQRRAGGYSRKYASKAKNLADDMVRNTARDLLYYAVTQDAMLIFENLSRGFGRQGKRTFMAERQYTRMEDWLTAKLAYEGLPSKTYLSKTLAQYTSKTCSNCGFTITSADYDRVLEKLKKTATGWMTTINGKELKVEGQITYYNRYKRQNVVKDLSVELDRLSEESVNNDISSWTKGRSGEALSLLKKRFSHRPVQEKFVCLNCGFETHADEQAALNIARSWLFLRSQEYKKYQTNKTTGNTDKRAFVETWQSFYRKKLKEVWKPAV

SEQ ID NO: 34060 - protein, 978 aa, synthetic construct
  REGION 1..978: note = engineered CasX variant
QEIKRINKIRRRLVKDSNTKKAGKTGPMKTLLVRVMTPDLRERLENLRKKPENIPQPISNTSQANLNKLLTDYTEMKKAILHVYDEEFQKDPVGLMSRVAQPASKKIDQNKLKPEMDEKGNLTTAGFACSQCGQPLFVYKLEQVSEKGKAYTNYFGRCNVAEHEKLILLAQLKPEKDSDEAVTYSLGKFGQRALDFYSIHVTKESTHPVKPLAQIAGNRYASVPVGKALSDACMGTIASFLSKYQDIIIEHQKVVKGNQKRLESLRELAGKENLEYPSVTLPPQPHTKEGVDAYNEVIARVRMWVNLNLWQKLKLSRDDAKPLLRLKGFPSFPLVERQANEVDWWDMVCNVKKLINEKKEDGKVFWQNLAGYKRQEALRPYLSSEEDRKKGKKFARYQLGDLLLHLEKKHGEDWGKVYDEAWERIDKKVEGLSKHIKLEEERRSEDAQSKAALTDWLRAKASFVIEGLKEADKDEFCRCELKLQKWYGDLRGKPFAIEAENSILDISGFSKQYNCAFIWQKDGVKKLNLYLIINYFKGGKLRFKKIKPEAFEANRFYTVINKKSGEIVPMEVNFNFDDPNLIILPLAFGKRQGREFIWNDLLSLETGSLKLANGRVIEKTLYNRRTRQDEPALFVALTFERREVLDSSNIKPMNLIGVDRGENIPAVIALTDPEGCPLSRFKDSLGNPTHILRIGESYKEKQRTIQAKKEVEQRRAGGYSRKYASKAKNLADDMVRNTARDLLYYAVTQDAMLIFENLSRGFGRQGKRTFMAERQYTRMEDWLTAKLAYEGLPSKTYLSKTLAQYTSKTCSNCGFTITSADYDRVLEKLKKTATGWMTTINGKELKVEGQITYYNRYKRQNVVKDLSVELDRLSEESVNNDISSWTKGRSGEALSLLKKRFSHRPVQEKFVCLNCGFETHADEQAALNIARSWLFLRSQEYKKYQTNKTTGNTDKRAFVETWQSFYRKKLKEVWKPAV

SEQ ID NO: 34061 - protein, 978 aa, synthetic construct
  REGION 1..978: note = engineered CasX variant
QEIKRINKIRRRLVKDSNTKKAGKTGPMKTLLVRVMTPDLRERLENLRKKPENIPQPISNTSQANLNKLLTDYTEMKKAILHVYDEEFQKDPVGLMSRVAQPASKKIDQNKLKPEMDEKGNLTTAGFACSQCGQPLFVYKLEQVSEKGKAYTNYFGRCNVAEHEKLIKLAQLKPEKDSDEAVTYSLGKFGQRALDFYSIHVTKESTHPVKPLAQIAGNRYASGPVGKALSDACMGTIASFLSKYQDIIIEHQKVVKGNQKRLESLRELAGKENLEYPSVTLPPQPHTKEGVDAYNEVIARVRMWVNLNLWQKLKLSRDDAKPLLRLKGFPSFPLVERQANEVDWWDMVCNVKKLINEKKEDGKVFWQNLAGYKRQEALRPYLSSEEDRKKGKKFARYQLGDLLLHLEKKHGEDWGKVYDEAWERIDKKVEGLSKHIKLEEERRSEDAQSKAALTDWLRAKASFVIEGLKEADKDEFCRCELKLQKWYGDLRGKPFAIEAENSILDISGFSKQYNCAFIWQKDGVKKLNLYLIINYFKGGKLRFKKIKPEAFEANRFYTVINKKSGEIVPMEVNFNFDDPNLIILPLAFGKRQGREFIWNDLLSLETGSLKLANGRVIEKTLYNRRTRQDEPALFVALTFERREVLDSSNIKPMNLIGVDRGENIPAVIALTDPEGCPLSRFKDSLGNPTHILRIGESYKEKQRTIQAKKEVEQRRAGGYSRKYASKAKNLADDMVRNTARDLLYYAVTQDAMLIFENLSRGFGRQGKRTFMAERQYTRMEDWLTAKLAYEGLPSKTYLSKTLAQYTSKTCSNCGFTITSADYDRVLEKLKKTATGWMTTINGKELKVEGQITYYNRYKRQNVVKDLSVELDRLSEESVNNDISSWTKGRSGEALSLLKKRFSHRPVQEKFVCLNCGFETHADEQAALNIARSWLFLRSQEYKKYQTNKTTGNTDKRAFVETWQSFYRKKLKEVWKPAV

SEQ ID NO: 34062 - protein, 977 aa, synthetic construct
  REGION 1..977: note = engineered CasX variant
QEIKRINKIRRRLVKDSNTKKAGKTGPMKTLLVRVMTPDLRERLENLRKKPENIPQPISNTSQANLNKLLTDYTEMKKAILHVYDEEFQKDPVGLMSRVAQPASKKIDQNKLKPEMDEKGNLTTAGFACSQCGQPLFVYKLEQVSEKGKAYTNYFGRCNVAEHEKLILLAQLKPEKDSDEAVTYSLGKFGQRALDFYSIHVTKESTHPVKPLAQIAGNRYASPVGKALSDACMGTIASFLSKYQDIIIEHQKVVKGNQKRLESLRELAGKENLEYPSVTLPPQPHTKEGVDAYNEVIARVRMWVNLNLWQKLKLSRDDAKPLLRLKGFPSFPLVERQANEVDWWDMVCNVKKLINEKKEDGKVFWQNLAGYKRQEALRPYLSSEEDRKKGKKFARYQLGDLLLHLEKKHGEDWGKVYDEAWERIDKKVEGLSKHIKLEEERRSEDAQSKAALTDWLRAKASFVIEGLKEADKDEFCRCELKLQKWYGDLRGKPFAIEAENSILDISGFSKQYNCAFIWQKDGVKKLNLYLIINYFKGGKLRFKKIKPEAFEANRFYTVINKKSGEIVPMEVNFNFDDPNLIILPLAFGKRQGREFIWNDLLSLETGSLKLANGRVIEKTLYNRRTRQDEPALFVALTFERREVLDSSNIKPMNLIGVDRGENIPAVIALTDPEGCPLSRFKDSLGNPTHILRIGESYKEKQRTIQAKKEVEQRRAGGYSRKYASKAKNLADDMVRNTARDLLYYAVTQDAMLIFENLSRGFGRQGKRTFMAERQYTRMEDWLTAKLAYEGLPSKTYLSKTLAQYTSKTCSNCGFTITSADYDRVLEKLKKTATGWMTTINGKELKVEGQITYYNRYKRQNVVKDLSVELDRLSEESVNNDISSWTKGRSGEALSLLKKRFSHRPVQEKFVCLNCGFETHADEQAALNIARSWLFLRSQEYKKYQTNKTTGNTDKRAFVETWQSFYRKKLKEVWKPAV

SEQ ID NO: 34063 - protein, 978 aa, synthetic construct
  REGION 1..978: note = engineered CasX variant
QEIKRINKIRRRLVKDSNTKKAGKTGPMKTLLVRVMTPDLRERLENLRKKPENIPQPISNTSQANLNKLLTDYTEMKKAILHVYWEEFQKDPVGLMSRVAQPASKKIDQNKLKPEMDEKGNLTTAGFACSQCGQPLFVYKLEQVSEKGKAYTNYFGRCNVAEHEKLIKLAQLKPEKDSDEAVTYSLGKFGQRALDFYSIHVTKESTHPVKPLAQIAGNRYASYPVGKALSDACMGTIASFLSKYQDIIIEHQKVVKGNQKRLESLRELAGKENLEYPSVTLPPQPHTKEGVDAYNEVIARVRMWVNLNLWQKLKLSRDDAKPLLRLKGFPSFPLVERQANEVDWWDMVCNVKKLINEKKEDGKVFWQNLAGYKRQEALRPYLSSEEDRKKGKKFARYQLGDLLLHLEKKHGEDWGKVYDEAWERIDKKVEGLSKHIKLEEERRSEDAQSKAALTDWLRAKASFVIEGLKEADKDEFCRCELKLQKWYGDLRGKPFAIEAENSILDISGFSKQYNCAFIWQKDGVKKLNLYLIINYFKGGKLRFKKIKPEAFEANRFYTVINKKSGEIVPMEVNFNFDDPNLIILPLAFGKRQGREFIWNDLLSLETGSLKLANGRVIEKTLYNRRTRQDEPALFVALTFERREVLDSSNIKPMNLIGVDRGENIPAVIALTDPEGCPLSRFKDSLGNPTHILRIGESYKEKQRTIQAKKEVEQRRAGGYSRKYASKAKNLADDMVRNTARDLLYYAVTQDAMLIFENLSRGFGRQGKRTFMAERQYTRMEDWLTAKLAYEGLPSKTYLSKTLAQYTSKTCSNCGFTITSADYDRVLEKLKKTATGWMTTINGKELKVEGQITYYNRYKRQNVVKDLSVELDRLSEESVNNDISSWTKGRSGEALSLLKKRFSHRPVQEKFVCLNCGFETHADEQAALNIARSWLFLRSQEYKKYQTNKTTGNTDKRAFVETWQSFYRKKLKEVWKPAV

SEQ ID NO: 34064 - protein, 978 aa, synthetic construct
  REGION 1..978: note = engineered CasX variant
QEIKRINKIRRRLVKDSNTKKAGKTGPMKTLLVRVMTPDLRERLENLRKKPENIPQPISNTSQANLNKLLTDYTEMKKAILHVYWEEFQKDPVGLMSRVAQPASKKIDQNKLKPEMDEKGNLTTAGFACSQCGQPLFVYKLEQVSEKGKAYTNYFGRCNVAEHEKLIKLAQLKPEKDSDEAVTYSLGKFGQRALDFYSIHVTKESTHPVKPLAQIAGNRYASHPVGKALSDACMGTIASFLSKYQDIIIEHQKVVKGNQKRLESLRELAGKENLEYPSVTLPPQPHTKEGVDAYNEVIARVRMWVNLNLWQKLKLSRDDAKPLLRLKGFPSFPLVERQANEVDWWDMVCNVKKLINEKKEDGKVFWQNLAGYKRQEALRPYLSSEEDRKKGKKFARYQLGDLLLHLEKKHGEDWGKVYDEAWERIDKKVEGLSKHIKLEEERRSEDAQSKAALTDWLRAKASFVIEGLKEADKDEFCRCELKLQKWYGDLRGKPFAIEAENSILDISGFSKQYNCAFIWQKDGVKKLNLYLIINYFKGGKLRFKKIKPEAFEANRFYTVINKKSGEIVPMEVNFNFDDPNLIILPLAFGKRQGREFIWNDLLSLETGSLKLANGRVIEKTLYNRRTRQDEPALFVALTFERREVLDSSNIKPMNLIGVDRGENIPAVIALTDPEGCPLSRFKDSLGNPTHILRIGESYKEKQRTIQAKKEVEQRRAGGYSRKYASKAKNLADDMVRNTARDLLYYAVTQDAMLIFENLSRGFGRQGKRTFMAERQYTRMEDWLTAKLAYEGLPSKTYLSKTLAQYTSKTCSNCGFTITSADYDRVLEKLKKTATGWMTTINGKELKVEGQITYYNRYKRQNVVKDLSVELDRLSEESVNNDISSWTKGRSGEALSLLKKRFSHRPVQEKFVCLNCGFETHADEQAALNIARSWLFLRSQEYKKYQTNKTTGNTDKRAFVETWQSFYRKKLKEVWKPAV

SEQ ID NO: 34065 - protein, 978 aa, synthetic construct
  REGION 1..978: note = engineered CasX variant
QEIKRINKIRRRLVKDSNTKKAGKTGPMKTLLVRVMTPDLRERLENLRKKPENIPQPISNTSQANLNKLLTDYTEMKKAILHVYWEEFQKDPVGLMSRVAQPASKKIDQNKLKPEMDEKGNLTTAGFACSQCGQPLFVYKLEQVSEKGKAYTNYFGRCNVAEHEKLIKLAQLKPEKDSDEAVTYSLGKFGQRALDFYSIHVTKESTHPVKPLAQIAGNRYASTPVGKALSDACMGTIASFLSKYQDIIIEHQKVVKGNQKRLESLRELAGKENLEYPSVTLPPQPHTKEGVDAYNEVIARVRMWVNLNLWQKLKLSRDDAKPLLRLKGFPSFPLVERQANEVDWWDMVCNVKKLINEKKEDGKVFWQNLAGYKRQEALRPYLSSEEDRKKGKKFARYQLGDLLLHLEKKHGEDWGKVYDEAWERIDKKVEGLSKHIKLEEERRSEDAQSKAALTDWLRAKASFVIEGLKEADKDEFCRCELKLQKWYGDLRGKPFAIEAENSILDISGFSKQYNCAFIWQKDGVKKLNLYLIINYFKGGKLRFKKIKPEAFEANRFYTVINKKSGEIVPMEVNFNFDDPNLIILPLAFGKRQGREFIWNDLLSLETGSLKLANGRVIEKTLYNRRTRQDEPALFVALTFERREVLDSSNIKPMNLIGVDRGENIPAVIALTDPEGCPLSRFKDSLGNPTHILRIGESYKEKQRTIQAKKEVEQRRAGGYSRKYASKAKNLADDMVRNTARDLLYYAVTQDAMLIFENLSRGFGRQGKRTFMAERQYTRMEDWLTAKLAYEGLPSKTYLSKTLAQYTSKTCSNCGFTITSADYDRVLEKLKKTATGWMTTINGKELKVEGQITYYNRYKRQNVVKDLSVELDRLSEESVNNDISSWTKGRSGEALSLLKKRFSHRPVQEKFVCLNCGFETHADEQAALNIARSWLFLRSQEYKKYQTNKTTGNTDKRAFVETWQSFYRKKLKEVWKPAV

SEQ ID NO: 34066 - protein, 978 aa, synthetic construct
  REGION 1..978: note = engineered CasX variant
QEIKRINKIRRRLVKDSNTKKAGKTGPMKTLLVRVMTPDLRERLENLRKKPENIPQPISNTSQANLNKLLTDYTEMKKAILHVYWEEFQKDPVGLMSRVAQPASKKIDQNKLKPEMDEKGNLTTAGFACSQCGQPLFVYKLEQVSEKGKAYTNYFGRCNVAEHEKLIKLAQLKPEKDSDEAVTYSLGKFGQRALDFYSIHVTKESTHPVKPLAQIAGNRYASAPVGKALSDACMGTIASFLSKYQDIIIEHQKVVKGNQKRLESLRELAGKENLEYPSVTLPPQPHTKEGVDAYNEVIARVRMWVNLNLWQKLKLSRDDAKPLLRLKGFPSFPLVERQANEVDWWDMVCNVKKLINEKKEDGKVFWQNLAGYKRQEALRPYLSSEEDRKKGKKFARYQLGDLLLHLEKKHGEDWGKVYDEAWERIDKKVEGLSKHIKLEEERRSEDAQSKAALTDWLRAKASFVIEGLKEADKDEFCRCELKLQKWYGDLRGKPFAIEAENSILDISGFSKQYNCAFIWQKDGVKKLNLYLIINYFKGGKLRFKKIKPEAFEANRFYTVINKKSGEIVPMEVNFNFDDPNLIILPLAFGKRQGREFIWNDLLSLETGSLKLANGRVIEKTLYNRRTRQDEPALFVALTFERREVLDSSNIKPMNLIGVDRGENIPAVIALTDPEGCPLSRFKDSLGNPTHILRIGESYKEKQRTIQAKKEVEQRRAGGYSRKYASKAKNLADDMVRNTARDLLYYAVTQDAMLIFENLSRGFGRQGKRTFMAERQYTRMEDWLTAKLAYEGLPSKTYLSKTLAQYTSKTCSNCGFTITSADYDRVLEKLKKTATGWMTTINGKELKVEGQITYYNRYKRQNVVKDLSVELDRLSEESVNNDISSWTKGRSGEALSLLKKRFSHRPVQEKFVCLNCGFETHADEQAALNIARSWLFLRSQEYKKYQTNKTTGNTDKRAFVETWQSFYRKKLKEVWKPAV

SEQ ID NO: 34067 - protein, 978 aa, synthetic construct
  REGION 1..978: note = engineered CasX variant
QEIKRINKIRRRLVKDSNTKKAGKTGPMKTLLVRVMTPDLRERLENLRKKPENIPQPISNTSQANLNKLLTDYTEMKKAILHVYWEEFQKDPVGLMSRVAQPASKKIDQNKLKPEMDEKGNLTTAGFACSQCGQPLFVYKLEQVSEKGKAYTNYFGRCNVAEHEKLIKLAQLKPEKDSDEAVTYSLGKFGQRALDFYSIHVTKESTHPVKPLAQIAGNRYASVPVGKALSDACMGTIASFLSKYQDIIIEHQKVVKGNQKRLESLRELAGKENLEYPSVTLPPQPHTKEGVDAYNEVIARVRMWVNLNLWQKLKLSRDDAKPLLRLKGFPSFPLVERQANEVDWWDMVCNVKKLINEKKEDGKVFWQNLAGYKRQEALRPYLSSEEDRKKGKKFARYQLGDLLLHLEKKHGEDWGKVYDEAWERIDKKVEGLSKHIKLEEERRSEDAQSKAALTDWLRAKASFVIEGLKEADKDEFCRCELKLQKWYGDLRGKPFAIEAENSILDISGFSKQYNCAFIWQKDGVKKLNLYLIINYFKGGKLRFKKIKPEAFEANRFYTVINKKSGEIVPMEVNFNFDDPNLIILPLAFGKRQGREFIWNDLLSLETGSLKLANGRVIEKTLYNRRTRQDEPALFVALTFERREVLDSSNIKPMNLIGVDRGENIPAVIALTDPEGCPLSRFKDSLGNPTHILRIGESYKEKQRTIQAKKEVEQRRAGGYSRKYASKAKNLADDMVRNTARDLLYYAVTQDAMLIFENLSRGFGRQGKRTFMAERQYTRMEDWLTAKLAYEGLPSKTYLSKTLAQYTSKTCSNCGFTITSADYDRVLEKLKKTATGWMTTINGKELKVEGQITYYNRYKRQNVVKDLSVELDRLSEESVNNDISSWTKGRSGEALSLLKKRFSHRPVQEKFVCLNCGFETHADEQAALNIARSWLFLRSQEYKKYQTNKTTGNTDKRAFVETWQSFYRKKLKEVWKPAV

SEQ ID NO: 34068 - protein, 979 aa, synthetic construct
  REGION 1..979: note = engineered CasX variant
QEIKRINKIRRRLVKDSNTKKAGKTGPMKTLLVRVMTPDLRERLENLRKKPENIPQPISNTSQANLNKLLTDYTEMKKAILHVYWEEFQKDPVGLMSRVAQPASKKIDQNKLKPEMDEKGNLTTAGFACSQCGQPLFVYKLEQVSEKGKAYTNYFGRCNVAEHEKLIKKLAQLKPEKDSDEAVTYSLGKFGQRALDFYSIHVTKESTHPVKPLAQIAGNRYASGPVGKALSDACMGTIASFLSKYQDIIIEHQKVVKGNQKRLESLRELAGKENLEYPSVTLPPQPHTKEGVDAYNEVIARVRMWVNLNLWQKLKLSRDDAKPLLRLKGFPSFPLVERQANEVDWWDMVCNVKKLINEKKEDGKVFWQNLAGYKRQEALRPYLSSEEDRKKGKKFARYQLGDLLLHLEKKHGEDWGKVYDEAWERIDKKVEGLSKHIKLEEERRSEDAQSKAALTDWLRAKASFVIEGLKEADKDEFCRCELKLQKWYGDLRGKPFAIEAENSILDISGFSKQYNCAFIWQKDGVKKLNLYLIINYFKGGKLRFKKIKPEAFEANRFYTVINKKSGEIVPMEVNFNFDDPNLIILPLAFGKRQGREFIWNDLLSLETGSLKLANGRVIEKTLYNRRTRQDEPALFVALTFERREVLDSSNIKPMNLIGVDRGENIPAVIALTDPEGCPLSRFKDSLGNPTHILRIGESYKEKQRTIQAKKEVEQRRAGGYSRKYASKAKNLADDMVRNTARDLLYYAVTQDAMLIFENLSRGFGRQGKRTFMAERQYTRMEDWLTAKLAYEGLPSKTYLSKTLAQYTSKTCSNCGFTITSADYDRVLEKLKKTATGWMTTINGKELKVEGQITYYNRYKRQNVVKDLSVELDRLSEESVNNDISSWTKGRSGEALSLLKKRFSHRPVQEKFVCLNCGFETHADEQAALNIARSWLFLRSQEYKKYQTNKTTGNTDKRAFVETWQSFYRKKLKEVWKPAV

SEQ ID NO: 34069 - protein, 977 aa, synthetic construct
  REGION 1..977: note = engineered CasX variant
QEIKRINKIRRRLVKDSNTKKAGKTGPMKTLLVRVMTPDLRERLENLRKKPENIPQPISNTSQANLNKLLTDYTEMKKAILHVYWEEFQKDPVGLMSRVAQPASKKIDQNKLKPEMDEKGNLTTAGFACSQCGQPLFVYKLEQVSEKGKAYTNYFGRCNVAEHEKLIKLAQLKPEKDSDEAVTYSLGKFGQRALDFYSIHVTKESTHPVKPLAQIAGNRYASPVGKALSDACMGTIASFLSKYQDIIIEHQKVVKGNQKRLESLRELAGKENLEYPSVTLPPQPHTKEGVDAYNEVIARVRMWVNLNLWQKLKLSRDDAKPLLRLKGFPSFPLVERQANEVDWWDMVCNVKKLINEKKEDGKVFWQNLAGYKRQEALRPYLSSEEDRKKGKKFARYQLGDLLLHLEKKHGEDWGKVYDEAWERIDKKVEGLSKHIKLEEERRSEDAQSKAALTDWLRAKASFVIEGLKEADKDEFCRCELKLQKWYGDLRGKPFAIEAENSILDISGFSKQYNCAFIWQKDGVKKLNLYLIINYFKGGKLRFKKIKPEAFEANRFYTVINKKSGEIVPMEVNFNFDDPNLIILPLAFGKRQGREFIWNDLLSLETGSLKLANGRVIEKTLYNRRTRQDEPALFVALTFERREVLDSSNIKPMNLIGVDRGENIPAVIALTDPEGCPLSRFKDSLGNPTHILRIGESYKEKQRTIQAKKEVEQRRAGGYSRKYASKAKNLADDMVRNTARDLLYYAVTQDAMLIFENLSRGFGRQGKRTFMAERQYTRMEDWLTAKLAYEGLPSKTYLSKTLAQYTSKTCSNCGFTITSADYDRVLEKLKKTATGWMTTINGKELKVEGQITYYNRYKRQNVVKDLSVELDRLSEESVNNDISSWTKGRSGEALSLLKKRFSHRPVQEKFVCLNCGFETHADEQAALNIARSWLFLRSQEYKKYQTNKTTGNTDKRAFVETWQSFYRKKLKEVWKPAV

SEQ ID NO: 34070 - protein, 978 aa, synthetic construct
  REGION 1..978: note = engineered CasX variant
QEIKRINKIRRRLVKDSNTKKAGKTGPMKTLLVRVMTPDLRERLENLRKKPENIPQPISNTSQANLNKLLTDYTEMKKAILHVYWEEFQKDPVGLMSRVAQPASKKIDQNKLKPEMDEKGNLTTAGFACSQCGQPLFVYKLEQVSEKGKAYTNYFGRCNVAEHEKLILLYQLKPEKDSDEAVTYSLGKFGQRALDFYSIHVTKESTHPVKPLAQIAGNRYASYPVGKALSDACMGTIASFLSKYQDIIIEHQKVVKGNQKRLESLRELAGKENLEYPSVTLPPQPHTKEGVDAYNEVIARVRMWVNLNLWQKLKLSRDDAKPLLRLKGFPSFPLVERQANEVDWWDMVCNVKKLINEKKEDGKVFWQNLAGYKRQEALRPYLSSEEDRKKGKKFARYQLGDLLLHLEKKHGEDWGKVYDEAWERIDKKVEGLSKHIKLEEERRSEDAQSKAALTDWLRAKASFVIEGLKEADKDEFCRCELKLQKWYGDLRGKPFAIEAENSILDISGFSKQYNCAFIWQKDGVKKLNLYLIINYFKGGKLRFKKIKPEAFEANRFYTVINKKSGEIVPMEVNFNFDDPNLIILPLAFGKRQGREFIWNDLLSLETGSLKLANGRVIEKTLYNRRTRQDEPALFVALTFERREVLDSSNIKPMNLIGVDRGENIPAVIALTDPEGCPLSRFKDSLGNPTHILRIGESYKEKQRTIQAKKEVEQRRAGGYSRKYASKAKNLADDMVRNTARDLLYYAVTQDAMLIFENLSRGFGRQGKRTFMAERQYTRMEDWLTAKLAYEGLPSKTYLSKTLAQYTSKTCSNCGFTITSADYDRVLEKLKKTATGWMTTINGKELKVEGQITYYNRYKRQNVVKDLSVELDRLSEESVNNDISSWTKGRSGEALSLLKKRFSHRPVQEKFVCLNCGFETHADEQAALNIARSWLFLRSQEYKKYQTNKTTGNTDKRAFVETWQSFYRKKLKEVWKPAV

SEQ ID NO: 34071 - protein, 978 aa, synthetic construct
  REGION 1..978: note = engineered CasX variant
QEIKRINKIRRRLVKDSNTKKAGKTGPMKTLLVRVMTPDLRERLENLRKKPENIPQPISNTSQANLNKLLTDYTEMKKAILHVYWEEFQKDPVGLMSRVAQPASKKIDQNKLKPEMDEKGNLTTAGFACSQCGQPLFVYKLEQVSEKGKAYTNYFGRCNVAEHEKLILLYQLKPEKDSDEAVTYSLGKFGQRALDFYSIHVTKESTHPVKPLAQIAGNRYASHPVGKALSDACMGTIASFLSKYQDIIIEHQKVVKGNQKRLESLRELAGKENLEYPSVTLPPQPHTKEGVDAYNEVIARVRMWVNLNLWQKLKLSRDDAKPLLRLKGFPSFPLVERQANEVDWWDMVCNVKKLINEKKEDGKVFWQNLAGYKRQEALRPYLSSEEDRKKGKKFARYQLGDLLLHLEKKHGEDWGKVYDEAWERIDKKVEGLSKHIKLEEERRSEDAQSKAALTDWLRAKASFVIEGLKEADKDEFCRCELKLQKWYGDLRGKPFAIEAENSILDISGFSKQYNCAFIWQKDGVKKLNLYLIINYFKGGKLRFKKIKPEAFEANRFYTVINKKSGEIVPMEVNFNFDDPNLIILPLAFGKRQGREFIWNDLLSLETGSLKLANGRVIEKTLYNRRTRQDEPALFVALTFERREVLDSSNIKPMNLIGVDRGENIPAVIALTDPEGCPLSRFKDSLGNPTHILRIGESYKEKQRTIQAKKEVEQRRAGGYSRKYASKAKNLADDMVRNTARDLLYYAVTQDAMLIFENLSRGFGRQGKRTFMAERQYTRMEDWLTAKLAYEGLPSKTYLSKTLAQYTSKTCSNCGFTITSADYDRVLEKLKKTATGWMTTINGKELKVEGQITYYNRYKRQNVVKDLSVELDRLSEESVNNDISSWTKGRSGEALSLLKKRFSHRPVQEKFVCLNCGFETHADEQAALNIARSWLFLRSQEYKKYQTNKTTGNTDKRAFVETWQSFYRKKLKEVWKPAV

SEQ ID NO: 34072 - protein, 978 aa, synthetic construct
  REGION 1..978: note = engineered CasX variant
QEIKRINKIRRRLVKDSNTKKAGKTGPMKTLLVRVMTPDLRERLENLRKKPENIPQPISNTSQANLNKLLTDYTEMKKAILHVYWEEFQKDPVGLMSRVAQPASKKIDQNKLKPEMDEKGNLTTAGFACSQCGQPLFVYKLEQVSEKGKAYTNYFGRCNVAEHEKLILLYQLKPEKDSDEAVTYSLGKFGQRALDFYSIHVTKESTHPVKPLAQIAGNRYASSPVGKALSDACMGTIASFLSKYQDIIIEHQKVVKGNQKRLESLRELAGKENLEYPSVTLPPQPHTKEGVDAYNEVIARVRMWVNLNLWQKLKLSRDDAKPLLRLKGFPSFPLVERQANEVDWWDMVCNVKKLINEKKEDGKVFWQNLAGYKRQEALRPYLSSEEDRKKGKKFARYQLGDLLLHLEKKHGEDWGKVYDEAWERIDKKVEGLSKHIKLEEERRSEDAQSKAALTDWLRAKASFVIEGLKEADKDEFCRCELKLQKWYGDLRGKPFAIEAENSILDISGFSKQYNCAFIWQKDGVKKLNLYLIINYFKGGKLRFKKIKPEAFEANRFYTVINKKSGEIVPMEVNFNFDDPNLIILPLAFGKRQGREFIWNDLLSLETGSLKLANGRVIEKTLYNRRTRQDEPALFVALTFERREVLDSSNIKPMNLIGVDRGENIPAVIALTDPEGCPLSRFKDSLGNPTHILRIGESYKEKQRTIQAKKEVEQRRAGGYSRKYASKAKNLADDMVRNTARDLLYYAVTQDAMLIFENLSRGFGRQGKRTFMAERQYTRMEDWLTAKLAYEGLPSKTYLSKTLAQYTSKTCSNCGFTITSADYDRVLEKLKKTATGWMTTINGKELKVEGQITYYNRYKRQNVVKDLSVELDRLSEESVNNDISSWTKGRSGEALSLLKKRFSHRPVQEKFVCLNCGFETHADEQAALNIARSWLFLRSQEYKKYQTNKTTGNTDKRAFVETWQSFYRKKLKEVWKPAV

SEQ ID NO: 34073 - protein, 978 aa, synthetic construct
  REGION 1..978: note = engineered CasX variant
QEIKRINKIRRRLVKDSNTKKAGKTGPMKTLLVRVMTPDLRERLENLRKKPENIPQPISNTSQANLNKLLTDYTEMKKAILHVYWEEFQKDPVGLMSRVAQPASKKIDQNKLKPEMDEKGNLTTAGFACSQCGQPLFVYKLEQVSEKGKAYTNYFGRCNVAEHEKLILLYQLKPEKDSDEAVTYSLGKFGQRALDFYSIHVTKESTHPVKPLAQIAGNRYASTPVGKALSDACMGTIASFLSKYQDIIIEHQKVVKGNQKRLESLRELAGKENLEYPSVTLPPQPHTKEGVDAYNEVIARVRMWVNLNLWQKLKLSRDDAKPLLRLKGFPSFPLVERQANEVDWWDMVCNVKKLINEKKEDGKVFWQNLAGYKRQEALRPYLSSEEDRKKGKKFARYQLGDLLLHLEKKHGEDWGKVYDEAWERIDKKVEGLSKHIKLEEERRSEDAQSKAALTDWLRAKASFVIEGLKEADKDEFCRCELKLQKWYGDLRGKPFAIEAENSILDISGFSKQYNCAFIWQKDGVKKLNLYLIINYFKGGKLRFKKIKPEAFEANRFYTVINKKSGEIVPMEVNFNFDDPNLIILPLAFGKRQGREFIWNDLLSLETGSLKLANGRVIEKTLYNRRTRQDEPALFVALTFERREVLDSSNIKPMNLIGVDRGENIPAVIALTDPEGCPLSRFKDSLGNPTHILRIGESYKEKQRTIQAKKEVEQRRAGGYSRKYASKAKNLADDMVRNTARDLLYYAVTQDAMLIFENLSRGFGRQGKRTFMAERQYTRMEDWLTAKLAYEGLPSKTYLSKTLAQYTSKTCSNCGFTITSADYDRVLEKLKKTATGWMTTINGKELKVEGQITYYNRYKRQNVVKDLSVELDRLSEESVNNDISSWTKGRSGEALSLLKKRFSHRPVQEKFVCLNCGFETHADEQAALNIARSWLFLRSQEYKKYQTNKTTGNTDKRAFVETWQSFYRKKLKEVWKPAV

SEQ ID NO: 34074 - protein, 978 aa, synthetic construct
  REGION 1..978: note = engineered CasX variant
QEIKRINKIRRRLVKDSNTKKAGKTGPMKTLLVRVMTPDLRERLENLRKKPENIPQPISNTSQANLNKLLTDYTEMKKAILHVYWEEFQKDPVGLMSRVAQPASKKIDQNKLKPEMDEKGNLTTAGFACSQCGQPLFVYKLEQVSEKGKAYTNYFGRCNVAEHEKLILLYQLKPEKDSDEAVTYSLGKFGQRALDFYSIHVTKESTHPVKPLAQIAGNRYASAPVGKALSDACMGTIASFLSKYQDIIIEHQKVVKGNQKRLESLRELAGKENLEYPSVTLPPQPHTKEGVDAYNEVIARVRMWVNLNLWQKLKLSRDDAKPLLRLKGFPSFPLVERQANEVDWWDMVCNVKKLINEKKEDGKVFWQNLAGYKRQEALRPYLSSEEDRKKGKKFARYQLGDLLLHLEKKHGEDWGKVYDEAWERIDKKVEGLSKHIKLEEERRSEDAQSKAALTDWLRAKASFVIEGLKEADKDEFCRCELKLQKWYGDLRGKPFAIEAENSILDISGFSKQYNCAFIWQKDGVKKLNLYLIINYFKGGKLRFKKIKPEAFEANRFYTVINKKSGEIVPMEVNFNFDDPNLIILPLAFGKRQGREFIWNDLLSLETGSLKLANGRVIEKTLYNRRTRQDEPALFVALTFERREVLDSSNIKPMNLIGVDRGENIPAVIALTDPEGCPLSRFKDSLGNPTHILRIGESYKEKQRTIQAKKEVEQRRAGGYSRKYASKAKNLADDMVRNTARDLLYYAVTQDAMLIFENLSRGFGRQGKRTFMAERQYTRMEDWLTAKLAYEGLPSKTYLSKTLAQYTSKTCSNCGFTITSADYDRVLEKLKKTATGWMTTINGKELKVEGQITYYNRYKRQNVVKDLSVELDRLSEESVNNDISSWTKGRSGEALSLLKKRFSHRPVQEKFVCLNCGFETHADEQAALNIARSWLFLRSQEYKKYQTNKTTGNTDKRAFVETWQSFYRKKLKEVWKPAV

SEQ ID NO: 34075 - protein, 978 aa, synthetic construct
  REGION 1..978: note = engineered CasX variant
QEIKRINKIRRRLVKDSNTKKAGKTGPMKTLLVRVMTPDLRERLENLRKKPENIPQPISNTSQANLNKLLTDYTEMKKAILHVYWEEFQKDPVGLMSRVAQPASKKIDQNKLKPEMDEKGNLTTAGFACSQCGQPLFVYKLEQVSEKGKAYTNYFGRCNVAEHEKLILLYQLKPEKDSDEAVTYSLGKFGQRALDFYSIHVTKESTHPVKPLAQIAGNRYASVPVGKALSDACMGTIASFLSKYQDIIIEHQKVVKGNQKRLESLRELAGKENLEYPSVTLPPQPHTKEGVDAYNEVIARVRMWVNLNLWQKLKLSRDDAKPLLRLKGFPSFPLVERQANEVDWWDMVCNVKKLINEKKEDGKVFWQNLAGYKRQEALRPYLSSEEDRKKGKKFARYQLGDLLLHLEKKHGEDWGKVYDEAWERIDKKVEGLSKHIKLEEERRSEDAQSKAALTDWLRAKASFVIEGLKEADKDEFCRCELKLQKWYGDLRGKPFAIEAENSILDISGFSKQYNCAFIWQKDGVKKLNLYLIINYFKGGKLRFKKIKPEAFEANRFYTVINKKSGEIVPMEVNFNFDDPNLIILPLAFGKRQGREFIWNDLLSLETGSLKLANGRVIEKTLYNRRTRQDEPALFVALTFERREVLDSSNIKPMNLIGVDRGENIPAVIALTDPEGCPLSRFKDSLGNPTHILRIGESYKEKQRTIQAKKEVEQRRAGGYSRKYASKAKNLADDMVRNTARDLLYYAVTQDAMLIFENLSRGFGRQGKRTFMAERQYTRMEDWLTAKLAYEGLPSKTYLSKTLAQYTSKTCSNCGFTITSADYDRVLEKLKKTATGWMTTINGKELKVEGQITYYNRYKRQNVVKDLSVELDRLSEESVNNDISSWTKGRSGEALSLLKKRFSHRPVQEKFVCLNCGFETHADEQAALNIARSWLFLRSQEYKKYQTNKTTGNTDKRAFVETWQSFYRKKLKEVWKPAV

SEQ ID NO: 34076 - protein, 978 aa, synthetic construct
  REGION 1..978: note = engineered CasX variant
QEIKRINKIRRRLVKDSNTKKAGKTGPMKTLLVRVMTPDLRERLENLRKKPENIPQPISNTSQANLNKLLTDYTEMKKAILHVYWEEFQKDPVGLMSRVAQPASKKIDQNKLKPEMDEKGNLTTAGFACSQCGQPLFVYKLEQVSEKGKAYTNYFGRCNVAEHEKLIKLYQLKPEKDSDEAVTYSLGKFGQRALDFYSIHVTKESTHPVKPLAQIAGNRYASGPVGKALSDACMGTIASFLSKYQDIIIEHQKVVKGNQKRLESLRELAGKENLEYPSVTLPPQPHTKEGVDAYNEVIARVRMWVNLNLWQKLKLSRDDAKPLLRLKGFPSFPLVERQANEVDWWDMVCNVKKLINEKKEDGKVFWQNLAGYKRQEALRPYLSSEEDRKKGKKFARYQLGDLLLHLEKKHGEDWGKVYDEAWERIDKKVEGLSKHIKLEEERRSEDAQSKAALTDWLRAKASFVIEGLKEADKDEFCRCELKLQKWYGDLRGKPFAIEAENSILDISGFSKQYNCAFIWQKDGVKKLNLYLIINYFKGGKLRFKKIKPEAFEANRFYTVINKKSGEIVPMEVNFNFDDPNLIILPLAFGKRQGREFIWNDLLSLETGSLKLANGRVIEKTLYNRRTRQDEPALFVALTFERREVLDSSNIKPMNLIGVDRGENIPAVIALTDPEGCPLSRFKDSLGNPTHILRIGESYKEKQRTIQAKKEVEQRRAGGYSRKYASKAKNLADDMVRNTARDLLYYAVTQDAMLIFENLSRGFGRQGKRTFMAERQYTRMEDWLTAKLAYEGLPSKTYLSKTLAQYTSKTCSNCGFTITSADYDRVLEKLKKTATGWMTTINGKELKVEGQITYYNRYKRQNVVKDLSVELDRLSEESVNNDISSWTKGRSGEALSLLKKRFSHRPVQEKFVCLNCGFETHADEQAALNIARSWLFLRSQEYKKYQTNKTTGNTDKRAFVETWQSFYRKKLKEVWKPAV

SEQ ID NO: 34077 - protein, 977 aa, synthetic construct
  REGION 1..977: note = engineered CasX variant
QEIKRINKIRRRLVKDSNTKKAGKTGPMKTLLVRVMTPDLRERLENLRKKPENIPQPISNTSQANLNKLLTDYTEMKKAILHVYWEEFQKDPVGLMSRVAQPASKKIDQNKLKPEMDEKGNLTTAGFACSQCGQPLFVYKLEQVSEKGKAYTNYFGRCNVAEHEKLILLYQLKPEKDSDEAVTYSLGKFGQRALDFYSIHVTKESTHPVKPLAQIAGNRYASPVGKALSDACMGTIASFLSKYQDIIIEHQKVVKGNQKRLESLRELAGKENLEYPSVTLPPQPHTKEGVDAYNEVIARVRMWVNLNLWQKLKLSRDDAKPLLRLKGFPSFPLVERQANEVDWWDMVCNVKKLINEKKEDGKVFWQNLAGYKRQEALRPYLSSEEDRKKGKKFARYQLGDLLLHLEKKHGEDWGKVYDEAWERIDKKVEGLSKHIKLEEERRSEDAQSKAALTDWLRAKASFVIEGLKEADKDEFCRCELKLQKWYGDLRGKPFAIEAENSILDISGFSKQYNCAFIWQKDGVKKLNLYLIINYFKGGKLRFKKIKPEAFEANRFYTVINKKSGEIVPMEVNFNFDDPNLIILPLAFGKRQGREFIWNDLLSLETGSLKLANGRVIEKTLYNRRTRQDEPALFVALTFERREVLDSSNIKPMNLIGVDRGENIPAVIALTDPEGCPLSRFKDSLGNPTHILRIGESYKEKQRTIQAKKEVEQRRAGGYSRKYASKAKNLADDMVRNTARDLLYYAVTQDAMLIFENLSRGFGRQGKRTFMAERQYTRMEDWLTAKLAYEGLPSKTYLSKTLAQYTSKTCSNCGFTITSADYDRVLEKLKKTATGWMTTINGKELKVEGQITYYNRYKRQNVVKDLSVELDRLSEESVNNDISSWTKGRSGEALSLLKKRFSHRPVQEKFVCLNCGFETHADEQAALNIARSWLFLRSQEYKKYQTNKTTGNTDKRAFVETWQSFYRKKLKEVWKPAV

SEQ ID NO: 34078 - protein, 978 aa, synthetic construct
  REGION 1..978: note = engineered CasX variant
QEIKRINKIRRRLVKDSNTKKAGKTGPMKTLLVRVMTPDLRERLENLRKKPENIPQPISNTSQANLNKLLTDYTEMKKAILHVYWEEFQKDPVGLMSRVAQPASKKIDQNKLKPEMDEKGNLTTAGFACSQCGQPLFVYKLEQVSEKGKAYTNYFGRCNVAEHEKLILLSQLKPEKDSDEAVTYSLGKFGQRALDFYSIHVTKESTHPVKPLAQIAGNRYASYPVGKALSDACMGTIASFLSKYQDIIIEHQKVVKGNQKRLESLRELAGKENLEYPSVTLPPQPHTKEGVDAYNEVIARVRMWVNLNLWQKLKLSRDDAKPLLRLKGFPSFPLVERQANEVDWWDMVCNVKKLINEKKEDGKVFWQNLAGYKRQEALRPYLSSEEDRKKGKKFARYQLGDLLLHLEKKHGEDWGKVYDEAWERIDKKVEGLSKHIKLEEERRSEDAQSKAALTDWLRAKASFVIEGLKEADKDEFCRCELKLQKWYGDLRGKPFAIEAENSILDISGFSKQYNCAFIWQKDGVKKLNLYLIINYFKGGKLRFKKIKPEAFEANRFYTVINKKSGEIVPMEVNFNFDDPNLIILPLAFGKRQGREFIWNDLLSLETGSLKLANGRVIEKTLYNRRTRQDEPALFVALTFERREVLDSSNIKPMNLIGVDRGENIPAVIALTDPEGCPLSRFKDSLGNPTHILRIGESYKEKQRTIQAKKEVEQRRAGGYSRKYASKAKNLADDMVRNTARDLLYYAVTQDAMLIFENLSRGFGRQGKRTFMAERQYTRMEDWLTAKLAYEGLPSKTYLSKTLAQYTSKTCSNCGFTITSADYDRVLEKLKKTATGWMTTINGKELKVEGQITYYNRYKRQNVVKDLSVELDRLSEESVNNDISSWTKGRSGEALSLLKKRFSHRPVQEKFVCLNCGFETHADEQAALNIARSWLFLRSQEYKKYQTNKTTGNTDKRAFVETWQSFYRKKLKEVWKPAV

SEQ ID NO: 34079 - protein, 978 aa, synthetic construct
  REGION 1..978: note = engineered CasX variant
QEIKRINKIRRRLVKDSNTKKAGKTGPMKTLLVRVMTPDLRERLENLRKKPENIPQPISNTSQANLNKLLTDYTEMKKAILHVYWEEFQKDPVGLMSRVAQPASKKIDQNKLKPEMDEKGNLTTAGFACSQCGQPLFVYKLEQVSEKGKAYTNYFGRCNVAEHEKLILLSQLKPEKDSDEAVTYSLGKFGQRALDFYSIHVTKESTHPVKPLAQIAGNRYASHPVGKALSDACMGTIASFLSKYQDIIIEHQKVVKGNQKRLESLRELAGKENLEYPSVTLPPQPHTKEGVDAYNEVIARVRMWVNLNLWQKLKLSRDDAKPLLRLKGFPSFPLVERQANEVDWWDMVCNVKKLINEKKEDGKVFWQNLAGYKRQEALRPYLSSEEDRKKGKKFARYQLGDLLLHLEKKHGEDWGKVYDEAWERIDKKVEGLSKHIKLEEERRSEDAQSKAALTDWLRAKASFVIEGLKEADKDEFCRCELKLQKWYGDLRGKPFAIEAENSILDISGFSKQYNCAFIWQKDGVKKLNLYLIINYFKGGKLRFKKIKPEAFEANRFYTVINKKSGEIVPMEVNFNFDDPNLIILPLAFGKRQGREFIWNDLLSLETGSLKLANGRVIEKTLYNRRTRQDEPALFVALTFERREVLDSSNIKPMNLIGVDRGENIPAVIALTDPEGCPLSRFKDSLGNPTHILRIGESYKEKQRTIQAKKEVEQRRAGGYSRKYASKAKNLADDMVRNTARDLLYYAVTQDAMLIFENLSRGFGRQGKRTFMAERQYTRMEDWLTAKLAYEGLPSKTYLSKTLAQYTSKTCSNCGFTITSADYDRVLEKLKKTATGWMTTINGKELKVEGQITYYNRYKRQNVVKDLSVELDRLSEESVNNDISSWTKGRSGEALSLLKKRFSHRPVQEKFVCLNCGFETHADEQAALNIARSWLFLRSQEYKKYQTNKTTGNTDKRAFVETWQSFYRKKLKEVWKPAV

SEQ ID NO: 34080 - protein, 978 aa, synthetic construct
  REGION 1..978: note = engineered CasX variant
QEIKRINKIRRRLVKDSNTKKAGKTGPMKTLLVRVMTPDLRERLENLRKKPENIPQPISNTSQANLNKLLTDYTEMKKAILHVYWEEFQKDPVGLMSRVAQPASKKIDQNKLKPEMDEKGNLTTAGFACSQCGQPLFVYKLEQVSEKGKAYTNYFGRCNVAEHEKLILLSQLKPEKDSDEAVTYSLGKFGQRALDFYSIHVTKESTHPVKPLAQIAGNRYASSPVGKALSDACMGTIASFLSKYQDIIIEHQKVVKGNQKRLESLRELAGKENLEYPSVTLPPQPHTKEGVDAYNEVIARVRMWVNLNLWQKLKLSRDDAKPLLRLKGFPSFPLVERQANEVDWWDMVCNVKKLINEKKEDGKVFWQNLAGYKRQEALRPYLSSEEDRKKGKKFARYQLGDLLLHLEKKHGEDWGKVYDEAWERIDKKVEGLSKHIKLEEERRSEDAQSKAALTDWLRAKASFVIEGLKEADKDEFCRCELKLQKWYGDLRGKPFAIEAENSILDISGFSKQYNCAFIWQKDGVKKLNLYLIINYFKGGKLRFKKIKPEAFEANRFYTVINKKSGEIVPMEVNFNFDDPNLIILPLAFGKRQGREFIWNDLLSLETGSLKLANGRVIEKTLYNRRTRQDEPALFVALTFERREVLDSSNIKPMNLIGVDRGENIPAVIALTDPEGCPLSRFKDSLGNPTHILRIGESYKEKQRTIQAKKEVEQRRAGGYSRKYASKAKNLADDMVRNTARDLLYYAVTQDAMLIFENLSRGFGRQGKRTFMAERQYTRMEDWLTAKLAYEGLPSKTYLSKTLAQYTSKTCSNCGFTITSADYDRVLEKLKKTATGWMTTINGKELKVEGQITYYNRYKRQNVVKDLSVELDRLSEESVNNDISSWTKGRSGEALSLLKKRFSHRPVQEKFVCLNCGFETHADEQAALNIARSWLFLRSQEYKKYQTNKTTGNTDKRAFVETWQSFYRKKLKEVWKPAV

SEQ ID NO: 34081 - protein, 978 aa, synthetic construct
  REGION 1..978: note = engineered CasX variant
QEIKRINKIRRRLVKDSNTKKAGKTGPMKTLLVRVMTPDLRERLENLRKKPENIPQPISNTSQANLNKLLTDYTEMKKAILHVYWEEFQKDPVGLMSRVAQPASKKIDQNKLKPEMDEKGNLTTAGFACSQCGQPLFVYKLEQVSEKGKAYTNYFGRCNVAEHEKLILLSQLKPEKDSDEAVTYSLGKFGQRALDFYSIHVTKESTHPVKPLAQIAGNRYASTPVGKALSDACMGTIASFLSKYQDIIIEHQKVVKGNQKRLESLRELAGKENLEYPSVTLPPQPHTKEGVDAYNEVIARVRMWVNLNLWQKLKLSRDDAKPLLRLKGFPSFPLVERQANEVDWWDMVCNVKKLINEKKEDGKVFWQNLAGYKRQEALRPYLSSEEDRKKGKKFARYQLGDLLLHLEKKHGEDWGKVYDEAWERIDKKVEGLSKHIKLEEERRSEDAQSKAALTDWLRAKASFVIEGLKEADKDEFCRCELKLQKWYGDLRGKPFAIEAENSILDISGFSKQYNCAFIWQKDGVKKLNLYLIINYFKGGKLRFKKIKPEAFEANRFYTVINKKSGEIVPMEVNFNFDDPNLIILPLAFGKRQGREFIWNDLLSLETGSLKLANGRVIEKTLYNRRTRQDEPALFVALTFERREVLDSSNIKPMNLIGVDRGENIPAVIALTDPEGCPLSRFKDSLGNPTHILRIGESYKEKQRTIQAKKEVEQRRAGGYSRKYASKAKNLADDMVRNTARDLLYYAVTQDAMLIFENLSRGFGRQGKRTFMAERQYTRMEDWLTAKLAYEGLPSKTYLSKTLAQYTSKTCSNCGFTITSADYDRVLEKLKKTATGWMTTINGKELKVEGQITYYNRYKRQNVVKDLSVELDRLSEESVNNDISSWTKGRSGEALSLLKKRFSHRPVQEKFVCLNCGFETHADEQAALNIARSWLFLRSQEYKKYQTNKTTGNTDKRAFVETWQSFYRKKLKEVWKPAV

SEQ ID NO: 34082 - protein, 978 aa, synthetic construct
  REGION 1..978: note = engineered CasX variant
QEIKRINKIRRRLVKDSNTKKAGKTGPMKTLLVRVMTPDLRERLENLRKKPENIPQPISNTSQANLNKLLTDYTEMKKAILHVYWEEFQKDPVGLMSRVAQPASKKIDQNKLKPEMDEKGNLTTAGFACSQCGQPLFVYKLEQVSEKGKAYTNYFGRCNVAEHEKLILLSQLKPEKDSDEAVTYSLGKFGQRALDFYSIHVTKESTHPVKPLAQIAGNRYASAPVGKALSDACMGTIASFLSKYQDIIIEHQKVVKGNQKRLESLRELAGKENLEYPSVTLPPQPHTKEGVDAYNEVIARVRMWVNLNLWQKLKLSRDDAKPLLRLKGFPSFPLVERQANEVDWWDMVCNVKKLINEKKEDGKVFWQNLAGYKRQEALRPYLSSEEDRKKGKKFARYQLGDLLLHLEKKHGEDWGKVYDEAWERIDKKVEGLSKHIKLEEERRSEDAQSKAALTDWLRAKASFVIEGLKEADKDEFCRCELKLQKWYGDLRGKPFAIEAENSILDISGFSKQYNCAFIWQKDGVKKLNLYLIINYFKGGKLRFKKIKPEAFEANRFYTVINKKSGEIVPMEVNFNFDDPNLIILPLAFGKRQGREFIWNDLLSLETGSLKLANGRVIEKTLYNRRTRQDEPALFVALTFERREVLDSSNIKPMNLIGVDRGENIPAVIALTDPEGCPLSRFKDSLGNPTHILRIGESYKEKQRTIQAKKEVEQRRAGGYSRKYASKAKNLADDMVRNTARDLLYYAVTQDAMLIFENLSRGFGRQGKRTFMAERQYTRMEDWLTAKLAYEGLPSKTYLSKTLAQYTSKTCSNCGFTITSADYDRVLEKLKKTATGWMTTINGKELKVEGQITYYNRYKRQNVVKDLSVELDRLSEESVNNDISSWTKGRSGEALSLLKKRFSHRPVQEKFVCLNCGFETHADEQAALNIARSWLFLRSQEYKKYQTNKTTGNTDKRAFVETWQSFYRKKLKEVWKPAV

SEQ ID NO: 34083 - protein, 978 aa, synthetic construct
  REGION 1..978: note = engineered CasX variant
QEIKRINKIRRRLVKDSNTKKAGKTGPMKTLLVRVMTPDLRERLENLRKKPENIPQPISNTSQANLNKLLTDYTEMKKAILHVYWEEFQKDPVGLMSRVAQPASKKIDQNKLKPEMDEKGNLTTAGFACSQCGQPLFVYKLEQVSEKGKAYTNYFGRCNVAEHEKLILLSQLKPEKDSDEAVTYSLGKFGQRALDFYSIHVTKESTHPVKPLAQIAGNRYASVPVGKALSDACMGTIASFLSKYQDIIIEHQKVVKGNQKRLESLRELAGKENLEYPSVTLPPQPHTKEGVDAYNEVIARVRMWVNLNLWQKLKLSRDDAKPLLRLKGFPSFPLVERQANEVDWWDMVCNVKKLINEKKEDGKVFWQNLAGYKRQEALRPYLSSEEDRKKGKKFARYQLGDLLLHLEKKHGEDWGKVYDEAWERIDKKVEGLSKHIKLEEERRSEDAQSKAALTDWLRAKASFVIEGLKEADKDEFCRCELKLQKWYGDLRGKPFAIEAENSILDISGFSKQYNCAFIWQKDGVKKLNLYLIINYFKGGKLRFKKIKPEAFEANRFYTVINKKSGEIVPMEVNFNFDDPNLIILPLAFGKRQGREFIWNDLLSLETGSLKLANGRVIEKTLYNRRTRQDEPALFVALTFERREVLDSSNIKPMNLIGVDRGENIPAVIALTDPEGCPLSRFKDSLGNPTHILRIGESYKEKQRTIQAKKEVEQRRAGGYSRKYASKAKNLADDMVRNTARDLLYYAVTQDAMLIFENLSRGFGRQGKRTFMAERQYTRMEDWLTAKLAYEGLPSKTYLSKTLAQYTSKTCSNCGFTITSADYDRVLEKLKKTATGWMTTINGKELKVEGQITYYNRYKRQNVVKDLSVELDRLSEESVNNDISSWTKGRSGEALSLLKKRFSHRPVQEKFVCLNCGFETHADEQAALNIARSWLFLRSQEYKKYQTNKTTGNTDKRAFVETWQSFYRKKLKEVWKPAV

SEQ ID NO: 34084 - protein, 978 aa, synthetic construct
  REGION 1..978: note = engineered CasX variant
QEIKRINKIRRRLVKDSNTKKAGKTGPMKTLLVRVMTPDLRERLENLRKKPENIPQPISNTSQANLNKLLTDYTEMKKAILHVYWEEFQKDPVGLMSRVAQPASKKIDQNKLKPEMDEKGNLTTAGFACSQCGQPLFVYKLEQVSEKGKAYTNYFGRCNVAEHEKLIKLSQLKPEKDSDEAVTYSLGKFGQRALDFYSIHVTKESTHPVKPLAQIAGNRYASGPVGKALSDACMGTIASFLSKYQDIIIEHQKVVKGNQKRLESLRELAGKENLEYPSVTLPPQPHTKEGVDAYNEVIARVRMWVNLNLWQKLKLSRDDAKPLLRLKGFPSFPLVERQANEVDWWDMVCNVKKLINEKKEDGKVFWQNLAGYKRQEALRPYLSSEEDRKKGKKFARYQLGDLLLHLEKKHGEDWGKVYDEAWERIDKKVEGLSKHIKLEEERRSEDAQSKAALTDWLRAKASFVIEGLKEADKDEFCRCELKLQKWYGDLRGKPFAIEAENSILDISGFSKQYNCAFIWQKDGVKKLNLYLIINYFKGGKLRFKKIKPEAFEANRFYTVINKKSGEIVPMEVNFNFDDPNLIILPLAFGKRQGREFIWNDLLSLETGSLKLANGRVIEKTLYNRRTRQDEPALFVALTFERREVLDSSNIKPMNLIGVDRGENIPAVIALTDPEGCPLSRFKDSLGNPTHILRIGESYKEKQRTIQAKKEVEQRRAGGYSRKYASKAKNLADDMVRNTARDLLYYAVTQDAMLIFENLSRGFGRQGKRTFMAERQYTRMEDWLTAKLAYEGLPSKTYLSKTLAQYTSKTCSNCGFTITSADYDRVLEKLKKTATGWMTTINGKELKVEGQITYYNRYKRQNVVKDLSVELDRLSEESVNNDISSWTKGRSGEALSLLKKRFSHRPVQEKFVCLNCGFETHADEQAALNIARSWLFLRSQEYKKYQTNKTTGNTDKRAFVETWQSFYRKKLKEVWKPAV

SEQ ID NO: 34085 - protein, 977 aa, synthetic construct
  REGION 1..977: note = engineered CasX variant
QEIKRINKIRRRLVKDSNTKKAGKTGPMKTLLVRVMTPDLRERLENLRKKPENIPQPISNTSQANLNKLLTDYTEMKKAILHVYWEEFQKDPVGLMSRVAQPASKKIDQNKLKPEMDEKGNLTTAGFACSQCGQPLFVYKLEQVSEKGKAYTNYFGRCNVAEHEKLILLSQLKPEKDSDEAVTYSLGKFGQRALDFYSIHVTKESTHPVKPLAQIAGNRYASPVGKALSDACMGTIASFLSKYQDIIIEHQKVVKGNQKRLESLRELAGKENLEYPSVTLPPQPHTKEGVDAYNEVIARVRMWVNLNLWQKLKLSRDDAKPLLRLKGFPSFPLVERQANEVDWWDMVCNVKKLINEKKEDGKVFWQNLAGYKRQEALRPYLSSEEDRKKGKKFARYQLGDLLLHLEKKHGEDWGKVYDEAWERIDKKVEGLSKHIKLEEERRSEDAQSKAALTDWLRAKASFVIEGLKEADKDEFCRCELKLQKWYGDLRGKPFAIEAENSILDISGFSKQYNCAFIWQKDGVKKLNLYLIINYFKGGKLRFKKIKPEAFEANRFYTVINKKSGEIVPMEVNFNFDDPNLIILPLAFGKRQGREFIWNDLLSLETGSLKLANGRVIEKTLYNRRTRQDEPALFVALTFERREVLDSSNIKPMNLIGVDRGENIPAVIALTDPEGCPLSRFKDSLGNPTHILRIGESYKEKQRTIQAKKEVEQRRAGGYSRKYASKAKNLADDMVRNTARDLLYYAVTQDAMLIFENLSRGFGRQGKRTFMAERQYTRMEDWLTAKLAYEGLPSKTYLSKTLAQYTSKTCSNCGFTITSADYDRVLEKLKKTATGWMTTINGKELKVEGQITYYNRYKRQNVVKDLSVELDRLSEESVNNDISSWTKGRSGEALSLLKKRFSHRPVQEKFVCLNCGFETHADEQAALNIARSWLFLRSQEYKKYQTNKTTGNTDKRAFVETWQSFYRKKLKEVWKPAV

SEQ ID NO: 34086 - protein, 978 aa, synthetic construct
  REGION 1..978: note = engineered CasX variant
QEIKRINKIRRRLVKDSNTKKAGKTGPMKTLLVRVMTPDLRERLENLRKKPENIPQPISNTSQANLNKLLTDYTEMKKAILHVYWEEFQKDPVGLMSRVAQPASKKIDQNKLKPEMDEKGNLTTAGFACSQCGQPLFVYKLEQVSEKGKAYTNYFGRCNVAEHEKLILLAQLKPEKDSDEAVTYSLGKFGQRALDFYSIHVTKESTHPVKPLAQIAGNRYASYPVGKALSDACMGTIASFLSKYQDIIIEHQKVVKGNQKRLESLRELAGKENLEYPSVTLPPQPHTKEGVDAYNEVIARVRMWVNLNLWQKLKLSRDDAKPLLRLKGFPSFPLVERQANEVDWWDMVCNVKKLINEKKEDGKVFWQNLAGYKRQEALRPYLSSEEDRKKGKKFARYQLGDLLLHLEKKHGEDWGKVYDEAWERIDKKVEGLSKHIKLEEERRSEDAQSKAALTDWLRAKASFVIEGLKEADKDEFCRCELKLQKWYGDLRGKPFAIEAENSILDISGFSKQYNCAFIWQKDGVKKLNLYLIINYFKGGKLRFKKIKPEAFEANRFYTVINKKSGEIVPMEVNFNFDDPNLIILPLAFGKRQGREFIWNDLLSLETGSLKLANGRVIEKTLYNRRTRQDEPALFVALTFERREVLDSSNIKPMNLIGVDRGENIPAVIALTDPEGCPLSRFKDSLGNPTHILRIGESYKEKQRTIQAKKEVEQRRAGGYSRKYASKAKNLADDMVRNTARDLLYYAVTQDAMLIFENLSRGFGRQGKRTFMAERQYTRMEDWLTAKLAYEGLPSKTYLSKTLAQYTSKTCSNCGFTITSADYDRVLEKLKKTATGWMTTINGKELKVEGQITYYNRYKRQNVVKDLSVELDRLSEESVNNDISSWTKGRSGEALSLLKKRFSHRPVQEKFVCLNCGFETHADEQAALNIARSWLFLRSQEYKKYQTNKTTGNTDKRAFVETWQSFYRKKLKEVWKPAV

SEQ ID NO: 34087 - protein, 978 aa, synthetic construct
  REGION 1..978: note = engineered CasX variant
QEIKRINKIRRRLVKDSNTKKAGKTGPMKTLLVRVMTPDLRERLENLRKKPENIPQPISNTSQANLNKLLTDYTEMKKAILHVYWEEFQKDPVGLMSRVAQPASKKIDQNKLKPEMDEKGNLTTAGFACSQCGQPLFVYKLEQVSEKGKAYTNYFGRCNVAEHEKLILLAQLKPEKDSDEAVTYSLGKFGQRALDFYSIHVTKESTHPVKPLAQIAGNRYASHPVGKALSDACMGTIASFLSKYQDIIIEHQKVVKGNQKRLESLRELAGKENLEYPSVTLPPQPHTKEGVDAYNEVIARVRMWVNLNLWQKLKLSRDDAKPLLRLKGFPSFPLVERQANEVDWWDMVCNVKKLINEKKEDGKVFWQNLAGYKRQEALRPYLSSEEDRKKGKKFARYQLGDLLLHLEKKHGEDWGKVYDEAWERIDKKVEGLSKHIKLEEERRSEDAQSKAALTDWLRAKASFVIEGLKEADKDEFCRCELKLQKWYGDLRGKPFAIEAENSILDISGFSKQYNCAFIWQKDGVKKLNLYLIINYFKGGKLRFKKIKPEAFEANRFYTVINKKSGEIVPMEVNFNFDDPNLIILPLAFGKRQGREFIWNDLLSLETGSLKLANGRVIEKTLYNRRTRQDEPALFVALTFERREVLDSSNIKPMNLIGVDRGENIPAVIALTDPEGCPLSRFKDSLGNPTHILRIGESYKEKQRTIQAKKEVEQRRAGGYSRKYASKAKNLADDMVRNTARDLLYYAVTQDAMLIFENLSRGFGRQGKRTFMAERQYTRMEDWLTAKLAYEGLPSKTYLSKTLAQYTSKTCSNCGFTITSADYDRVLEKLKKTATGWMTTINGKELKVEGQITYYNRYKRQNVVKDLSVELDRLSEESVNNDISSWTKGRSGEALSLLKKRFSHRPVQEKFVCLNCGFETHADEQAALNIARSWLFLRSQEYKKYQTNKTTGNTDKRAFVETWQSFYRKKLKEVWKPAV

SEQ ID NO: 34088 - protein, 978 aa, synthetic construct
  REGION 1..978: note = engineered CasX variant
QEIKRINKIRRRLVKDSNTKKAGKTGPMKTLLVRVMTPDLRERLENLRKKPENIPQPISNTSQANLNKLLTDYTEMKKAILHVYWEEFQKDPVGLMSRVAQPASKKIDQNKLKPEMDEKGNLTTAGFACSQCGQPLFVYKLEQVSEKGKAYTNYFGRCNVAEHEKLILLAQLKPEKDSDEAVTYSLGKFGQRALDFYSIHVTKESTHPVKPLAQIAGNRYASTPVGKALSDACMGTIASFLSKYQDIIIEHQKVVKGNQKRLESLRELAGKENLEYPSVTLPPQPHTKEGVDAYNEVIARVRMWVNLNLWQKLKLSRDDAKPLLRLKGFPSFPLVERQANEVDWWDMVCNVKKLINEKKEDGKVFWQNLAGYKRQEALRPYLSSEEDRKKGKKFARYQLGDLLLHLEKKHGEDWGKVYDEAWERIDKKVEGLSKHIKLEEERRSEDAQSKAALTDWLRAKASFVIEGLKEADKDEFCRCELKLQKWYGDLRGKPFAIEAENSILDISGFSKQYNCAFIWQKDGVKKLNLYLIINYFKGGKLRFKKIKPEAFEANRFYTVINKKSGEIVPMEVNFNFDDPNLIILPLAFGKRQGREFIWNDLLSLETGSLKLANGRVIEKTLYNRRTRQDEPALFVALTFERREVLDSSNIKPMNLIGVDRGENIPAVIALTDPEGCPLSRFKDSLGNPTHILRIGESYKEKQRTIQAKKEVEQRRAGGYSRKYASKAKNLADDMVRNTARDLLYYAVTQDAMLIFENLSRGFGRQGKRTFMAERQYTRMEDWLTAKLAYEGLPSKTYLSKTLAQYTSKTCSNCGFTITSADYDRVLEKLKKTATGWMTTINGKELKVEGQITYYNRYKRQNVVKDLSVELDRLSEESVNNDISSWTKGRSGEALSLLKKRFSHRPVQEKFVCLNCGFETHADEQAALNIARSWLFLRSQEYKKYQTNKTTGNTDKRAFVETWQSFYRKKLKEVWKPAV

SEQ ID NO: 34089 - protein, 978 aa, synthetic construct
  REGION 1..978: note = engineered CasX variant
QEIKRINKIRRRLVKDSNTKKAGKTGPMKTLLVRVMTPDLRERLENLRKKPENIPQPISNTSQANLNKLLTDYTEMKKAILHVYWEEFQKDPVGLMSRVAQPASKKIDQNKLKPEMDEKGNLTTAGFACSQCGQPLFVYKLEQVSEKGKAYTNYFGRCNVAEHEKLILLAQLKPEKDSDEAVTYSLGKFGQRALDFYSIHVTKESTHPVKPLAQIAGNRYASAPVGKALSDACMGTIASFLSKYQDIIIEHQKVVKGNQKRLESLRELAGKENLEYPSVTLPPQPHTKEGVDAYNEVIARVRMWVNLNLWQKLKLSRDDAKPLLRLKGFPSFPLVERQANEVDWWDMVCNVKKLINEKKEDGKVFWQNLAGYKRQEALRPYLSSEEDRKKGKKFARYQLGDLLLHLEKKHGEDWGKVYDEAWERIDKKVEGLSKHIKLEEERRSEDAQSKAALTDWLRAKASFVIEGLKEADKDEFCRCELKLQKWYGDLRGKPFAIEAENSILDISGFSKQYNCAFIWQKDGVKKLNLYLIINYFKGGKLRFKKIKPEAFEANRFYTVINKKSGEIVPMEVNFNFDDPNLIILPLAFGKRQGREFIWNDLLSLETGSLKLANGRVIEKTLYNRRTRQDEPALFVALTFERREVLDSSNIKPMNLIGVDRGENIPAVIALTDPEGCPLSRFKDSLGNPTHILRIGESYKEKQRTIQAKKEVEQRRAGGYSRKYASKAKNLADDMVRNTARDLLYYAVTQDAMLIFENLSRGFGRQGKRTFMAERQYTRMEDWLTAKLAYEGLPSKTYLSKTLAQYTSKTCSNCGFTITSADYDRVLEKLKKTATGWMTTINGKELKVEGQITYYNRYKRQNVVKDLSVELDRLSEESVNNDISSWTKGRSGEALSLLKKRFSHRPVQEKFVCLNCGFETHADEQAALNIARSWLFLRSQEYKKYQTNKTTGNTDKRAFVETWQSFYRKKLKEVWKPAV

SEQ ID NO: 34090 - protein, 978 aa, synthetic construct
  REGION 1..978: note = engineered CasX variant
QEIKRINKIRRRLVKDSNTKKAGKTGPMKTLLVRVMTPDLRERLENLRKKPENIPQPISNTSQANLNKLLTDYTEMKKAILHVYWEEFQKDPVGLMSRVAQPASKKIDQNKLKPEMDEKGNLTTAGFACSQCGQPLFVYKLEQVSEKGKAYTNYFGRCNVAEHEKLILLAQLKPEKDSDEAVTYSLGKFGQRALDFYSIHVTKESTHPVKPLAQIAGNRYASVPVGKALSDACMGTIASFLSKYQDIIIEHQKVVKGNQKRLESLRELAGKENLEYPSVTLPPQPHTKEGVDAYNEVIARVRMWVNLNLWQKLKLSRDDAKPLLRLKGFPSFPLVERQANEVDWWDMVCNVKKLINEKKEDGKVFWQNLAGYKRQEALRPYLSSEEDRKKGKKFARYQLGDLLLHLEKKHGEDWGKVYDEAWERIDKKVEGLSKHIKLEEERRSEDAQSKAALTDWLRAKASFVIEGLKEADKDEFCRCELKLQKWYGDLRGKPFAIEAENSILDISGFSKQYNCAFIWQKDGVKKLNLYLIINYFKGGKLRFKKIKPEAFEANRFYTVINKKSGEIVPMEVNFNFDDPNLIILPLAFGKRQGREFIWNDLLSLETGSLKLANGRVIEKTLYNRRTRQDEPALFVALTFERREVLDSSNIKPMNLIGVDRGENIPAVIALTDPEGCPLSRFKDSLGNPTHILRIGESYKEKQRTIQAKKEVEQRRAGGYSRKYASKAKNLADDMVRNTARDLLYYAVTQDAMLIFENLSRGFGRQGKRTFMAERQYTRMEDWLTAKLAYEGLPSKTYLSKTLAQYTSKTCSNCGFTITSADYDRVLEKLKKTATGWMTTINGKELKVEGQITYYNRYKRQNVVKDLSVELDRLSEESVNNDISSWTKGRSGEALSLLKKRFSHRPVQEKFVCLNCGFETHADEQAALNIARSWLFLRSQEYKKYQTNKTTGNTDKRAFVETWQSFYRKKLKEVWKPAV

SEQ ID NO: 34091 - protein, 978 aa, synthetic construct
  REGION 1..978: note = engineered CasX variant
QEIKRINKIRRRLVKDSNTKKAGKTGPMKTLLVRVMTPDLRERLENLRKKPENIPQPISNTSQANLNKLLTDYTEMKKAILHVYWEEFQKDPVGLMSRVAQPASKKIDQNKLKPEMDEKGNLTTAGFACSQCGQPLFVYKLEQVSEKGKAYTNYFGRCNVAEHEKLILLAQLKPEKDSDEAVTYSLGKFGQRALDFYSIHVTKESTHPVKPLAQIAGNRYASYPVGKALSDACMGTIASFLSKYQDIIIEHQKVVKGNQKRLESLRELAGKENLEYPSVTLPPQPHTSEGVDAYNEVIARVRMWVNLNLWQKLKLSRDDAKPLLRLKGFPSFPLVERQANEVDWWDMVCNVKKLINEKKEDGKVFWQNLAGYKRQEALRPYLSSEEDRKKGKKFARYQLGDLLLHLEKKHGEDWGKVYDEAWERIDKKVEGLSKHIKLEEERRSEDAQSKAALTDWLRAKASFVIEGLKEADKDEFCRCELKLQKWYGDLRGKPFAIEAENSILDISGFSKQYNCAFIWQKDGVKKLNLYLIINYFKGGKLRFKKIKPEAFEANRFYTVINKKSGEIVPMEVNFNFDDPNLIILPLAFGKRQGREFIWNDLLSLETGSLKLANGRVIEKTLYNRRTRQDEPALFVALTFERREVLDSSNIKPMNLIGVDRGENIPAVIALTDPEGCPLSRFKDSLGNPTHILRIGESYKEKQRTIQAKKEVEQRRAGGYSRKYASKAKNLADDMVRNTARDLLYYAVTQDAMLIFENLSRGFGRQGKRTFMAERQYTRMEDWLTAKLAYEGLPSKTYLSKTLAQYTSKTCSNCGFTITSADYDRVLEKLKKTATGWMTTINGKELKVEGQITYYNRYKRQNVVKDLSVELDRLSEESVNNDISSWTKGRSGEALSLLKKRFSHRPVQEKFVCLNCGFETHADEQAALNIARSWLFLRSQEYKKYQTNKTTGNTDKRAFVETWQSFYRKKLKEVWKPAV

SEQ ID NO: 34092 - protein, 978 aa, synthetic construct
  REGION 1..978: note = engineered CasX variant
QEIKRINKIRRRLVKDSNTKKAGKTGPMKTLLVRVMTPDLRERLENLRKKPENIPQPISNTSQANLNKLLTDYTEMKKAILHVYWEEFQKDPVGLMSRVAQPASKKIDQNKLKPEMDEKGNLTTAGFACSQCGQPLFVYKLEQVSEKGKAYTNYFGRCNVAEHEKLILLAQLKPEKDSDEAVTYSLGKFGQRALDFYSIHVTKESTHPVKPLAQIAGNRYASHPVGKALSDACMGTIASFLSKYQDIIIEHQKVVKGNQKRLESLRELAGKENLEYPSVTLPPQPHTSEGVDAYNEVIARVRMWVNLNLWQKLKLSRDDAKPLLRLKGFPSFPLVERQANEVDWWDMVCNVKKLINEKKEDGKVFWQNLAGYKRQEALRPYLSSEEDRKKGKKFARYQLGDLLLHLEKKHGEDWGKVYDEAWERIDKKVEGLSKHIKLEEERRSEDAQSKAALTDWLRAKASFVIEGLKEADKDEFCRCELKLQKWYGDLRGKPFAIEAENSILDISGFSKQYNCAFIWQKDGVKKLNLYLIINYFKGGKLRFKKIKPEAFEANRFYTVINKKSGEIVPMEVNFNFDDPNLIILPLAFGKRQGREFIWNDLLSLETGSLKLANGRVIEKTLYNRRTRQDEPALFVALTFERREVLDSSNIKPMNLIGVDRGENIPAVIALTDPEGCPLSRFKDSLGNPTHILRIGESYKEKQRTIQAKKEVEQRRAGGYSRKYASKAKNLADDMVRNTARDLLYYAVTQDAMLIFENLSRGFGRQGKRTFMAERQYTRMEDWLTAKLAYEGLPSKTYLSKTLAQYTSKTCSNCGFTITSADYDRVLEKLKKTATGWMTTINGKELKVEGQITYYNRYKRQNVVKDLSVELDRLSEESVNNDISSWTKGRSGEALSLLKKRFSHRPVQEKFVCLNCGFETHADEQAALNIARSWLFLRSQEYKKYQTNKTTGNTDKRAFVETWQSFYRKKLKEVWKPAV

SEQ ID NO: 34093 - protein, 978 aa, synthetic construct
  REGION 1..978: note = engineered CasX variant
QEIKRINKIRRRLVKDSNTKKAGKTGPMKTLLVRVMTPDLRERLENLRKKPENIPQPISNTSQANLNKLLTDYTEMKKAILHVYWEEFQKDPVGLMSRVAQPASKKIDQNKLKPEMDEKGNLTTAGFACSQCGQPLFVYKLEQVSEKGKAYTNYFGRCNVAEHEKLILLAQLKPEKDSDEAVTYSLGKFGQRALDFYSIHVTKESTHPVKPLAQIAGNRYASSPVGKALSDACMGTIASFLSKYQDIIIEHQKVVKGNQKRLESLRELAGKENLEYPSVTLPPQPHTSEGVDAYNEVIARVRMWVNLNLWQKLKLSRDDAKPLLRLKGFPSFPLVERQANEVDWWDMVCNVKKLINEKKEDGKVFWQNLAGYKRQEALRPYLSSEEDRKKGKKFARYQLGDLLLHLEKKHGEDWGKVYDEAWERIDKKVEGLSKHIKLEEERRSEDAQSKAALTDWLRAKASFVIEGLKEADKDEFCRCELKLQKWYGDLRGKPFAIEAENSILDISGFSKQYNCAFIWQKDGVKKLNLYLIINYFKGGKLRFKKIKPEAFEANRFYTVINKKSGEIVPMEVNFNFDDPNLIILPLAFGKRQGREFIWNDLLSLETGSLKLANGRVIEKTLYNRRTRQDEPALFVALTFERREVLDSSNIKPMNLIGVDRGENIPAVIALTDPEGCPLSRFKDSLGNPTHILRIGESYKEKQRTIQAKKEVEQRRAGGYSRKYASKAKNLADDMVRNTARDLLYYAVTQDAMLIFENLSRGFGRQGKRTFMAERQYTRMEDWLTAKLAYEGLPSKTYLSKTLAQYTSKTCSNCGFTITSADYDRVLEKLKKTATGWMTTINGKELKVEGQITYYNRYKRQNVVKDLSVELDRLSEESVNNDISSWTKGRSGEALSLLKKRFSHRPVQEKFVCLNCGFETHADEQAALNIARSWLFLRSQEYKKYQTNKTTGNTDKRAFVETWQSFYRKKLKEVWKPAV

SEQ ID NO: 34094 - protein, 978 aa, synthetic construct
  REGION 1..978: note = engineered CasX variant
QEIKRINKIRRRLVKDSNTKKAGKTGPMKTLLVRVMTPDLRERLENLRKKPENIPQPISNTSQANLNKLLTDYTEMKKAILHVYWEEFQKDPVGLMSRVAQPASKKIDQNKLKPEMDEKGNLTTAGFACSQCGQPLFVYKLEQVSEKGKAYTNYFGRCNVAEHEKLILLAQLKPEKDSDEAVTYSLGKFGQRALDFYSIHVTKESTHPVKPLAQIAGNRYASTPVGKALSDACMGTIASFLSKYQDIIIEHQKVVKGNQKRLESLRELAGKENLEYPSVTLPPQPHTSEGVDAYNEVIARVRMWVNLNLWQKLKLSRDDAKPLLRLKGFPSFPLVERQANEVDWWDMVCNVKKLINEKKEDGKVFWQNLAGYKRQEALRPYLSSEEDRKKGKKFARYQLGDLLLHLEKKHGEDWGKVYDEAWERIDKKVEGLSKHIKLEEERRSEDAQSKAALTDWLRAKASFVIEGLKEADKDEFCRCELKLQKWYGDLRGKPFAIEAENSILDISGFSKQYNCAFIWQKDGVKKLNLYLIINYFKGGKLRFKKIKPEAFEANRFYTVINKKSGEIVPMEVNFNFDDPNLIILPLAFGKRQGREFIWNDLLSLETGSLKLANGRVIEKTLYNRRTRQDEPALFVALTFERREVLDSSNIKPMNLIGVDRGENIPAVIALTDPEGCPLSRFKDSLGNPTHILRIGESYKEKQRTIQAKKEVEQRRAGGYSRKYASKAKNLADDMVRNTARDLLYYAVTQDAMLIFENLSRGFGRQGKRTFMAERQYTRMEDWLTAKLAYEGLPSKTYLSKTLAQYTSKTCSNCGFTITSADYDRVLEKLKKTATGWMTTINGKELKVEGQITYYNRYKRQNVVKDLSVELDRLSEESVNNDISSWTKGRSGEALSLLKKRFSHRPVQEKFVCLNCGFETHADEQAALNIARSWLFLRSQEYKKYQTNKTTGNTDKRAFVETWQSFYRKKLKEVWKPAV

SEQ ID NO: 34095 - protein, 978 aa, synthetic construct
  REGION 1..978: note = engineered CasX variant
QEIKRINKIRRRLVKDSNTKKAGKTGPMKTLLVRVMTPDLRERLENLRKKPENIPQPISNTSQANLNKLLTDYTEMKKAILHVYWEEFQKDPVGLMSRVAQPASKKIDQNKLKPEMDEKGNLTTAGFACSQCGQPLFVYKLEQVSEKGKAYTNYFGRCNVAEHEKLILLAQLKPEKDSDEAVTYSLGKFGQRALDFYSIHVTKESTHPVKPLAQIAGNRYASAPVGKALSDACMGTIASFLSKYQDIIIEHQKVVKGNQKRLESLRELAGKENLEYPSVTLPPQPHTSEGVDAYNEVIARVRMWVNLNLWQKLKLSRDDAKPLLRLKGFPSFPLVERQANEVDWWDMVCNVKKLINEKKEDGKVFWQNLAGYKRQEALRPYLSSEEDRKKGKKFARYQLGDLLLHLEKKHGEDWGKVYDEAWERIDKKVEGLSKHIKLEEERRSEDAQSKAALTDWLRAKASFVIEGLKEADKDEFCRCELKLQKWYGDLRGKPFAIEAENSILDISGFSKQYNCAFIWQKDGVKKLNLYLIINYFKGGKLRFKKIKPEAFEANRFYTVINKKSGEIVPMEVNFNFDDPNLIILPLAFGKRQGREFIWNDLLSLETGSLKLANGRVIEKTLYNRRTRQDEPALFVALTFERREVLDSSNIKPMNLIGVDRGENIPAVIALTDPEGCPLSRFKDSLGNPTHILRIGESYKEKQRTIQAKKEVEQRRAGGYSRKYASKAKNLADDMVRNTARDLLYYAVTQDAMLIFENLSRGFGRQGKRTFMAERQYTRMEDWLTAKLAYEGLPSKTYLSKTLAQYTSKTCSNCGFTITSADYDRVLEKLKKTATGWMTTINGKELKVEGQITYYNRYKRQNVVKDLSVELDRLSEESVNNDISSWTKGRSGEALSLLKKRFSHRPVQEKFVCLNCGFETHADEQAALNIARSWLFLRSQEYKKYQTNKTTGNTDKRAFVETWQSFYRKKLKEVWKPAV

SEQ ID NO: 34096 - protein, 978 aa, synthetic construct
  REGION 1..978: note = engineered CasX variant
QEIKRINKIRRRLVKDSNTKKAGKTGPMKTLLVRVMTPDLRERLENLRKKPENIPQPISNTSQANLNKLLTDYTEMKKAILHVYWEEFQKDPVGLMSRVAQPASKKIDQNKLKPEMDEKGNLTTAGFACSQCGQPLFVYKLEQVSEKGKAYTNYFGRCNVAEHEKLILLAQLKPEKDSDEAVTYSLGKFGQRALDFYSIHVTKESTHPVKPLAQIAGNRYASVPVGKALSDACMGTIASFLSKYQDIIIEHQKVVKGNQKRLESLRELAGKENLEYPSVTLPPQPHTSEGVDAYNEVIARVRMWVNLNLWQKLKLSRDDAKPLLRLKGFPSFPLVERQANEVDWWDMVCNVKKLINEKKEDGKVFWQNLAGYKRQEALRPYLSSEEDRKKGKKFARYQLGDLLLHLEKKHGEDWGKVYDEAWERIDKKVEGLSKHIKLEEERRSEDAQSKAALTDWLRAKASFVIEGLKEADKDEFCRCELKLQKWYGDLRGKPFAIEAENSILDISGFSKQYNCAFIWQKDGVKKLNLYLIINYFKGGKLRFKKIKPEAFEANRFYTVINKKSGEIVPMEVNFNFDDPNLIILPLAFGKRQGREFIWNDLLSLETGSLKLANGRVIEKTLYNRRTRQDEPALFVALTFERREVLDSSNIKPMNLIGVDRGENIPAVIALTDPEGCPLSRFKDSLGNPTHILRIGESYKEKQRTIQAKKEVEQRRAGGYSRKYASKAKNLADDMVRNTARDLLYYAVTQDAMLIFENLSRGFGRQGKRTFMAERQYTRMEDWLTAKLAYEGLPSKTYLSKTLAQYTSKTCSNCGFTITSADYDRVLEKLKKTATGWMTTINGKELKVEGQITYYNRYKRQNVVKDLSVELDRLSEESVNNDISSWTKGRSGEALSLLKKRFSHRPVQEKFVCLNCGFETHADEQAALNIARSWLFLRSQEYKKYQTNKTTGNTDKRAFVETWQSFYRKKLKEVWKPAV

SEQ ID NO: 34097 - protein, 978 aa, synthetic construct
  REGION 1..978: note = engineered CasX variant
QEIKRINKIRRRLVKDSNTKKAGKTGPMKTLLVRVMTPDLRERLENLRKKPENIPQPISNTSQANLNKLLTDYTEMKKAILHVYWEEFQKDPVGLMSRVAQPASKKIDQNKLKPEMDEKGNLTTAGFACSQCGQPLFVYKLEQVSEKGKAYTNYFGRCNVAEHEKLIKLAQLKPEKDSDEAVTYSLGKFGQRALDFYSIHVTKESTHPVKPLAQIAGNRYASGPVGKALSDACMGTIASFLSKYQDIIIEHQKVVKGNQKRLESLRELAGKENLEYPSVTLPPQPHTSEGVDAYNEVIARVRMWVNLNLWQKLKLSRDDAKPLLRLKGFPSFPLVERQANEVDWWDMVCNVKKLINEKKEDGKVFWQNLAGYKRQEALRPYLSSEEDRKKGKKFARYQLGDLLLHLEKKHGEDWGKVYDEAWERIDKKVEGLSKHIKLEEERRSEDAQSKAALTDWLRAKASFVIEGLKEADKDEFCRCELKLQKWYGDLRGKPFAIEAENSILDISGFSKQYNCAFIWQKDGVKKLNLYLIINYFKGGKLRFKKIKPEAFEANRFYTVINKKSGEIVPMEVNFNFDDPNLIILPLAFGKRQGREFIWNDLLSLETGSLKLANGRVIEKTLYNRRTRQDEPALFVALTFERREVLDSSNIKPMNLIGVDRGENIPAVIALTDPEGCPLSRFKDSLGNPTHILRIGESYKEKQRTIQAKKEVEQRRAGGYSRKYASKAKNLADDMVRNTARDLLYYAVTQDAMLIFENLSRGFGRQGKRTFMAERQYTRMEDWLTAKLAYEGLPSKTYLSKTLAQYTSKTCSNCGFTITSADYDRVLEKLKKTATGWMTTINGKELKVEGQITYYNRYKRQNVVKDLSVELDRLSEESVNNDISSWTKGRSGEALSLLKKRFSHRPVQEKFVCLNCGFETHADEQAALNIARSWLFLRSQEYKKYQTNKTTGNTDKRAFVETWQSFYRKKLKEVWKPAV

SEQ ID NO: 34098 - protein, 977 aa, synthetic construct
  REGION 1..977: note = engineered CasX variant
QEIKRINKIRRRLVKDSNTKKAGKTGPMKTLLVRVMTPDLRERLENLRKKPENIPQPISNTSQANLNKLLTDYTEMKKAILHVYWEEFQKDPVGLMSRVAQPASKKIDQNKLKPEMDEKGNLTTAGFACSQCGQPLFVYKLEQVSEKGKAYTNYFGRCNVAEHEKLILLAQLKPEKDSDEAVTYSLGKFGQRALDFYSIHVTKESTHPVKPLAQIAGNRYASPVGKALSDACMGTIASFLSKYQDIIIEHQKVVKGNQKRLESLRELAGKENLEYPSVTLPPQPHTSEGVDAYNEVIARVRMWVNLNLWQKLKLSRDDAKPLLRLKGFPSFPLVERQANEVDWWDMVCNVKKLINEKKEDGKVFWQNLAGYKRQEALRPYLSSEEDRKKGKKFARYQLGDLLLHLEKKHGEDWGKVYDEAWERIDKKVEGLSKHIKLEEERRSEDAQSKAALTDWLRAKASFVIEGLKEADKDEFCRCELKLQKWYGDLRGKPFAIEAENSILDISGFSKQYNCAFIWQKDGVKKLNLYLIINYFKGGKLRFKKIKPEAFEANRFYTVINKKSGEIVPMEVNFNFDDPNLIILPLAFGKRQGREFIWNDLLSLETGSLKLANGRVIEKTLYNRRTRQDEPALFVALTFERREVLDSSNIKPMNLIGVDRGENIPAVIALTDPEGCPLSRFKDSLGNPTHILRIGESYKEKQRTIQAKKEVEQRRAGGYSRKYASKAKNLADDMVRNTARDLLYYAVTQDAMLIFENLSRGFGRQGKRTFMAERQYTRMEDWLTAKLAYEGLPSKTYLSKTLAQYTSKTCSNCGFTITSADYDRVLEKLKKTATGWMTTINGKELKVEGQITYYNRYKRQNVVKDLSVELDRLSEESVNNDISSWTKGRSGEALSLLKKRFSHRPVQEKFVCLNCGFETHADEQAALNIARSWLFLRSQEYKKYQTNKTTGNTDKRAFVETWQSFYRKKLKEVWKPAV

SEQ ID NO: 34099 - protein, 978 aa, synthetic construct
  REGION 1..978: note = engineered CasX variant
QEIKRINKIRRRLVKDSNTKKAGKTGPMKTLLVRVMTPDLRERLENLRKKPENIPQPISNTSQANLNKLLTDYTEMKKAILHVYWEEFQKDPVGLMSRVAQPASKKIDQNKLKPEMDEKGNLTTAGFACSQCGQPLFVYKLEQVSEKGKAYTNYFGRCNVAEHEKLILLAQLKPEKDSDEAVTYSLGKFGQRALDFYSIHVTKESTHPVKPLAQIAGNRYASYPVGKALSDACMGTIASFLSKYQDIIIEHQKVVKGNQKRLESLRELAGKENLEYPSVTLPPQPHTKEGLDAYNEVIARVRMWVNLNLWQKLKLSRDDAKPLLRLKGFPSFPLVERQANEVDWWDMVCNVKKLINEKKEDGKVFWQNLAGYKRQEALRPYLSSEEDRKKGKKFARYQLGDLLLHLEKKHGEDWGKVYDEAWERIDKKVEGLSKHIKLEEERRSEDAQSKAALTDWLRAKASFVIEGLKEADKDEFCRCELKLQKWYGDLRGKPFAIEAENSILDISGFSKQYNCAFIWQKDGVKKLNLYLIINYFKGGKLRFKKIKPEAFEANRFYTVINKKSGEIVPMEVNFNFDDPNLIILPLAFGKRQGREFIWNDLLSLETGSLKLANGRVIEKTLYNRRTRQDEPALFVALTFERREVLDSSNIKPMNLIGVDRGENIPAVIALTDPEGCPLSRFKDSLGNPTHILRIGESYKEKQRTIQAKKEVEQRRAGGYSRKYASKAKNLADDMVRNTARDLLYYAVTQDAMLIFENLSRGFGRQGKRTFMAERQYTRMEDWLTAKLAYEGLPSKTYLSKTLAQYTSKTCSNCGFTITSADYDRVLEKLKKTATGWMTTINGKELKVEGQITYYNRYKRQNVVKDLSVELDRLSEESVNNDISSWTKGRSGEALSLLKKRFSHRPVQEKFVCLNCGFETHADEQAALNIARSWLFLRSQEYKKYQTNKTTGNTDKRAFVETWQSFYRKKLKEVWKPAV

SEQ ID NO: 34100 - protein, 978 aa, synthetic construct
  REGION 1..978: note = engineered CasX variant
QEIKRINKIRRRLVKDSNTKKAGKTGPMKTLLVRVMTPDLRERLENLRKKPENIPQPISNTSQANLNKLLTDYTEMKKAILHVYWEEFQKDPVGLMSRVAQPASKKIDQNKLKPEMDEKGNLTTAGFACSQCGQPLFVYKLEQVSEKGKAYTNYFGRCNVAEHEKLILLAQLKPEKDSDEAVTYSLGKFGQRALDFYSIHVTKESTHPVKPLAQIAGNRYASHPVGKALSDACMGTIASFLSKYQDIIIEHQKVVKGNQKRLESLRELAGKENLEYPSVTLPPQPHTKEGLDAYNEVIARVRMWVNLNLWQKLKLSRDDAKPLLRLKGFPSFPLVERQANEVDWWDMVCNVKKLINEKKEDGKVFWQNLAGYKRQEALRPYLSSEEDRKKGKKFARYQLGDLLLHLEKKHGEDWGKVYDEAWERIDKKVEGLSKHIKLEEERRSEDAQSKAALTDWLRAKASFVIEGLKEADKDEFCRCELKLQKWYGDLRGKPFAIEAENSILDISGFSKQYNCAFIWQKDGVKKLNLYLIINYFKGGKLRFKKIKPEAFEANRFYTVINKKSGEIVPMEVNFNFDDPNLIILPLAFGKRQGREFIWNDLLSLETGSLKLANGRVIEKTLYNRRTRQDEPALFVALTFERREVLDSSNIKPMNLIGVDRGENIPAVIALTDPEGCPLSRFKDSLGNPTHILRIGESYKEKQRTIQAKKEVEQRRAGGYSRKYASKAKNLADDMVRNTARDLLYYAVTQDAMLIFENLSRGFGRQGKRTFMAERQYTRMEDWLTAKLAYEGLPSKTYLSKTLAQYTSKTCSNCGFTITSADYDRVLEKLKKTATGWMTTINGKELKVEGQITYYNRYKRQNVVKDLSVELDRLSEESVNNDISSWTKGRSGEALSLLKKRFSHRPVQEKFVCLNCGFETHADEQAALNIARSWLFLRSQEYKKYQTNKTTGNTDKRAFVETWQSFYRKKLKEVWKPAV

SEQ ID NO: 34101 - protein, 978 aa, synthetic construct
  REGION 1..978: note = engineered CasX variant
QEIKRINKIRRRLVKDSNTKKAGKTGPMKTLLVRVMTPDLRERLENLRKKPENIPQPISNTSQANLNKLLTDYTEMKKAILHVYWEEFQKDPVGLMSRVAQPASKKIDQNKLKPEMDEKGNLTTAGFACSQCGQPLFVYKLEQVSEKGKAYTNYFGRCNVAEHEKLILLAQLKPEKDSDEAVTYSLGKFGQRALDFYSIHVTKESTHPVKPLAQIAGNRYASSPVGKALSDACMGTIASFLSKYQDIIIEHQKVVKGNQKRLESLRELAGKENLEYPSVTLPPQPHTKEGLDAYNEVIARVRMWVNLNLWQKLKLSRDDAKPLLRLKGFPSFPLVERQANEVDWWDMVCNVKKLINEKKEDGKVFWQNLAGYKRQEALRPYLSSEEDRKKGKKFARYQLGDLLLHLEKKHGEDWGKVYDEAWERIDKKVEGLSKHIKLEEERRSEDAQSKAALTDWLRAKASFVIEGLKEADKDEFCRCELKLQKWYGDLRGKPFAIEAENSILDISGFSKQYNCAFIWQKDGVKKLNLYLIINYFKGGKLRFKKIKPEAFEANRFYTVINKKSGEIVPMEVNFNFDDPNLIILPLAFGKRQGREFIWNDLLSLETGSLKLANGRVIEKTLYNRRTRQDEPALFVALTFERREVLDSSNIKPMNLIGVDRGENIPAVIALTDPEGCPLSRFKDSLGNPTHILRIGESYKEKQRTIQAKKEVEQRRAGGYSRKYASKAKNLADDMVRNTARDLLYYAVTQDAMLIFENLSRGFGRQGKRTFMAERQYTRMEDWLTAKLAYEGLPSKTYLSKTLAQYTSKTCSNCGFTITSADYDRVLEKLKKTATGWMTTINGKELKVEGQITYYNRYKRQNVVKDLSVELDRLSEESVNNDISSWTKGRSGEALSLLKKRFSHRPVQEKFVCLNCGFETHADEQAALNIARSWLFLRSQEYKKYQTNKTTGNTDKRAFVETWQSFYRKKLKEVWKPAV

SEQ ID NO: 34102 - protein, 978 aa, synthetic construct
  REGION 1..978: note = engineered CasX variant
QEIKRINKIRRRLVKDSNTKKAGKTGPMKTLLVRVMTPDLRERLENLRKKPENIPQPISNTSQANLNKLLTDYTEMKKAILHVYWEEFQKDPVGLMSRVAQPASKKIDQNKLKPEMDEKGNLTTAGFACSQCGQPLFVYKLEQVSEKGKAYTNYFGRCNVAEHEKLILLAQLKPEKDSDEAVTYSLGKFGQRALDFYSIHVTKESTHPVKPLAQIAGNRYASTPVGKALSDACMGTIASFLSKYQDIIIEHQKVVKGNQKRLESLRELAGKENLEYPSVTLPPQPHTKEGLDAYNEVIARVRMWVNLNLWQKLKLSRDDAKPLLRLKGFPSFPLVERQANEVDWWDMVCNVKKLINEKKEDGKVFWQNLAGYKRQEALRPYLSSEEDRKKGKKFARYQLGDLLLHLEKKHGEDWGKVYDEAWERIDKKVEGLSKHIKLEEERRSEDAQSKAALTDWLRAKASFVIEGLKEADKDEFCRCELKLQKWYGDLRGKPFAIEAENSILDISGFSKQYNCAFIWQKDGVKKLNLYLIINYFKGGKLRFKKIKPEAFEANRFYTVINKKSGEIVPMEVNFNFDDPNLIILPLAFGKRQGREFIWNDLLSLETGSLKLANGRVIEKTLYNRRTRQDEPALFVALTFERREVLDSSNIKPMNLIGVDRGENIPAVIALTDPEGCPLSRFKDSLGNPTHILRIGESYKEKQRTIQAKKEVEQRRAGGYSRKYASKAKNLADDMVRNTARDLLYYAVTQDAMLIFENLSRGFGRQGKRTFMAERQYTRMEDWLTAKLAYEGLPSKTYLSKTLAQYTSKTCSNCGFTITSADYDRVLEKLKKTATGWMTTINGKELKVEGQITYYNRYKRQNVVKDLSVELDRLSEESVNNDISSWTKGRSGEALSLLKKRFSHRPVQEKFVCLNCGFETHADEQAALNIARSWLFLRSQEYKKYQTNKTTGNTDKRAFVETWQSFYRKKLKEVWKPAV

SEQ ID NO: 34103 - protein, 978 aa, synthetic construct
  REGION 1..978: note = engineered CasX variant
QEIKRINKIRRRLVKDSNTKKAGKTGPMKTLLVRVMTPDLRERLENLRKKPENIPQPISNTSQANLNKLLTDYTEMKKAILHVYWEEFQKDPVGLMSRVAQPASKKIDQNKLKPEMDEKGNLTTAGFACSQCGQPLFVYKLEQVSEKGKAYTNYFGRCNVAEHEKLILLAQLKPEKDSDEAVTYSLGKFGQRALDFYSIHVTKESTHPVKPLAQIAGNRYASAPVGKALSDACMGTIASFLSKYQDIIIEHQKVVKGNQKRLESLRELAGKENLEYPSVTLPPQPHTKEGLDAYNEVIARVRMWVNLNLWQKLKLSRDDAKPLLRLKGFPSFPLVERQANEVDWWDMVCNVKKLINEKKEDGKVFWQNLAGYKRQEALRPYLSSEEDRKKGKKFARYQLGDLLLHLEKKHGEDWGKVYDEAWERIDKKVEGLSKHIKLEEERRSEDAQSKAALTDWLRAKASFVIEGLKEADKDEFCRCELKLQKWYGDLRGKPFAIEAENSILDISGFSKQYNCAFIWQKDGVKKLNLYLIINYFKGGKLRFKKIKPEAFEANRFYTVINKKSGEIVPMEVNFNFDDPNLIILPLAFGKRQGREFIWNDLLSLETGSLKLANGRVIEKTLYNRRTRQDEPALFVALTFERREVLDSSNIKPMNLIGVDRGENIPAVIALTDPEGCPLSRFKDSLGNPTHILRIGESYKEKQRTIQAKKEVEQRRAGGYSRKYASKAKNLADDMVRNTARDLLYYAVTQDAMLIFENLSRGFGRQGKRTFMAERQYTRMEDWLTAKLAYEGLPSKTYLSKTLAQYTSKTCSNCGFTITSADYDRVLEKLKKTATGWMTTINGKELKVEGQITYYNRYKRQNVVKDLSVELDRLSEESVNNDISSWTKGRSGEALSLLKKRFSHRPVQEKFVCLNCGFETHADEQAALNIARSWLFLRSQEYKKYQTNKTTGNTDKRAFVETWQSFYRKKLKEVWKPAV

SEQ ID NO: 34104 - protein, 978 aa, synthetic construct
  REGION 1..978: note = engineered CasX variant
QEIKRINKIRRRLVKDSNTKKAGKTGPMKTLLVRVMTPDLRERLENLRKKPENIPQPISNTSQANLNKLLTDYTEMKKAILHVYWEEFQKDPVGLMSRVAQPASKKIDQNKLKPEMDEKGNLTTAGFACSQCGQPLFVYKLEQVSEKGKAYTNYFGRCNVAEHEKLILLAQLKPEKDSDEAVTYSLGKFGQRALDFYSIHVTKESTHPVKPLAQIAGNRYASVPVGKALSDACMGTIASFLSKYQDIIIEHQKVVKGNQKRLESLRELAGKENLEYPSVTLPPQPHTKEGLDAYNEVIARVRMWVNLNLWQKLKLSRDDAKPLLRLKGFPSFPLVERQANEVDWWDMVCNVKKLINEKKEDGKVFWQNLAGYKRQEALRPYLSSEEDRKKGKKFARYQLGDLLLHLEKKHGEDWGKVYDEAWERIDKKVEGLSKHIKLEEERRSEDAQSKAALTDWLRAKASFVIEGLKEADKDEFCRCELKLQKWYGDLRGKPFAIEAENSILDISGFSKQYNCAFIWQKDGVKKLNLYLIINYFKGGKLRFKKIKPEAFEANRFYTVINKKSGEIVPMEVNFNFDDPNLIILPLAFGKRQGREFIWNDLLSLETGSLKLANGRVIEKTLYNRRTRQDEPALFVALTFERREVLDSSNIKPMNLIGVDRGENIPAVIALTDPEGCPLSRFKDSLGNPTHILRIGESYKEKQRTIQAKKEVEQRRAGGYSRKYASKAKNLADDMVRNTARDLLYYAVTQDAMLIFENLSRGFGRQGKRTFMAERQYTRMEDWLTAKLAYEGLPSKTYLSKTLAQYTSKTCSNCGFTITSADYDRVLEKLKKTATGWMTTINGKELKVEGQITYYNRYKRQNVVKDLSVELDRLSEESVNNDISSWTKGRSGEALSLLKKRFSHRPVQEKFVCLNCGFETHADEQAALNIARSWLFLRSQEYKKYQTNKTTGNTDKRAFVETWQSFYRKKLKEVWKPAV

SEQ ID NO: 34105 - protein, 978 aa, synthetic construct
  REGION 1..978: note = engineered CasX variant
QEIKRINKIRRRLVKDSNTKKAGKTGPMKTLLVRVMTPDLRERLENLRKKPENIPQPISNTSQANLNKLLTDYTEMKKAILHVYWEEFQKDPVGLMSRVAQPASKKIDQNKLKPEMDEKGNLTTAGFACSQCGQPLFVYKLEQVSEKGKAYTNYFGRCNVAEHEKLIKLAQLKPEKDSDEAVTYSLGKFGQRALDFYSIHVTKESTHPVKPLAQIAGNRYASGPVGKALSDACMGTIASFLSKYQDIIIEHQKVVKGNQKRLESLRELAGKENLEYPSVTLPPQPHTKEGLDAYNEVIARVRMWVNLNLWQKLKLSRDDAKPLLRLKGFPSFPLVERQANEVDWWDMVCNVKKLINEKKEDGKVFWQNLAGYKRQEALRPYLSSEEDRKKGKKFARYQLGDLLLHLEKKHGEDWGKVYDEAWERIDKKVEGLSKHIKLEEERRSEDAQSKAALTDWLRAKASFVIEGLKEADKDEFCRCELKLQKWYGDLRGKPFAIEAENSILDISGFSKQYNCAFIWQKDGVKKLNLYLIINYFKGGKLRFKKIKPEAFEANRFYTVINKKSGEIVPMEVNFNFDDPNLIILPLAFGKRQGREFIWNDLLSLETGSLKLANGRVIEKTLYNRRTRQDEPALFVALTFERREVLDSSNIKPMNLIGVDRGENIPAVIALTDPEGCPLSRFKDSLGNPTHILRIGESYKEKQRTIQAKKEVEQRRAGGYSRKYASKAKNLADDMVRNTARDLLYYAVTQDAMLIFENLSRGFGRQGKRTFMAERQYTRMEDWLTAKLAYEGLPSKTYLSKTLAQYTSKTCSNCGFTITSADYDRVLEKLKKTATGWMTTINGKELKVEGQITYYNRYKRQNVVKDLSVELDRLSEESVNNDISSWTKGRSGEALSLLKKRFSHRPVQEKFVCLNCGFETHADEQAALNIARSWLFLRSQEYKKYQTNKTTGNTDKRAFVETWQSFYRKKLKEVWKPAV

SEQ ID NO: 34106 - protein, 977 aa, synthetic construct
  REGION 1..977: note = engineered CasX variant
QEIKRINKIRRRLVKDSNTKKAGKTGPMKTLLVRVMTPDLRERLENLRKKPENIPQPISNTSQANLNKLLTDYTEMKKAILHVYWEEFQKDPVGLMSRVAQPASKKIDQNKLKPEMDEKGNLTTAGFACSQCGQPLFVYKLEQVSEKGKAYTNYFGRCNVAEHEKLILLAQLKPEKDSDEAVTYSLGKFGQRALDFYSIHVTKESTHPVKPLAQIAGNRYASPVGKALSDACMGTIASFLSKYQDIIIEHQKVVKGNQKRLESLRELAGKENLEYPSVTLPPQPHTKEGLDAYNEVIARVRMWVNLNLWQKLKLSRDDAKPLLRLKGFPSFPLVERQANEVDWWDMVCNVKKLINEKKEDGKVFWQNLAGYKRQEALRPYLSSEEDRKKGKKFARYQLGDLLLHLEKKHGEDWGKVYDEAWERIDKKVEGLSKHIKLEEERRSEDAQSKAALTDWLRAKASFVIEGLKEADKDEFCRCELKLQKWYGDLRGKPFAIEAENSILDISGFSKQYNCAFIWQKDGVKKLNLYLIINYFKGGKLRFKKIKPEAFEANRFYTVINKKSGEIVPMEVNFNFDDPNLIILPLAFGKRQGREFIWNDLLSLETGSLKLANGRVIEKTLYNRRTRQDEPALFVALTFERREVLDSSNIKPMNLIGVDRGENIPAVIALTDPEGCPLSRFKDSLGNPTHILRIGESYKEKQRTIQAKKEVEQRRAGGYSRKYASKAKNLADDMVRNTARDLLYYAVTQDAMLIFENLSRGFGRQGKRTFMAERQYTRMEDWLTAKLAYEGLPSKTYLSKTLAQYTSKTCSNCGFTITSADYDRVLEKLKKTATGWMTTINGKELKVEGQITYYNRYKRQNVVKDLSVELDRLSEESVNNDISSWTKGRSGEALSLLKKRFSHRPVQEKFVCLNCGFETHADEQAALNIARSWLFLRSQEYKKYQTNKTTGNTDKRAFVETWQSFYRKKLKEVWKPAV

SEQ ID NO: 34107 - protein, 978 aa, synthetic construct
  REGION 1..978: note = engineered CasX variant
QEIKRINKIRRRLVKDSNTKKAGKTGPMKTLLVRVMTPDLRERLENLRKKPENIPQPISNTSQANLNKLLTDYTEMKKAILHVYWEEFQKDPVGLMSRVAQPASKKIDQNKLKPEMDEKGNLTTAGFACSQCGQPLFVYKLEQVSEKGKAYTNYFGRCNVAEHEKLILLAQLKPEKDSDEAVTYSLGKFGQRALDFYSIHVTKESTHPVKPLAQIAGNRYASYPVGKALSDACMGTIASFLSKYQDIIIEHQKVVKGNQKRLESLRELAGKENLEYPSVTLPPQPHTKEGVDAYNEVIARVRTWVNLNLWQKLKLSRDDAKPLLRLKGFPSFPLVERQANEVDWWDMVCNVKKLINEKKEDGKVFWQNLAGYKRQEALRPYLSSEEDRKKGKKFARYQLGDLLLHLEKKHGEDWGKVYDEAWERIDKKVEGLSKHIKLEEERRSEDAQSKAALTDWLRAKASFVIEGLKEADKDEFCRCELKLQKWYGDLRGKPFAIEAENSILDISGFSKQYNCAFIWQKDGVKKLNLYLIINYFKGGKLRFKKIKPEAFEANRFYTVINKKSGEIVPMEVNFNFDDPNLIILPLAFGKRQGREFIWNDLLSLETGSLKLANGRVIEKTLYNRRTRQDEPALFVALTFERREVLDSSNIKPMNLIGVDRGENIPAVIALTDPEGCPLSRFKDSLGNPTHILRIGESYKEKQRTIQAKKEVEQRRAGGYSRKYASKAKNLADDMVRNTARDLLYYAVTQDAMLIFENLSRGFGRQGKRTFMAERQYTRMEDWLTAKLAYEGLPSKTYLSKTLAQYTSKTCSNCGFTITSADYDRVLEKLKKTATGWMTTINGKELKVEGQITYYNRYKRQNVVKDLSVELDRLSEESVNNDISSWTKGRSGEALSLLKKRFSHRPVQEKFVCLNCGFETHADEQAALNIARSWLFLRSQEYKKYQTNKTTGNTDKRAFVETWQSFYRKKLKEVWKPAV

SEQ ID NO: 34108 - protein, 978 aa, synthetic construct
  REGION 1..978: note = engineered CasX variant
QEIKRINKIRRRLVKDSNTKKAGKTGPMKTLLVRVMTPDLRERLENLRKKPENIPQPISNTSQANLNKLLTDYTEMKKAILHVYWEEFQKDPVGLMSRVAQPASKKIDQNKLKPEMDEKGNLTTAGFACSQCGQPLFVYKLEQVSEKGKAYTNYFGRCNVAEHEKLILLAQLKPEKDSDEAVTYSLGKFGQRALDFYSIHVTKESTHPVKPLAQIAGNRYASHPVGKALSDACMGTIASFLSKYQDIIIEHQKVVKGNQKRLESLRELAGKENLEYPSVTLPPQPHTKEGVDAYNEVIARVRTWVNLNLWQKLKLSRDDAKPLLRLKGFPSFPLVERQANEVDWWDMVCNVKKLINEKKEDGKVFWQNLAGYKRQEALRPYLSSEEDRKKGKKFARYQLGDLLLHLEKKHGEDWGKVYDEAWERIDKKVEGLSKHIKLEEERRSEDAQSKAALTDWLRAKASFVIEGLKEADKDEFCRCELKLQKWYGDLRGKPFAIEAENSILDISGFSKQYNCAFIWQKDGVKKLNLYLIINYFKGGKLRFKKIKPEAFEANRFYTVINKKSGEIVPMEVNFNFDDPNLIILPLAFGKRQGREFIWNDLLSLETGSLKLANGRVIEKTLYNRRTRQDEPALFVALTFERREVLDSSNIKPMNLIGVDRGENIPAVIALTDPEGCPLSRFKDSLGNPTHILRIGESYKEKQRTIQAKKEVEQRRAGGYSRKYASKAKNLADDMVRNTARDLLYYAVTQDAMLIFENLSRGFGRQGKRTFMAERQYTRMEDWLTAKLAYEGLPSKTYLSKTLAQYTSKTCSNCGFTITSADYDRVLEKLKKTATGWMTTINGKELKVEGQITYYNRYKRQNVVKDLSVELDRLSEESVNNDISSWTKGRSGEALSLLKKRFSHRPVQEKFVCLNCGFETHADEQAALNIARSWLFLRSQEYKKYQTNKTTGNTDKRAFVETWQSFYRKKLKEVWKPAV

SEQ ID NO: 34109 - protein, 978 aa, synthetic construct
  REGION 1..978: note = engineered CasX variant
QEIKRINKIRRRLVKDSNTKKAGKTGPMKTLLVRVMTPDLRERLENLRKKPENIPQPISNTSQANLNKLLTDYTEMKKAILHVYWEEFQKDPVGLMSRVAQPASKKIDQNKLKPEMDEKGNLTTAGFACSQCGQPLFVYKLEQVSEKGKAYTNYFGRCNVAEHEKLILLAQLKPEKDSDEAVTYSLGKFGQRALDFYSIHVTKESTHPVKPLAQIAGNRYASSPVGKALSDACMGTIASFLSKYQDIIIEHQKVVKGNQKRLESLRELAGKENLEYPSVTLPPQPHTKEGVDAYNEVIARVRTWVNLNLWQKLKLSRDDAKPLLRLKGFPSFPLVERQANEVDWWDMVCNVKKLINEKKEDGKVFWQNLAGYKRQEALRPYLSSEEDRKKGKKFARYQLGDLLLHLEKKHGEDWGKVYDEAWERIDKKVEGLSKHIKLEEERRSEDAQSKAALTDWLRAKASFVIEGLKEADKDEFCRCELKLQKWYGDLRGKPFAIEAENSILDISGFSKQYNCAFIWQKDGVKKLNLYLIINYFKGGKLRFKKIKPEAFEANRFYTVINKKSGEIVPMEVNFNFDDPNLIILPLAFGKRQGREFIWNDLLSLETGSLKLANGRVIEKTLYNRRTRQDEPALFVALTFERREVLDSSNIKPMNLIGVDRGENIPAVIALTDPEGCPLSRFKDSLGNPTHILRIGESYKEKQRTIQAKKEVEQRRAGGYSRKYASKAKNLADDMVRNTARDLLYYAVTQDAMLIFENLSRGFGRQGKRTFMAERQYTRMEDWLTAKLAYEGLPSKTYLSKTLAQYTSKTCSNCGFTITSADYDRVLEKLKKTATGWMTTINGKELKVEGQITYYNRYKRQNVVKDLSVELDRLSEESVNNDISSWTKGRSGEALSLLKKRFSHRPVQEKFVCLNCGFETHADEQAALNIARSWLFLRSQEYKKYQTNKTTGNTDKRAFVETWQSFYRKKLKEVWKPAV

SEQ ID NO: 34110 - protein, 978 aa, synthetic construct
  REGION 1..978: note = engineered CasX variant
QEIKRINKIRRRLVKDSNTKKAGKTGPMKTLLVRVMTPDLRERLENLRKKPENIPQPISNTSQANLNKLLTDYTEMKKAILHVYWEEFQKDPVGLMSRVAQPASKKIDQNKLKPEMDEKGNLTTAGFACSQCGQPLFVYKLEQVSEKGKAYTNYFGRCNVAEHEKLILLAQLKPEKDSDEAVTYSLGKFGQRALDFYSIHVTKESTHPVKPLAQIAGNRYASTPVGKALSDACMGTIASFLSKYQDIIIEHQKVVKGNQKRLESLRELAGKENLEYPSVTLPPQPHTKEGVDAYNEVIARVRTWVNLNLWQKLKLSRDDAKPLLRLKGFPSFPLVERQANEVDWWDMVCNVKKLINEKKEDGKVFWQNLAGYKRQEALRPYLSSEEDRKKGKKFARYQLGDLLLHLEKKHGEDWGKVYDEAWERIDKKVEGLSKHIKLEEERRSEDAQSKAALTDWLRAKASFVIEGLKEADKDEFCRCELKLQKWYGDLRGKPFAIEAENSILDISGFSKQYNCAFIWQKDGVKKLNLYLIINYFKGGKLRFKKIKPEAFEANRFYTVINKKSGEIVPMEVNFNFDDPNLIILPLAFGKRQGREFIWNDLLSLETGSLKLANGRVIEKTLYNRRTRQDEPALFVALTFERREVLDSSNIKPMNLIGVDRGENIPAVIALTDPEGCPLSRFKDSLGNPTHILRIGESYKEKQRTIQAKKEVEQRRAGGYSRKYASKAKNLADDMVRNTARDLLYYAVTQDAMLIFENLSRGFGRQGKRTFMAERQYTRMEDWLTAKLAYEGLPSKTYLSKTLAQYTSKTCSNCGFTITSADYDRVLEKLKKTATGWMTTINGKELKVEGQITYYNRYKRQNVVKDLSVELDRLSEESVNNDISSWTKGRSGEALSLLKKRFSHRPVQEKFVCLNCGFETHADEQAALNIARSWLFLRSQEYKKYQTNKTTGNTDKRAFVETWQSFYRKKLKEVWKPAV

SEQ ID NO: 34111 - protein, 978 aa, synthetic construct
  REGION 1..978: note = engineered CasX variant
QEIKRINKIRRRLVKDSNTKKAGKTGPMKTLLVRVMTPDLRERLENLRKKPENIPQPISNTSQANLNKLLTDYTEMKKAILHVYWEEFQKDPVGLMSRVAQPASKKIDQNKLKPEMDEKGNLTTAGFACSQCGQPLFVYKLEQVSEKGKAYTNYFGRCNVAEHEKLILLAQLKPEKDSDEAVTYSLGKFGQRALDFYSIHVTKESTHPVKPLAQIAGNRYASAPVGKALSDACMGTIASFLSKYQDIIIEHQKVVKGNQKRLESLRELAGKENLEYPSVTLPPQPHTKEGVDAYNEVIARVRTWVNLNLWQKLKLSRDDAKPLLRLKGFPSFPLVERQANEVDWWDMVCNVKKLINEKKEDGKVFWQNLAGYKRQEALRPYLSSEEDRKKGKKFARYQLGDLLLHLEKKHGEDWGKVYDEAWERIDKKVEGLSKHIKLEEERRSEDAQSKAALTDWLRAKASFVIEGLKEADKDEFCRCELKLQKWYGDLRGKPFAIEAENSILDISGFSKQYNCAFIWQKDGVKKLNLYLIINYFKGGKLRFKKIKPEAFEANRFYTVINKKSGEIVPMEVNFNFDDPNLIILPLAFGKRQGREFIWNDLLSLETGSLKLANGRVIEKTLYNRRTRQDEPALFVALTFERREVLDSSNIKPMNLIGVDRGENIPAVIALTDPEGCPLSRFKDSLGNPTHILRIGESYKEKQRTIQAKKEVEQRRAGGYSRKYASKAKNLADDMVRNTARDLLYYAVTQDAMLIFENLSRGFGRQGKRTFMAERQYTRMEDWLTAKLAYEGLPSKTYLSKTLAQYTSKTCSNCGFTITSADYDRVLEKLKKTATGWMTTINGKELKVEGQITYYNRYKRQNVVKDLSVELDRLSEESVNNDISSWTKGRSGEALSLLKKRFSHRPVQEKFVCLNCGFETHADEQAALNIARSWLFLRSQEYKKYQTNKTTGNTDKRAFVETWQSFYRKKLKEVWKPAV

SEQ ID NO: 34112 - protein, 978 aa, synthetic construct
  REGION 1..978: note = engineered CasX variant
QEIKRINKIRRRLVKDSNTKKAGKTGPMKTLLVRVMTPDLRERLENLRKKPENIPQPISNTSQANLNKLLTDYTEMKKAILHVYWEEFQKDPVGLMSRVAQPASKKIDQNKLKPEMDEKGNLTTAGFACSQCGQPLFVYKLEQVSEKGKAYTNYFGRCNVAEHEKLILLAQLKPEKDSDEAVTYSLGKFGQRALDFYSIHVTKESTHPVKPLAQIAGNRYASVPVGKALSDACMGTIASFLSKYQDIIIEHQKVVKGNQKRLESLRELAGKENLEYPSVTLPPQPHTKEGVDAYNEVIARVRTWVNLNLWQKLKLSRDDAKPLLRLKGFPSFPLVERQANEVDWWDMVCNVKKLINEKKEDGKVFWQNLAGYKRQEALRPYLSSEEDRKKGKKFARYQLGDLLLHLEKKHGEDWGKVYDEAWERIDKKVEGLSKHIKLEEERRSEDAQSKAALTDWLRAKASFVIEGLKEADKDEFCRCELKLQKWYGDLRGKPFAIEAENSILDISGFSKQYNCAFIWQKDGVKKLNLYLIINYFKGGKLRFKKIKPEAFEANRFYTVINKKSGEIVPMEVNFNFDDPNLIILPLAFGKRQGREFIWNDLLSLETGSLKLANGRVIEKTLYNRRTRQDEPALFVALTFERREVLDSSNIKPMNLIGVDRGENIPAVIALTDPEGCPLSRFKDSLGNPTHILRIGESYKEKQRTIQAKKEVEQRRAGGYSRKYASKAKNLADDMVRNTARDLLYYAVTQDAMLIFENLSRGFGRQGKRTFMAERQYTRMEDWLTAKLAYEGLPSKTYLSKTLAQYTSKTCSNCGFTITSADYDRVLEKLKKTATGWMTTINGKELKVEGQITYYNRYKRQNVVKDLSVELDRLSEESVNNDISSWTKGRSGEALSLLKKRFSHRPVQEKFVCLNCGFETHADEQAALNIARSWLFLRSQEYKKYQTNKTTGNTDKRAFVETWQSFYRKKLKEVWKPAV

SEQ ID NO: 34113 - protein, 978 aa, synthetic construct
  REGION 1..978: note = engineered CasX variant
QEIKRINKIRRRLVKDSNTKKAGKTGPMKTLLVRVMTPDLRERLENLRKKPENIPQPISNTSQANLNKLLTDYTEMKKAILHVYWEEFQKDPVGLMSRVAQPASKKIDQNKLKPEMDEKGNLTTAGFACSQCGQPLFVYKLEQVSEKGKAYTNYFGRCNVAEHEKLIKLAQLKPEKDSDEAVTYSLGKFGQRALDFYSIHVTKESTHPVKPLAQIAGNRYASGPVGKALSDACMGTIASFLSKYQDIIIEHQKVVKGNQKRLESLRELAGKENLEYPSVTLPPQPHTKEGVDAYNEVIARVRTWVNLNLWQKLKLSRDDAKPLLRLKGFPSFPLVERQANEVDWWDMVCNVKKLINEKKEDGKVFWQNLAGYKRQEALRPYLSSEEDRKKGKKFARYQLGDLLLHLEKKHGEDWGKVYDEAWERIDKKVEGLSKHIKLEEERRSEDAQSKAALTDWLRAKASFVIEGLKEADKDEFCRCELKLQKWYGDLRGKPFAIEAENSILDISGFSKQYNCAFIWQKDGVKKLNLYLIINYFKGGKLRFKKIKPEAFEANRFYTVINKKSGEIVPMEVNFNFDDPNLIILPLAFGKRQGREFIWNDLLSLETGSLKLANGRVIEKTLYNRRTRQDEPALFVALTFERREVLDSSNIKPMNLIGVDRGENIPAVIALTDPEGCPLSRFKDSLGNPTHILRIGESYKEKQRTIQAKKEVEQRRAGGYSRKYASKAKNLADDMVRNTARDLLYYAVTQDAMLIFENLSRGFGRQGKRTFMAERQYTRMEDWLTAKLAYEGLPSKTYLSKTLAQYTSKTCSNCGFTITSADYDRVLEKLKKTATGWMTTINGKELKVEGQITYYNRYKRQNVVKDLSVELDRLSEESVNNDISSWTKGRSGEALSLLKKRFSHRPVQEKFVCLNCGFETHADEQAALNIARSWLFLRSQEYKKYQTNKTTGNTDKRAFVETWQSFYRKKLKEVWKPAV

SEQ ID NO: 34114 - protein, 977 aa, synthetic construct
  REGION 1..977: note = engineered CasX variant
QEIKRINKIRRRLVKDSNTKKAGKTGPMKTLLVRVMTPDLRERLENLRKKPENIPQPISNTSQANLNKLLTDYTEMKKAILHVYWEEFQKDPVGLMSRVAQPASKKIDQNKLKPEMDEKGNLTTAGFACSQCGQPLFVYKLEQVSEKGKAYTNYFGRCNVAEHEKLILLAQLKPEKDSDEAVTYSLGKFGQRALDFYSIHVTKESTHPVKPLAQIAGNRYASPVGKALSDACMGTIASFLSKYQDIIIEHQKVVKGNQKRLESLRELAGKENLEYPSVTLPPQPHTKEGVDAYNEVIARVRTWVNLNLWQKLKLSRDDAKPLLRLKGFPSFPLVERQANEVDWWDMVCNVKKLINEKKEDGKVFWQNLAGYKRQEALRPYLSSEEDRKKGKKFARYQLGDLLLHLEKKHGEDWGKVYDEAWERIDKKVEGLSKHIKLEEERRSEDAQSKAALTDWLRAKASFVIEGLKEADKDEFCRCELKLQKWYGDLRGKPFAIEAENSILDISGFSKQYNCAFIWQKDGVKKLNLYLIINYFKGGKLRFKKIKPEAFEANRFYTVINKKSGEIVPMEVNFNFDDPNLIILPLAFGKRQGREFIWNDLLSLETGSLKLANGRVIEKTLYNRRTRQDEPALFVALTFERREVLDSSNIKPMNLIGVDRGENIPAVIALTDPEGCPLSRFKDSLGNPTHILRIGESYKEKQRTIQAKKEVEQRRAGGYSRKYASKAKNLADDMVRNTARDLLYYAVTQDAMLIFENLSRGFGRQGKRTFMAERQYTRMEDWLTAKLAYEGLPSKTYLSKTLAQYTSKTCSNCGFTITSADYDRVLEKLKKTATGWMTTINGKELKVEGQITYYNRYKRQNVVKDLSVELDRLSEESVNNDISSWTKGRSGEALSLLKKRFSHRPVQEKFVCLNCGFETHADEQAALNIARSWLFLRSQEYKKYQTNKTTGNTDKRAFVETWQSFYRKKLKEVWKPAV

SEQ ID NO: 34115 - protein, 978 aa, synthetic construct
  REGION 1..978: note = engineered CasX variant
QEIKRINKIRRRLVKDSNTKKAGKTGPMKTLLVRVMTPDLRERLENLRKKPENIPQPISNTSQANLNKLLTDYTEMKKAILHVYWEEFQKDPVGLMSRVAQPASKKIDQNKLKPEMDEKGNLTTAGFACSQCGQPLFVYKLEQVSEKGKAYTNYFGRCNVAEHEKLILLAQLKPEKDSDEAVTYSLGKFGQRALDFYSIHVTKESTHPVKPLAQIAGNRYASYPVGKALSDACMGTIASFLSKYQDIIIEHQKVVKGNQKRLESLRELAGKENLEYPSVTLPPQPHTKEGVDAYNEVIARVRWWVNLNLWQKLKLSRDDAKPLLRLKGFPSFPLVERQANEVDWWDMVCNVKKLINEKKEDGKVFWQNLAGYKRQEALRPYLSSEEDRKKGKKFARYQLGDLLLHLEKKHGEDWGKVYDEAWERIDKKVEGLSKHIKLEEERRSEDAQSKAALTDWLRAKASFVIEGLKEADKDEFCRCELKLQKWYGDLRGKPFAIEAENSILDISGFSKQYNCAFIWQKDGVKKLNLYLIINYFKGGKLRFKKIKPEAFEANRFYTVINKKSGEIVPMEVNFNFDDPNLIILPLAFGKRQGREFIWNDLLSLETGSLKLANGRVIEKTLYNRRTRQDEPALFVALTFERREVLDSSNIKPMNLIGVDRGENIPAVIALTDPEGCPLSRFKDSLGNPTHILRIGESYKEKQRTIQAKKEVEQRRAGGYSRKYASKAKNLADDMVRNTARDLLYYAVTQDAMLIFENLSRGFGRQGKRTFMAERQYTRMEDWLTAKLAYEGLPSKTYLSKTLAQYTSKTCSNCGFTITSADYDRVLEKLKKTATGWMTTINGKELKVEGQITYYNRYKRQNVVKDLSVELDRLSEESVNNDISSWTKGRSGEALSLLKKRFSHRPVQEKFVCLNCGFETHADEQAALNIARSWLFLRSQEYKKYQTNKTTGNTDKRAFVETWQSFYRKKLKEVWKPAV

SEQ ID NO: 34116 - protein, 978 aa, synthetic construct
  REGION 1..978: note = engineered CasX variant
QEIKRINKIRRRLVKDSNTKKAGKTGPMKTLLVRVMTPDLRERLENLRKKPENIPQPISNTSQANLNKLLTDYTEMKKAILHVYWEEFQKDPVGLMSRVAQPASKKIDQNKLKPEMDEKGNLTTAGFACSQCGQPLFVYKLEQVSEKGKAYTNYFGRCNVAEHEKLILLAQLKPEKDSDEAVTYSLGKFGQRALDFYSIHVTKESTHPVKPLAQIAGNRYASHPVGKALSDACMGTIASFLSKYQDIIIEHQKVVKGNQKRLESLRELAGKENLEYPSVTLPPQPHTKEGVDAYNEVIARVRWWVNLNLWQKLKLSRDDAKPLLRLKGFPSFPLVERQANEVDWWDMVCNVKKLINEKKEDGKVFWQNLAGYKRQEALRPYLSSEEDRKKGKKFARYQLGDLLLHLEKKHGEDWGKVYDEAWERIDKKVEGLSKHIKLEEERRSEDAQSKAALTDWLRAKASFVIEGLKEADKDEFCRCELKLQKWYGDLRGKPFAIEAENSILDISGFSKQYNCAFIWQKDGVKKLNLYLIINYFKGGKLRFKKIKPEAFEANRFYTVINKKSGEIVPMEVNFNFDDPNLIILPLAFGKRQGREFIWNDLLSLETGSLKLANGRVIEKTLYNRRTRQDEPALFVALTFERREVLDSSNIKPMNLIGVDRGENIPAVIALTDPEGCPLSRFKDSLGNPTHILRIGESYKEKQRTIQAKKEVEQRRAGGYSRKYASKAKNLADDMVRNTARDLLYYAVTQDAMLIFENLSRGFGRQGKRTFMAERQYTRMEDWLTAKLAYEGLPSKTYLSKTLAQYTSKTCSNCGFTITSADYDRVLEKLKKTATGWMTTINGKELKVEGQITYYNRYKRQNVVKDLSVELDRLSEESVNNDISSWTKGRSGEALSLLKKRFSHRPVQEKFVCLNCGFETHADEQAALNIARSWLFLRSQEYKKYQTNKTTGNTDKRAFVETWQSFYRKKLKEVWKPAV

SEQ ID NO: 34117 - protein, 978 aa, synthetic construct
  REGION 1..978: note = engineered CasX variant
QEIKRINKIRRRLVKDSNTKKAGKTGPMKTLLVRVMTPDLRERLENLRKKPENIPQPISNTSQANLNKLLTDYTEMKKAILHVYWEEFQKDPVGLMSRVAQPASKKIDQNKLKPEMDEKGNLTTAGFACSQCGQPLFVYKLEQVSEKGKAYTNYFGRCNVAEHEKLILLAQLKPEKDSDEAVTYSLGKFGQRALDFYSIHVTKESTHPVKPLAQIAGNRYASSPVGKALSDACMGTIASFLSKYQDIIIEHQKVVKGNQKRLESLRELAGKENLEYPSVTLPPQPHTKEGVDAYNEVIARVRWWVNLNLWQKLKLSRDDAKPLLRLKGFPSFPLVERQANEVDWWDMVCNVKKLINEKKEDGKVFWQNLAGYKRQEALRPYLSSEEDRKKGKKFARYQLGDLLLHLEKKHGEDWGKVYDEAWERIDKKVEGLSKHIKLEEERRSEDAQSKAALTDWLRAKASFVIEGLKEADKDEFCRCELKLQKWYGDLRGKPFAIEAENSILDISGFSKQYNCAFIWQKDGVKKLNLYLIINYFKGGKLRFKKIKPEAFEANRFYTVINKKSGEIVPMEVNFNFDDPNLIILPLAFGKRQGREFIWNDLLSLETGSLKLANGRVIEKTLYNRRTRQDEPALFVALTFERREVLDSSNIKPMNLIGVDRGENIPAVIALTDPEGCPLSRFKDSLGNPTHILRIGESYKEKQRTIQAKKEVEQRRAGGYSRKYASKAKNLADDMVRNTARDLLYYAVTQDAMLIFENLSRGFGRQGKRTFMAERQYTRMEDWLTAKLAYEGLPSKTYLSKTLAQYTSKTCSNCGFTITSADYDRVLEKLKKTATGWMTTINGKELKVEGQITYYNRYKRQNVVKDLSVELDRLSEESVNNDISSWTKGRSGEALSLLKKRFSHRPVQEKFVCLNCGFETHADEQAALNIARSWLFLRSQEYKKYQTNKTTGNTDKRAFVETWQSFYRKKLKEVWKPAV

SEQ ID NO: 34118 - protein, 978 aa, synthetic construct
  REGION 1..978: note = engineered CasX variant
QEIKRINKIRRRLVKDSNTKKAGKTGPMKTLLVRVMTPDLRERLENLRKKPENIPQPISNTSQANLNKLLTDYTEMKKAILHVYWEEFQKDPVGLMSRVAQPASKKIDQNKLKPEMDEKGNLTTAGFACSQCGQPLFVYKLEQVSEKGKAYTNYFGRCNVAEHEKLILLAQLKPEKDSDEAVTYSLGKFGQRALDFYSIHVTKESTHPVKPLAQIAGNRYASTPVGKALSDACMGTIASFLSKYQDIIIEHQKVVKGNQKRLESLRELAGKENLEYPSVTLPPQPHTKEGVDAYNEVIARVRWWVNLNLWQKLKLSRDDAKPLLRLKGFPSFPLVERQANEVDWWDMVCNVKKLINEKKEDGKVFWQNLAGYKRQEALRPYLSSEEDRKKGKKFARYQLGDLLLHLEKKHGEDWGKVYDEAWERIDKKVEGLSKHIKLEEERRSEDAQSKAALTDWLRAKASFVIEGLKEADKDEFCRCELKLQKWYGDLRGKPFAIEAENSILDISGFSKQYNCAFIWQKDGVKKLNLYLIINYFKGGKLRFKKIKPEAFEANRFYTVINKKSGEIVPMEVNFNFDDPNLIILPLAFGKRQGREFIWNDLLSLETGSLKLANGRVIEKTLYNRRTRQDEPALFVALTFERREVLDSSNIKPMNLIGVDRGENIPAVIALTDPEGCPLSRFKDSLGNPTHILRIGESYKEKQRTIQAKKEVEQRRAGGYSRKYASKAKNLADDMVRNTARDLLYYAVTQDAMLIFENLSRGFGRQGKRTFMAERQYTRMEDWLTAKLAYEGLPSKTYLSKTLAQYTSKTCSNCGFTITSADYDRVLEKLKKTATGWMTTINGKELKVEGQITYYNRYKRQNVVKDLSVELDRLSEESVNNDISSWTKGRSGEALSLLKKRFSHRPVQEKFVCLNCGFETHADEQAALNIARSWLFLRSQEYKKYQTNKTTGNTDKRAFVETWQSFYRKKLKEVWKPAV

SEQ ID NO: 34119 - protein, 978 aa, synthetic construct
  REGION 1..978: note = engineered CasX variant
QEIKRINKIRRRLVKDSNTKKAGKTGPMKTLLVRVMTPDLRERLENLRKKPENIPQPISNTSQANLNKLLTDYTEMKKAILHVYWEEFQKDPVGLMSRVAQPASKKIDQNKLKPEMDEKGNLTTAGFACSQCGQPLFVYKLEQVSEKGKAYTNYFGRCNVAEHEKLILLAQLKPEKDSDEAVTYSLGKFGQRALDFYSIHVTKESTHPVKPLAQIAGNRYASAPVGKALSDACMGTIASFLSKYQDIIIEHQKVVKGNQKRLESLRELAGKENLEYPSVTLPPQPHTKEGVDAYNEVIARVRWWVNLNLWQKLKLSRDDAKPLLRLKGFPSFPLVERQANEVDWWDMVCNVKKLINEKKEDGKVFWQNLAGYKRQEALRPYLSSEEDRKKGKKFARYQLGDLLLHLEKKHGEDWGKVYDEAWERIDKKVEGLSKHIKLEEERRSEDAQSKAALTDWLRAKASFVIEGLKEADKDEFCRCELKLQKWYGDLRGKPFAIEAENSILDISGFSKQYNCAFIWQKDGVKKLNLYLIINYFKGGKLRFKKIKPEAFEANRFYTVINKKSGEIVPMEVNFNFDDPNLIILPLAFGKRQGREFIWNDLLSLETGSLKLANGRVIEKTLYNRRTRQDEPALFVALTFERREVLDSSNIKPMNLIGVDRGENIPAVIALTDPEGCPLSRFKDSLGNPTHILRIGESYKEKQRTIQAKKEVEQRRAGGYSRKYASKAKNLADDMVRNTARDLLYYAVTQDAMLIFENLSRGFGRQGKRTFMAERQYTRMEDWLTAKLAYEGLPSKTYLSKTLAQYTSKTCSNCGFTITSADYDRVLEKLKKTATGWMTTINGKELKVEGQITYYNRYKRQNVVKDLSVELDRLSEESVNNDISSWTKGRSGEALSLLKKRFSHRPVQEKFVCLNCGFETHADEQAALNIARSWLFLRSQEYKKYQTNKTTGNTDKRAFVETWQSFYRKKLKEVWKPAV

SEQ ID NO: 34120 - protein, 978 aa, synthetic construct
  REGION 1..978: note = engineered CasX variant
QEIKRINKIRRRLVKDSNTKKAGKTGPMKTLLVRVMTPDLRERLENLRKKPENIPQPISNTSQANLNKLLTDYTEMKKAILHVYWEEFQKDPVGLMSRVAQPASKKIDQNKLKPEMDEKGNLTTAGFACSQCGQPLFVYKLEQVSEKGKAYTNYFGRCNVAEHEKLILLAQLKPEKDSDEAVTYSLGKFGQRALDFYSIHVTKESTHPVKPLAQIAGNRYASVPVGKALSDACMGTIASFLSKYQDIIIEHQKVVKGNQKRLESLRELAGKENLEYPSVTLPPQPHTKEGVDAYNEVIARVRWWVNLNLWQKLKLSRDDAKPLLRLKGFPSFPLVERQANEVDWWDMVCNVKKLINEKKEDGKVFWQNLAGYKRQEALRPYLSSEEDRKKGKKFARYQLGDLLLHLEKKHGEDWGKVYDEAWERIDKKVEGLSKHIKLEEERRSEDAQSKAALTDWLRAKASFVIEGLKEADKDEFCRCELKLQKWYGDLRGKPFAIEAENSILDISGFSKQYNCAFIWQKDGVKKLNLYLIINYFKGGKLRFKKIKPEAFEANRFYTVINKKSGEIVPMEVNFNFDDPNLIILPLAFGKRQGREFIWNDLLSLETGSLKLANGRVIEKTLYNRRTRQDEPALFVALTFERREVLDSSNIKPMNLIGVDRGENIPAVIALTDPEGCPLSRFKDSLGNPTHILRIGESYKEKQRTIQAKKEVEQRRAGGYSRKYASKAKNLADDMVRNTARDLLYYAVTQDAMLIFENLSRGFGRQGKRTFMAERQYTRMEDWLTAKLAYEGLPSKTYLSKTLAQYTSKTCSNCGFTITSADYDRVLEKLKKTATGWMTTINGKELKVEGQITYYNRYKRQNVVKDLSVELDRLSEESVNNDISSWTKGRSGEALSLLKKRFSHRPVQEKFVCLNCGFETHADEQAALNIARSWLFLRSQEYKKYQTNKTTGNTDKRAFVETWQSFYRKKLKEVWKPAV

SEQ ID NO: 34121 - protein, 978 aa, synthetic construct
  REGION 1..978: note = engineered CasX variant
QEIKRINKIRRRLVKDSNTKKAGKTGPMKTLLVRVMTPDLRERLENLRKKPENIPQPISNTSQANLNKLLTDYTEMKKAILHVYWEEFQKDPVGLMSRVAQPASKKIDQNKLKPEMDEKGNLTTAGFACSQCGQPLFVYKLEQVSEKGKAYTNYFGRCNVAEHEKLIKLAQLKPEKDSDEAVTYSLGKFGQRALDFYSIHVTKESTHPVKPLAQIAGNRYASGPVGKALSDACMGTIASFLSKYQDIIIEHQKVVKGNQKRLESLRELAGKENLEYPSVTLPPQPHTKEGVDAYNEVIARVRWWVNLNLWQKLKLSRDDAKPLLRLKGFPSFPLVERQANEVDWWDMVCNVKKLINEKKEDGKVFWQNLAGYKRQEALRPYLSSEEDRKKGKKFARYQLGDLLLHLEKKHGEDWGKVYDEAWERIDKKVEGLSKHIKLEEERRSEDAQSKAALTDWLRAKASFVIEGLKEADKDEFCRCELKLQKWYGDLRGKPFAIEAENSILDISGFSKQYNCAFIWQKDGVKKLNLYLIINYFKGGKLRFKKIKPEAFEANRFYTVINKKSGEIVPMEVNFNFDDPNLIILPLAFGKRQGREFIWNDLLSLETGSLKLANGRVIEKTLYNRRTRQDEPALFVALTFERREVLDSSNIKPMNLIGVDRGENIPAVIALTDPEGCPLSRFKDSLGNPTHILRIGESYKEKQRTIQAKKEVEQRRAGGYSRKYASKAKNLADDMVRNTARDLLYYAVTQDAMLIFENLSRGFGRQGKRTFMAERQYTRMEDWLTAKLAYEGLPSKTYLSKTLAQYTSKTCSNCGFTITSADYDRVLEKLKKTATGWMTTINGKELKVEGQITYYNRYKRQNVVKDLSVELDRLSEESVNNDISSWTKGRSGEALSLLKKRFSHRPVQEKFVCLNCGFETHADEQAALNIARSWLFLRSQEYKKYQTNKTTGNTDKRAFVETWQSFYRKKLKEVWKPAV

SEQ ID NO: 34122 - protein, 977 aa, synthetic construct
  REGION 1..977: note = engineered CasX variant
QEIKRINKIRRRLVKDSNTKKAGKTGPMKTLLVRVMTPDLRERLENLRKKPENIPQPISNTSQANLNKLLTDYTEMKKAILHVYWEEFQKDPVGLMSRVAQPASKKIDQNKLKPEMDEKGNLTTAGFACSQCGQPLFVYKLEQVSEKGKAYTNYFGRCNVAEHEKLILLAQLKPEKDSDEAVTYSLGKFGQRALDFYSIHVTKESTHPVKPLAQIAGNRYASPVGKALSDACMGTIASFLSKYQDIIIEHQKVVKGNQKRLESLRELAGKENLEYPSVTLPPQPHTKEGVDAYNEVIARVRWWVNLNLWQKLKLSRDDAKPLLRLKGFPSFPLVERQANEVDWWDMVCNVKKLINEKKEDGKVFWQNLAGYKRQEALRPYLSSEEDRKKGKKFARYQLGDLLLHLEKKHGEDWGKVYDEAWERIDKKVEGLSKHIKLEEERRSEDAQSKAALTDWLRAKASFVIEGLKEADKDEFCRCELKLQKWYGDLRGKPFAIEAENSILDISGFSKQYNCAFIWQKDGVKKLNLYLIINYFKGGKLRFKKIKPEAFEANRFYTVINKKSGEIVPMEVNFNFDDPNLIILPLAFGKRQGREFIWNDLLSLETGSLKLANGRVIEKTLYNRRTRQDEPALFVALTFERREVLDSSNIKPMNLIGVDRGENIPAVIALTDPEGCPLSRFKDSLGNPTHILRIGESYKEKQRTIQAKKEVEQRRAGGYSRKYASKAKNLADDMVRNTARDLLYYAVTQDAMLIFENLSRGFGRQGKRTFMAERQYTRMEDWLTAKLAYEGLPSKTYLSKTLAQYTSKTCSNCGFTITSADYDRVLEKLKKTATGWMTTINGKELKVEGQITYYNRYKRQNVVKDLSVELDRLSEESVNNDISSWTKGRSGEALSLLKKRFSHRPVQEKFVCLNCGFETHADEQAALNIARSWLFLRSQEYKKYQTNKTTGNTDKRAFVETWQSFYRKKLKEVWKPAV

SEQ ID NO: 34123 - protein, 979 aa, synthetic construct
  REGION 1..979: note = engineered CasX variant
QEIKRINKIRRRLVKDSNTKKAGKTGPMKTLLVRVMTPDLRERLENLRKKPENIPQPISNTSQANLNKLLTDYTEMKKAILHVYWEEFQKDPVGLMSRVAQPASKKIDQNKLKPEMDEKGNLTTAGFACSQCGQPLFVYKLEQVSEKGKAYTNYFGRCNVAEHEKLILLAQLKPEKDSDEAVTYSLGKFGQRALDFYSIHVTKESTHPVKPLAQIAGNRYASYPVGKALSDACMGTIASFLSKYQDIIIEHQKVVKGNQKRLESLRELAGKENLEYPSVTLPPQPHTKEGVDAYNEVIARVRMWVNLNLWQKLKLSRDDAKPLLRLKGFPSFPLVERQQANEVDWWDMVCNVKKLINEKKEDGKVFWQNLAGYKRQEALRPYLSSEEDRKKGKKFARYQLGDLLLHLEKKHGEDWGKVYDEAWERIDKKVEGLSKHIKLEEERRSEDAQSKAALTDWLRAKASFVIEGLKEADKDEFCRCELKLQKWYGDLRGKPFAIEAENSILDISGFSKQYNCAFIWQKDGVKKLNLYLIINYFKGGKLRFKKIKPEAFEANRFYTVINKKSGEIVPMEVNFNFDDPNLIILPLAFGKRQGREFIWNDLLSLETGSLKLANGRVIEKTLYNRRTRQDEPALFVALTFERREVLDSSNIKPMNLIGVDRGENIPAVIALTDPEGCPLSRFKDSLGNPTHILRIGESYKEKQRTIQAKKEVEQRRAGGYSRKYASKAKNLADDMVRNTARDLLYYAVTQDAMLIFENLSRGFGRQGKRTFMAERQYTRMEDWLTAKLAYEGLPSKTYLSKTLAQYTSKTCSNCGFTITSADYDRVLEKLKKTATGWMTTINGKELKVEGQITYYNRYKRQNVVKDLSVELDRLSEESVNNDISSWTKGRSGEALSLLKKRFSHRPVQEKFVCLNCGFETHADEQAALNIARSWLFLRSQEYKKYQTNKTTGNTDKRAFVETWQSFYRKKLKEVWKPAV

SEQ ID NO: 34124 - protein, 979 aa, synthetic construct
  REGION 1..979: note = engineered CasX variant
QEIKRINKIRRRLVKDSNTKKAGKTGPMKTLLVRVMTPDLRERLENLRKKPENIPQPISNTSQANLNKLLTDYTEMKKAILHVYWEEFQKDPVGLMSRVAQPASKKIDQNKLKPEMDEKGNLTTAGFACSQCGQPLFVYKLEQVSEKGKAYTNYFGRCNVAEHEKLILLAQLKPEKDSDEAVTYSLGKFGQRALDFYSIHVTKESTHPVKPLAQIAGNRYASHPVGKALSDACMGTIASFLSKYQDIIIEHQKVVKGNQKRLESLRELAGKENLEYPSVTLPPQPHTKEGVDAYNEVIARVRMWVNLNLWQKLKLSRDDAKPLLRLKGFPSFPLVERQQANEVDWWDMVCNVKKLINEKKEDGKVFWQNLAGYKRQEALRPYLSSEEDRKKGKKFARYQLGDLLLHLEKKHGEDWGKVYDEAWERIDKKVEGLSKHIKLEEERRSEDAQSKAALTDWLRAKASFVIEGLKEADKDEFCRCELKLQKWYGDLRGKPFAIEAENSILDISGFSKQYNCAFIWQKDGVKKLNLYLIINYFKGGKLRFKKIKPEAFEANRFYTVINKKSGEIVPMEVNFNFDDPNLIILPLAFGKRQGREFIWNDLLSLETGSLKLANGRVIEKTLYNRRTRQDEPALFVALTFERREVLDSSNIKPMNLIGVDRGENIPAVIALTDPEGCPLSRFKDSLGNPTHILRIGESYKEKQRTIQAKKEVEQRRAGGYSRKYASKAKNLADDMVRNTARDLLYYAVTQDAMLIFENLSRGFGRQGKRTFMAERQYTRMEDWLTAKLAYEGLPSKTYLSKTLAQYTSKTCSNCGFTITSADYDRVLEKLKKTATGWMTTINGKELKVEGQITYYNRYKRQNVVKDLSVELDRLSEESVNNDISSWTKGRSGEALSLLKKRFSHRPVQEKFVCLNCGFETHADEQAALNIARSWLFLRSQEYKKYQTNKTTGNTDKRAFVETWQSFYRKKLKEVWKPAV

SEQ ID NO: 34125 - protein, 979 aa, synthetic construct
  REGION 1..979: note = engineered CasX variant
QEIKRINKIRRRLVKDSNTKKAGKTGPMKTLLVRVMTPDLRERLENLRKKPENIPQPISNTSQANLNKLLTDYTEMKKAILHVYWEEFQKDPVGLMSRVAQPASKKIDQNKLKPEMDEKGNLTTAGFACSQCGQPLFVYKLEQVSEKGKAYTNYFGRCNVAEHEKLILLAQLKPEKDSDEAVTYSLGKFGQRALDFYSIHVTKESTHPVKPLAQIAGNRYASSPVGKALSDACMGTIASFLSKYQDIIIEHQKVVKGNQKRLESLRELAGKENLEYPSVTLPPQPHTKEGVDAYNEVIARVRMWVNLNLWQKLKLSRDDAKPLLRLKGFPSFPLVERQQANEVDWWDMVCNVKKLINEKKEDGKVFWQNLAGYKRQEALRPYLSSEEDRKKGKKFARYQLGDLLLHLEKKHGEDWGKVYDEAWERIDKKVEGLSKHIKLEEERRSEDAQSKAALTDWLRAKASFVIEGLKEADKDEFCRCELKLQKWYGDLRGKPFAIEAENSILDISGFSKQYNCAFIWQKDGVKKLNLYLIINYFKGGKLRFKKIKPEAFEANRFYTVINKKSGEIVPMEVNFNFDDPNLIILPLAFGKRQGREFIWNDLLSLETGSLKLANGRVIEKTLYNRRTRQDEPALFVALTFERREVLDSSNIKPMNLIGVDRGENIPAVIALTDPEGCPLSRFKDSLGNPTHILRIGESYKEKQRTIQAKKEVEQRRAGGYSRKYASKAKNLADDMVRNTARDLLYYAVTQDAMLIFENLSRGFGRQGKRTFMAERQYTRMEDWLTAKLAYEGLPSKTYLSKTLAQYTSKTCSNCGFTITSADYDRVLEKLKKTATGWMTTINGKELKVEGQITYYNRYKRQNVVKDLSVELDRLSEESVNNDISSWTKGRSGEALSLLKKRFSHRPVQEKFVCLNCGFETHADEQAALNIARSWLFLRSQEYKKYQTNKTTGNTDKRAFVETWQSFYRKKLKEVWKPAV

SEQ ID NO: 34126 - protein, 979 aa, synthetic construct
  REGION 1..979: note = engineered CasX variant
QEIKRINKIRRRLVKDSNTKKAGKTGPMKTLLVRVMTPDLRERLENLRKKPENIPQPISNTSQANLNKLLTDYTEMKKAILHVYWEEFQKDPVGLMSRVAQPASKKIDQNKLKPEMDEKGNLTTAGFACSQCGQPLFVYKLEQVSEKGKAYTNYFGRCNVAEHEKLILLAQLKPEKDSDEAVTYSLGKFGQRALDFYSIHVTKESTHPVKPLAQIAGNRYASTPVGKALSDACMGTIASFLSKYQDIIIEHQKVVKGNQKRLESLRELAGKENLEYPSVTLPPQPHTKEGVDAYNEVIARVRMWVNLNLWQKLKLSRDDAKPLLRLKGFPSFPLVERQQANEVDWWDMVCNVKKLINEKKEDGKVFWQNLAGYKRQEALRPYLSSEEDRKKGKKFARYQLGDLLLHLEKKHGEDWGKVYDEAWERIDKKVEGLSKHIKLEEERRSEDAQSKAALTDWLRAKASFVIEGLKEADKDEFCRCELKLQKWYGDLRGKPFAIEAENSILDISGFSKQYNCAFIWQKDGVKKLNLYLIINYFKGGKLRFKKIKPEAFEANRFYTVINKKSGEIVPMEVNFNFDDPNLIILPLAFGKRQGREFIWNDLLSLETGSLKLANGRVIEKTLYNRRTRQDEPALFVALTFERREVLDSSNIKPMNLIGVDRGENIPAVIALTDPEGCPLSRFKDSLGNPTHILRIGESYKEKQRTIQAKKEVEQRRAGGYSRKYASKAKNLADDMVRNTARDLLYYAVTQDAMLIFENLSRGFGRQGKRTFMAERQYTRMEDWLTAKLAYEGLPSKTYLSKTLAQYTSKTCSNCGFTITSADYDRVLEKLKKTATGWMTTINGKELKVEGQITYYNRYKRQNVVKDLSVELDRLSEESVNNDISSWTKGRSGEALSLLKKRFSHRPVQEKFVCLNCGFETHADEQAALNIARSWLFLRSQEYKKYQTNKTTGNTDKRAFVETWQSFYRKKLKEVWKPAV

SEQ ID NO: 34127 - protein, 979 aa, synthetic construct
  REGION 1..979: note = engineered CasX variant
QEIKRINKIRRRLVKDSNTKKAGKTGPMKTLLVRVMTPDLRERLENLRKKPENIPQPISNTSQANLNKLLTDYTEMKKAILHVYWEEFQKDPVGLMSRVAQPASKKIDQNKLKPEMDEKGNLTTAGFACSQCGQPLFVYKLEQVSEKGKAYTNYFGRCNVAEHEKLILLAQLKPEKDSDEAVTYSLGKFGQRALDFYSIHVTKESTHPVKPLAQIAGNRYASAPVGKALSDACMGTIASFLSKYQDIIIEHQKVVKGNQKRLESLRELAGKENLEYPSVTLPPQPHTKEGVDAYNEVIARVRMWVNLNLWQKLKLSRDDAKPLLRLKGFPSFPLVERQQANEVDWWDMVCNVKKLINEKKEDGKVFWQNLAGYKRQEALRPYLSSEEDRKKGKKFARYQLGDLLLHLEKKHGEDWGKVYDEAWERIDKKVEGLSKHIKLEEERRSEDAQSKAALTDWLRAKASFVIEGLKEADKDEFCRCELKLQKWYGDLRGKPFAIEAENSILDISGFSKQYNCAFIWQKDGVKKLNLYLIINYFKGGKLRFKKIKPEAFEANRFYTVINKKSGEIVPMEVNFNFDDPNLIILPLAFGKRQGREFIWNDLLSLETGSLKLANGRVIEKTLYNRRTRQDEPALFVALTFERREVLDSSNIKPMNLIGVDRGENIPAVIALTDPEGCPLSRFKDSLGNPTHILRIGESYKEKQRTIQAKKEVEQRRAGGYSRKYASKAKNLADDMVRNTARDLLYYAVTQDAMLIFENLSRGFGRQGKRTFMAERQYTRMEDWLTAKLAYEGLPSKTYLSKTLAQYTSKTCSNCGFTITSADYDRVLEKLKKTATGWMTTINGKELKVEGQITYYNRYKRQNVVKDLSVELDRLSEESVNNDISSWTKGRSGEALSLLKKRFSHRPVQEKFVCLNCGFETHADEQAALNIARSWLFLRSQEYKKYQTNKTTGNTDKRAFVETWQSFYRKKLKEVWKPAV

SEQ ID NO: 34128 - protein, 979 aa, synthetic construct
  REGION 1..979: note = engineered CasX variant
QEIKRINKIRRRLVKDSNTKKAGKTGPMKTLLVRVMTPDLRERLENLRKKPENIPQPISNTSQANLNKLLTDYTEMKKAILHVYWEEFQKDPVGLMSRVAQPASKKIDQNKLKPEMDEKGNLTTAGFACSQCGQPLFVYKLEQVSEKGKAYTNYFGRCNVAEHEKLILLAQLKPEKDSDEAVTYSLGKFGQRALDFYSIHVTKESTHPVKPLAQIAGNRYASVPVGKALSDACMGTIASFLSKYQDIIIEHQKVVKGNQKRLESLRELAGKENLEYPSVTLPPQPHTKEGVDAYNEVIARVRMWVNLNLWQKLKLSRDDAKPLLRLKGFPSFPLVERQQANEVDWWDMVCNVKKLINEKKEDGKVFWQNLAGYKRQEALRPYLSSEEDRKKGKKFARYQLGDLLLHLEKKHGEDWGKVYDEAWERIDKKVEGLSKHIKLEEERRSEDAQSKAALTDWLRAKASFVIEGLKEADKDEFCRCELKLQKWYGDLRGKPFAIEAENSILDISGFSKQYNCAFIWQKDGVKKLNLYLIINYFKGGKLRFKKIKPEAFEANRFYTVINKKSGEIVPMEVNFNFDDPNLIILPLAFGKRQGREFIWNDLLSLETGSLKLANGRVIEKTLYNRRTRQDEPALFVALTFERREVLDSSNIKPMNLIGVDRGENIPAVIALTDPEGCPLSRFKDSLGNPTHILRIGESYKEKQRTIQAKKEVEQRRAGGYSRKYASKAKNLADDMVRNTARDLLYYAVTQDAMLIFENLSRGFGRQGKRTFMAERQYTRMEDWLTAKLAYEGLPSKTYLSKTLAQYTSKTCSNCGFTITSADYDRVLEKLKKTATGWMTTINGKELKVEGQITYYNRYKRQNVVKDLSVELDRLSEESVNNDISSWTKGRSGEALSLLKKRFSHRPVQEKFVCLNCGFETHADEQAALNIARSWLFLRSQEYKKYQTNKTTGNTDKRAFVETWQSFYRKKLKEVWKPAV

SEQ ID NO: 34129 - protein, 979 aa, synthetic construct
  REGION 1..979: note = engineered CasX variant
QEIKRINKIRRRLVKDSNTKKAGKTGPMKTLLVRVMTPDLRERLENLRKKPENIPQPISNTSQANLNKLLTDYTEMKKAILHVYWEEFQKDPVGLMSRVAQPASKKIDQNKLKPEMDEKGNLTTAGFACSQCGQPLFVYKLEQVSEKGKAYTNYFGRCNVAEHEKLIKLAQLKPEKDSDEAVTYSLGKFGQRALDFYSIHVTKESTHPVKPLAQIAGNRYASGPVGKALSDACMGTIASFLSKYQDIIIEHQKVVKGNQKRLESLRELAGKENLEYPSVTLPPQPHTKEGVDAYNEVIARVRMWVNLNLWQKLKLSRDDAKPLLRLKGFPSFPLVERQQANEVDWWDMVCNVKKLINEKKEDGKVFWQNLAGYKRQEALRPYLSSEEDRKKGKKFARYQLGDLLLHLEKKHGEDWGKVYDEAWERIDKKVEGLSKHIKLEEERRSEDAQSKAALTDWLRAKASFVIEGLKEADKDEFCRCELKLQKWYGDLRGKPFAIEAENSILDISGFSKQYNCAFIWQKDGVKKLNLYLIINYFKGGKLRFKKIKPEAFEANRFYTVINKKSGEIVPMEVNFNFDDPNLIILPLAFGKRQGREFIWNDLLSLETGSLKLANGRVIEKTLYNRRTRQDEPALFVALTFERREVLDSSNIKPMNLIGVDRGENIPAVIALTDPEGCPLSRFKDSLGNPTHILRIGESYKEKQRTIQAKKEVEQRRAGGYSRKYASKAKNLADDMVRNTARDLLYYAVTQDAMLIFENLSRGFGRQGKRTFMAERQYTRMEDWLTAKLAYEGLPSKTYLSKTLAQYTSKTCSNCGFTITSADYDRVLEKLKKTATGWMTTINGKELKVEGQITYYNRYKRQNVVKDLSVELDRLSEESVNNDISSWTKGRSGEALSLLKKRFSHRPVQEKFVCLNCGFETHADEQAALNIARSWLFLRSQEYKKYQTNKTTGNTDKRAFVETWQSFYRKKLKEVWKPAV

SEQ ID NO: 34130 - protein, 978 aa, synthetic construct
  REGION 1..978: note = engineered CasX variant
QEIKRINKIRRRLVKDSNTKKAGKTGPMKTLLVRVMTPDLRERLENLRKKPENIPQPISNTSQANLNKLLTDYTEMKKAILHVYWEEFQKDPVGLMSRVAQPASKKIDQNKLKPEMDEKGNLTTAGFACSQCGQPLFVYKLEQVSEKGKAYTNYFGRCNVAEHEKLILLAQLKPEKDSDEAVTYSLGKFGQRALDFYSIHVTKESTHPVKPLAQIAGNRYASPVGKALSDACMGTIASFLSKYQDIIIEHQKVVKGNQKRLESLRELAGKENLEYPSVTLPPQPHTKEGVDAYNEVIARVRMWVNLNLWQKLKLSRDDAKPLLRLKGFPSFPLVERQQANEVDWWDMVCNVKKLINEKKEDGKVFWQNLAGYKRQEALRPYLSSEEDRKKGKKFARYQLGDLLLHLEKKHGEDWGKVYDEAWERIDKKVEGLSKHIKLEEERRSEDAQSKAALTDWLRAKASFVIEGLKEADKDEFCRCELKLQKWYGDLRGKPFAIEAENSILDISGFSKQYNCAFIWQKDGVKKLNLYLIINYFKGGKLRFKKIKPEAFEANRFYTVINKKSGEIVPMEVNFNFDDPNLIILPLAFGKRQGREFIWNDLLSLETGSLKLANGRVIEKTLYNRRTRQDEPALFVALTFERREVLDSSNIKPMNLIGVDRGENIPAVIALTDPEGCPLSRFKDSLGNPTHILRIGESYKEKQRTIQAKKEVEQRRAGGYSRKYASKAKNLADDMVRNTARDLLYYAVTQDAMLIFENLSRGFGRQGKRTFMAERQYTRMEDWLTAKLAYEGLPSKTYLSKTLAQYTSKTCSNCGFTITSADYDRVLEKLKKTATGWMTTINGKELKVEGQITYYNRYKRQNVVKDLSVELDRLSEESVNNDISSWTKGRSGEALSLLKKRFSHRPVQEKFVCLNCGFETHADEQAALNIARSWLFLRSQEYKKYQTNKTTGNTDKRAFVETWQSFYRKKLKEVWKPAV

SEQ ID NO: 34131 - protein, 979 aa, synthetic construct
  REGION 1..979: note = engineered CasX variant
QEIKRINKIRRRLVKDSNTKKAGKTGPMKTLLVRVMTPDLRERLENLRKKPENIPQPISNTSQANLNKLLTDYTEMKKAILHVYWEEFQKDPVGLMSRVAQPASKKIDQNKLKPEMDEKGNLTTAGFACSQCGQPLFVYKLEQVSEKGKAYTNYFGRCNVAEHEKLILLAQLKPEKDSDEAVTYSLGKFGQRALDFYSIHVTKESTHPVKPLAQIAGNRYASYPVGKALSDACMGTIASFLSKYQDIIIEHQKVVKGNQKRLESLRELAGKENLEYPSVTLPPQPHTKEGVDAYNEVIARVRMWVNLNLWQKLKLSRDDAKPLLRLKGFPSFPLVERQANAEVDWWDMVCNVKKLINEKKEDGKVFWQNLAGYKRQEALRPYLSSEEDRKKGKKFARYQLGDLLLHLEKKHGEDWGKVYDEAWERIDKKVEGLSKHIKLEEERRSEDAQSKAALTDWLRAKASFVIEGLKEADKDEFCRCELKLQKWYGDLRGKPFAIEAENSILDISGFSKQYNCAFIWQKDGVKKLNLYLIINYFKGGKLRFKKIKPEAFEANRFYTVINKKSGEIVPMEVNFNFDDPNLIILPLAFGKRQGREFIWNDLLSLETGSLKLANGRVIEKTLYNRRTRQDEPALFVALTFERREVLDSSNIKPMNLIGVDRGENIPAVIALTDPEGCPLSRFKDSLGNPTHILRIGESYKEKQRTIQAKKEVEQRRAGGYSRKYASKAKNLADDMVRNTARDLLYYAVTQDAMLIFENLSRGFGRQGKRTFMAERQYTRMEDWLTAKLAYEGLPSKTYLSKTLAQYTSKTCSNCGFTITSADYDRVLEKLKKTATGWMTTINGKELKVEGQITYYNRYKRQNVVKDLSVELDRLSEESVNNDISSWTKGRSGEALSLLKKRFSHRPVQEKFVCLNCGFETHADEQAALNIARSWLFLRSQEYKKYQTNKTTGNTDKRAFVETWQSFYRKKLKEVWKPAV

SEQ ID NO: 34132 - protein, 979 aa, synthetic construct
  REGION 1..979: note = engineered CasX variant
QEIKRINKIRRRLVKDSNTKKAGKTGPMKTLLVRVMTPDLRERLENLRKKPENIPQPISNTSQANLNKLLTDYTEMKKAILHVYWEEFQKDPVGLMSRVAQPASKKIDQNKLKPEMDEKGNLTTAGFACSQCGQPLFVYKLEQVSEKGKAYTNYFGRCNVAEHEKLILLAQLKPEKDSDEAVTYSLGKFGQRALDFYSIHVTKESTHPVKPLAQIAGNRYASHPVGKALSDACMGTIASFLSKYQDIIIEHQKVVKGNQKRLESLRELAGKENLEYPSVTLPPQPHTKEGVDAYNEVIARVRMWVNLNLWQKLKLSRDDAKPLLRLKGFPSFPLVERQANAEVDWWDMVCNVKKLINEKKEDGKVFWQNLAGYKRQEALRPYLSSEEDRKKGKKFARYQLGDLLLHLEKKHGEDWGKVYDEAWERIDKKVEGLSKHIKLEEERRSEDAQSKAALTDWLRAKASFVIEGLKEADKDEFCRCELKLQKWYGDLRGKPFAIEAENSILDISGFSKQYNCAFIWQKDGVKKLNLYLIINYFKGGKLRFKKIKPEAFEANRFYTVINKKSGEIVPMEVNFNFDDPNLIILPLAFGKRQGREFIWNDLLSLETGSLKLANGRVIEKTLYNRRTRQDEPALFVALTFERREVLDSSNIKPMNLIGVDRGENIPAVIALTDPEGCPLSRFKDSLGNPTHILRIGESYKEKQRTIQAKKEVEQRRAGGYSRKYASKAKNLADDMVRNTARDLLYYAVTQDAMLIFENLSRGFGRQGKRTFMAERQYTRMEDWLTAKLAYEGLPSKTYLSKTLAQYTSKTCSNCGFTITSADYDRVLEKLKKTATGWMTTINGKELKVEGQITYYNRYKRQNVVKDLSVELDRLSEESVNNDISSWTKGRSGEALSLLKKRFSHRPVQEKFVCLNCGFETHADEQAALNIARSWLFLRSQEYKKYQTNKTTGNTDKRAFVETWQSFYRKKLKEVWKPAV

SEQ ID NO: 34133 - protein, 979 aa, synthetic construct
  REGION 1..979: note = engineered CasX variant
QEIKRINKIRRRLVKDSNTKKAGKTGPMKTLLVRVMTPDLRERLENLRKKPENIPQPISNTSQANLNKLLTDYTEMKKAILHVYWEEFQKDPVGLMSRVAQPASKKIDQNKLKPEMDEKGNLTTAGFACSQCGQPLFVYKLEQVSEKGKAYTNYFGRCNVAEHEKLILLAQLKPEKDSDEAVTYSLGKFGQRALDFYSIHVTKESTHPVKPLAQIAGNRYASSPVGKALSDACMGTIASFLSKYQDIIIEHQKVVKGNQKRLESLRELAGKENLEYPSVTLPPQPHTKEGVDAYNEVIARVRMWVNLNLWQKLKLSRDDAKPLLRLKGFPSFPLVERQANAEVDWWDMVCNVKKLINEKKEDGKVFWQNLAGYKRQEALRPYLSSEEDRKKGKKFARYQLGDLLLHLEKKHGEDWGKVYDEAWERIDKKVEGLSKHIKLEEERRSEDAQSKAALTDWLRAKASFVIEGLKEADKDEFCRCELKLQKWYGDLRGKPFAIEAENSILDISGFSKQYNCAFIWQKDGVKKLNLYLIINYFKGGKLRFKKIKPEAFEANRFYTVINKKSGEIVPMEVNFNFDDPNLIILPLAFGKRQGREFIWNDLLSLETGSLKLANGRVIEKTLYNRRTRQDEPALFVALTFERREVLDSSNIKPMNLIGVDRGENIPAVIALTDPEGCPLSRFKDSLGNPTHILRIGESYKEKQRTIQAKKEVEQRRAGGYSRKYASKAKNLADDMVRNTARDLLYYAVTQDAMLIFENLSRGFGRQGKRTFMAERQYTRMEDWLTAKLAYEGLPSKTYLSKTLAQYTSKTCSNCGFTITSADYDRVLEKLKKTATGWMTTINGKELKVEGQITYYNRYKRQNVVKDLSVELDRLSEESVNNDISSWTKGRSGEALSLLKKRFSHRPVQEKFVCLNCGFETHADEQAALNIARSWLFLRSQEYKKYQTNKTTGNTDKRAFVETWQSFYRKKLKEVWKPAV

SEQ ID NO: 34134 - protein, 979 aa, synthetic construct
  REGION 1..979: note = engineered CasX variant
QEIKRINKIRRRLVKDSNTKKAGKTGPMKTLLVRVMTPDLRERLENLRKKPENIPQPISNTSQANLNKLLTDYTEMKKAILHVYWEEFQKDPVGLMSRVAQPASKKIDQNKLKPEMDEKGNLTTAGFACSQCGQPLFVYKLEQVSEKGKAYTNYFGRCNVAEHEKLILLAQLKPEKDSDEAVTYSLGKFGQRALDFYSIHVTKESTHPVKPLAQIAGNRYASTPVGKALSDACMGTIASFLSKYQDIIIEHQKVVKGNQKRLESLRELAGKENLEYPSVTLPPQPHTKEGVDAYNEVIARVRMWVNLNLWQKLKLSRDDAKPLLRLKGFPSFPLVERQANAEVDWWDMVCNVKKLINEKKEDGKVFWQNLAGYKRQEALRPYLSSEEDRKKGKKFARYQLGDLLLHLEKKHGEDWGKVYDEAWERIDKKVEGLSKHIKLEEERRSEDAQSKAALTDWLRAKASFVIEGLKEADKDEFCRCELKLQKWYGDLRGKPFAIEAENSILDISGFSKQYNCAFIWQKDGVKKLNLYLIINYFKGGKLRFKKIKPEAFEANRFYTVINKKSGEIVPMEVNFNFDDPNLIILPLAFGKRQGREFIWNDLLSLETGSLKLANGRVIEKTLYNRRTRQDEPALFVALTFERREVLDSSNIKPMNLIGVDRGENIPAVIALTDPEGCPLSRFKDSLGNPTHILRIGESYKEKQRTIQAKKEVEQRRAGGYSRKYASKAKNLADDMVRNTARDLLYYAVTQDAMLIFENLSRGFGRQGKRTFMAERQYTRMEDWLTAKLAYEGLPSKTYLSKTLAQYTSKTCSNCGFTITSADYDRVLEKLKKTATGWMTTINGKELKVEGQITYYNRYKRQNVVKDLSVELDRLSEESVNNDISSWTKGRSGEALSLLKKRFSHRPVQEKFVCLNCGFETHADEQAALNIARSWLFLRSQEYKKYQTNKTTGNTDKRAFVETWQSFYRKKLKEVWKPAV

SEQ ID NO: 34135 - protein, 979 aa, synthetic construct
  REGION 1..979: note = engineered CasX variant
QEIKRINKIRRRLVKDSNTKKAGKTGPMKTLLVRVMTPDLRERLENLRKKPENIPQPISNTSQANLNKLLTDYTEMKKAILHVYWEEFQKDPVGLMSRVAQPASKKIDQNKLKPEMDEKGNLTTAGFACSQCGQPLFVYKLEQVSEKGKAYTNYFGRCNVAEHEKLILLAQLKPEKDSDEAVTYSLGKFGQRALDFYSIHVTKESTHPVKPLAQIAGNRYASAPVGKALSDACMGTIASFLSKYQDIIIEHQKVVKGNQKRLESLRELAGKENLEYPSVTLPPQPHTKEGVDAYNEVIARVRMWVNLNLWQKLKLSRDDAKPLLRLKGFPSFPLVERQANAEVDWWDMVCNVKKLINEKKEDGKVFWQNLAGYKRQEALRPYLSSEEDRKKGKKFARYQLGDLLLHLEKKHGEDWGKVYDEAWERIDKKVEGLSKHIKLEEERRSEDAQSKAALTDWLRAKASFVIEGLKEADKDEFCRCELKLQKWYGDLRGKPFAIEAENSILDISGFSKQYNCAFIWQKDGVKKLNLYLIINYFKGGKLRFKKIKPEAFEANRFYTVINKKSGEIVPMEVNFNFDDPNLIILPLAFGKRQGREFIWNDLLSLETGSLKLANGRVIEKTLYNRRTRQDEPALFVALTFERREVLDSSNIKPMNLIGVDRGENIPAVIALTDPEGCPLSRFKDSLGNPTHILRIGESYKEKQRTIQAKKEVEQRRAGGYSRKYASKAKNLADDMVRNTARDLLYYAVTQDAMLIFENLSRGFGRQGKRTFMAERQYTRMEDWLTAKLAYEGLPSKTYLSKTLAQYTSKTCSNCGFTITSADYDRVLEKLKKTATGWMTTINGKELKVEGQITYYNRYKRQNVVKDLSVELDRLSEESVNNDISSWTKGRSGEALSLLKKRFSHRPVQEKFVCLNCGFETHADEQAALNIARSWLFLRSQEYKKYQTNKTTGNTDKRAFVETWQSFYRKKLKEVWKPAV

SEQ ID NO: 34136 - protein, 979 aa, synthetic construct
  REGION 1..979: note = engineered CasX variant
QEIKRINKIRRRLVKDSNTKKAGKTGPMKTLLVRVMTPDLRERLENLRKKPENIPQPISNTSQANLNKLLTDYTEMKKAILHVYWEEFQKDPVGLMSRVAQPASKKIDQNKLKPEMDEKGNLTTAGFACSQCGQPLFVYKLEQVSEKGKAYTNYFGRCNVAEHEKLILLAQLKPEKDSDEAVTYSLGKFGQRALDFYSIHVTKESTHPVKPLAQIAGNRYASVPVGKALSDACMGTIASFLSKYQDIIIEHQKVVKGNQKRLESLRELAGKENLEYPSVTLPPQPHTKEGVDAYNEVIARVRMWVNLNLWQKLKLSRDDAKPLLRLKGFPSFPLVERQANAEVDWWDMVCNVKKLINEKKEDGKVFWQNLAGYKRQEALRPYLSSEEDRKKGKKFARYQLGDLLLHLEKKHGEDWGKVYDEAWERIDKKVEGLSKHIKLEEERRSEDAQSKAALTDWLRAKASFVIEGLKEADKDEFCRCELKLQKWYGDLRGKPFAIEAENSILDISGFSKQYNCAFIWQKDGVKKLNLYLIINYFKGGKLRFKKIKPEAFEANRFYTVINKKSGEIVPMEVNFNFDDPNLIILPLAFGKRQGREFIWNDLLSLETGSLKLANGRVIEKTLYNRRTRQDEPALFVALTFERREVLDSSNIKPMNLIGVDRGENIPAVIALTDPEGCPLSRFKDSLGNPTHILRIGESYKEKQRTIQAKKEVEQRRAGGYSRKYASKAKNLADDMVRNTARDLLYYAVTQDAMLIFENLSRGFGRQGKRTFMAERQYTRMEDWLTAKLAYEGLPSKTYLSKTLAQYTSKTCSNCGFTITSADYDRVLEKLKKTATGWMTTINGKELKVEGQITYYNRYKRQNVVKDLSVELDRLSEESVNNDISSWTKGRSGEALSLLKKRFSHRPVQEKFVCLNCGFETHADEQAALNIARSWLFLRSQEYKKYQTNKTTGNTDKRAFVETWQSFYRKKLKEVWKPAV

SEQ ID NO: 34137 - protein, 979 aa, synthetic construct
  REGION 1..979: note = engineered CasX variant
QEIKRINKIRRRLVKDSNTKKAGKTGPMKTLLVRVMTPDLRERLENLRKKPENIPQPISNTSQANLNKLLTDYTEMKKAILHVYWEEFQKDPVGLMSRVAQPASKKIDQNKLKPEMDEKGNLTTAGFACSQCGQPLFVYKLEQVSEKGKAYTNYFGRCNVAEHEKLIKLAQLKPEKDSDEAVTYSLGKFGQRALDFYSIHVTKESTHPVKPLAQIAGNRYASGPVGKALSDACMGTIASFLSKYQDIIIEHQKVVKGNQKRLESLRELAGKENLEYPSVTLPPQPHTKEGVDAYNEVIARVRMWVNLNLWQKLKLSRDDAKPLLRLKGFPSFPLVERQANAEVDWWDMVCNVKKLINEKKEDGKVFWQNLAGYKRQEALRPYLSSEEDRKKGKKFARYQLGDLLLHLEKKHGEDWGKVYDEAWERIDKKVEGLSKHIKLEEERRSEDAQSKAALTDWLRAKASFVIEGLKEADKDEFCRCELKLQKWYGDLRGKPFAIEAENSILDISGFSKQYNCAFIWQKDGVKKLNLYLIINYFKGGKLRFKKIKPEAFEANRFYTVINKKSGEIVPMEVNFNFDDPNLIILPLAFGKRQGREFIWNDLLSLETGSLKLANGRVIEKTLYNRRTRQDEPALFVALTFERREVLDSSNIKPMNLIGVDRGENIPAVIALTDPEGCPLSRFKDSLGNPTHILRIGESYKEKQRTIQAKKEVEQRRAGGYSRKYASKAKNLADDMVRNTARDLLYYAVTQDAMLIFENLSRGFGRQGKRTFMAERQYTRMEDWLTAKLAYEGLPSKTYLSKTLAQYTSKTCSNCGFTITSADYDRVLEKLKKTATGWMTTINGKELKVEGQITYYNRYKRQNVVKDLSVELDRLSEESVNNDISSWTKGRSGEALSLLKKRFSHRPVQEKFVCLNCGFETHADEQAALNIARSWLFLRSQEYKKYQTNKTTGNTDKRAFVETWQSFYRKKLKEVWKPAV

SEQ ID NO: 34138 - protein, 978 aa, synthetic construct
  REGION 1..978: note = engineered CasX variant
QEIKRINKIRRRLVKDSNTKKAGKTGPMKTLLVRVMTPDLRERLENLRKKPENIPQPISNTSQANLNKLLTDYTEMKKAILHVYWEEFQKDPVGLMSRVAQPASKKIDQNKLKPEMDEKGNLTTAGFACSQCGQPLFVYKLEQVSEKGKAYTNYFGRCNVAEHEKLILLAQLKPEKDSDEAVTYSLGKFGQRALDFYSIHVTKESTHPVKPLAQIAGNRYASPVGKALSDACMGTIASFLSKYQDIIIEHQKVVKGNQKRLESLRELAGKENLEYPSVTLPPQPHTKEGVDAYNEVIARVRMWVNLNLWQKLKLSRDDAKPLLRLKGFPSFPLVERQANAEVDWWDMVCNVKKLINEKKEDGKVFWQNLAGYKRQEALRPYLSSEEDRKKGKKFARYQLGDLLLHLEKKHGEDWGKVYDEAWERIDKKVEGLSKHIKLEEERRSEDAQSKAALTDWLRAKASFVIEGLKEADKDEFCRCELKLQKWYGDLRGKPFAIEAENSILDISGFSKQYNCAFIWQKDGVKKLNLYLIINYFKGGKLRFKKIKPEAFEANRFYTVINKKSGEIVPMEVNFNFDDPNLIILPLAFGKRQGREFIWNDLLSLETGSLKLANGRVIEKTLYNRRTRQDEPALFVALTFERREVLDSSNIKPMNLIGVDRGENIPAVIALTDPEGCPLSRFKDSLGNPTHILRIGESYKEKQRTIQAKKEVEQRRAGGYSRKYASKAKNLADDMVRNTARDLLYYAVTQDAMLIFENLSRGFGRQGKRTFMAERQYTRMEDWLTAKLAYEGLPSKTYLSKTLAQYTSKTCSNCGFTITSADYDRVLEKLKKTATGWMTTINGKELKVEGQITYYNRYKRQNVVKDLSVELDRLSEESVNNDISSWTKGRSGEALSLLKKRFSHRPVQEKFVCLNCGFETHADEQAALNIARSWLFLRSQEYKKYQTNKTTGNTDKRAFVETWQSFYRKKLKEVWKPAV

SEQ ID NO: 34139 - protein, 978 aa, synthetic construct
  REGION 1..978: note = engineered CasX variant
QEIKRINKIRRRLVKDSNTKKAGKTGPMKTLLVRVMTPDLRERLENLRKKPENIPQPISNTSQANLNKLLTDYTEMKKAILHVYWEEFQKDPVGLMSRVAQPASKKIDQNKLKPEMDEKGNLTTAGFACSQCGQPLFVYKLEQVSEKGKAYTNYFGRCNVAEHEKLILLAQLKPEKDSDEAVTYSLGKFGQRALDFYSIHVTKESTHPVKPLAQIAGNRYASYPVGKALSDACMGTIASFLSKYQDIIIEHQKVVKGNQKRLESLRELAGKENLEYPSVTLPPQPHTKEGVDAYNEVIARVRMWVNLNLWQKLKLSRDDAKPLLRLKGFPSFPLVERQANEVDWWDMVCNVKKLINEKKEDGKVFWQNLAGYKRQEALRPYLSSEEDRKKGKKFARTQLGDLLLHLEKKHGEDWGKVYDEAWERIDKKVEGLSKHIKLEEERRSEDAQSKAALTDWLRAKASFVIEGLKEADKDEFCRCELKLQKWYGDLRGKPFAIEAENSILDISGFSKQYNCAFIWQKDGVKKLNLYLIINYFKGGKLRFKKIKPEAFEANRFYTVINKKSGEIVPMEVNFNFDDPNLIILPLAFGKRQGREFIWNDLLSLETGSLKLANGRVIEKTLYNRRTRQDEPALFVALTFERREVLDSSNIKPMNLIGVDRGENIPAVIALTDPEGCPLSRFKDSLGNPTHILRIGESYKEKQRTIQAKKEVEQRRAGGYSRKYASKAKNLADDMVRNTARDLLYYAVTQDAMLIFENLSRGFGRQGKRTFMAERQYTRMEDWLTAKLAYEGLPSKTYLSKTLAQYTSKTCSNCGFTITSADYDRVLEKLKKTATGWMTTINGKELKVEGQITYYNRYKRQNVVKDLSVELDRLSEESVNNDISSWTKGRSGEALSLLKKRFSHRPVQEKFVCLNCGFETHADEQAALNIARSWLFLRSQEYKKYQTNKTTGNTDKRAFVETWQSFYRKKLKEVWKPAV

SEQ ID NO: 34140 - protein, 978 aa, synthetic construct
  REGION 1..978: note = engineered CasX variant
QEIKRINKIRRRLVKDSNTKKAGKTGPMKTLLVRVMTPDLRERLENLRKKPENIPQPISNTSQANLNKLLTDYTEMKKAILHVYWEEFQKDPVGLMSRVAQPASKKIDQNKLKPEMDEKGNLTTAGFACSQCGQPLFVYKLEQVSEKGKAYTNYFGRCNVAEHEKLILLAQLKPEKDSDEAVTYSLGKFGQRALDFYSIHVTKESTHPVKPLAQIAGNRYASHPVGKALSDACMGTIASFLSKYQDIIIEHQKVVKGNQKRLESLRELAGKENLEYPSVTLPPQPHTKEGVDAYNEVIARVRMWVNLNLWQKLKLSRDDAKPLLRLKGFPSFPLVERQANEVDWWDMVCNVKKLINEKKEDGKVFWQNLAGYKRQEALRPYLSSEEDRKKGKKFARTQLGDLLLHLEKKHGEDWGKVYDEAWERIDKKVEGLSKHIKLEEERRSEDAQSKAALTDWLRAKASFVIEGLKEADKDEFCRCELKLQKWYGDLRGKPFAIEAENSILDISGFSKQYNCAFIWQKDGVKKLNLYLIINYFKGGKLRFKKIKPEAFEANRFYTVINKKSGEIVPMEVNFNFDDPNLIILPLAFGKRQGREFIWNDLLSLETGSLKLANGRVIEKTLYNRRTRQDEPALFVALTFERREVLDSSNIKPMNLIGVDRGENIPAVIALTDPEGCPLSRFKDSLGNPTHILRIGESYKEKQRTIQAKKEVEQRRAGGYSRKYASKAKNLADDMVRNTARDLLYYAVTQDAMLIFENLSRGFGRQGKRTFMAERQYTRMEDWLTAKLAYEGLPSKTYLSKTLAQYTSKTCSNCGFTITSADYDRVLEKLKKTATGWMTTINGKELKVEGQITYYNRYKRQNVVKDLSVELDRLSEESVNNDISSWTKGRSGEALSLLKKRFSHRPVQEKFVCLNCGFETHADEQAALNIARSWLFLRSQEYKKYQTNKTTGNTDKRAFVETWQSFYRKKLKEVWKPAV

SEQ ID NO: 34141 - protein, 978 aa, synthetic construct
  REGION 1..978: note = engineered CasX variant
QEIKRINKIRRRLVKDSNTKKAGKTGPMKTLLVRVMTPDLRERLENLRKKPENIPQPISNTSQANLNKLLTDYTEMKKAILHVYWEEFQKDPVGLMSRVAQPASKKIDQNKLKPEMDEKGNLTTAGFACSQCGQPLFVYKLEQVSEKGKAYTNYFGRCNVAEHEKLILLAQLKPEKDSDEAVTYSLGKFGQRALDFYSIHVTKESTHPVKPLAQIAGNRYASSPVGKALSDACMGTIASFLSKYQDIIIEHQKVVKGNQKRLESLRELAGKENLEYPSVTLPPQPHTKEGVDAYNEVIARVRMWVNLNLWQKLKLSRDDAKPLLRLKGFPSFPLVERQANEVDWWDMVCNVKKLINEKKEDGKVFWQNLAGYKRQEALRPYLSSEEDRKKGKKFARTQLGDLLLHLEKKHGEDWGKVYDEAWERIDKKVEGLSKHIKLEEERRSEDAQSKAALTDWLRAKASFVIEGLKEADKDEFCRCELKLQKWYGDLRGKPFAIEAENSILDISGFSKQYNCAFIWQKDGVKKLNLYLIINYFKGGKLRFKKIKPEAFEANRFYTVINKKSGEIVPMEVNFNFDDPNLIILPLAFGKRQGREFIWNDLLSLETGSLKLANGRVIEKTLYNRRTRQDEPALFVALTFERREVLDSSNIKPMNLIGVDRGENIPAVIALTDPEGCPLSRFKDSLGNPTHILRIGESYKEKQRTIQAKKEVEQRRAGGYSRKYASKAKNLADDMVRNTARDLLYYAVTQDAMLIFENLSRGFGRQGKRTFMAERQYTRMEDWLTAKLAYEGLPSKTYLSKTLAQYTSKTCSNCGFTITSADYDRVLEKLKKTATGWMTTINGKELKVEGQITYYNRYKRQNVVKDLSVELDRLSEESVNNDISSWTKGRSGEALSLLKKRFSHRPVQEKFVCLNCGFETHADEQAALNIARSWLFLRSQEYKKYQTNKTTGNTDKRAFVETWQSFYRKKLKEVWKPAV

SEQ ID NO: 34142 - protein, 978 aa, synthetic construct
  REGION 1..978: note = engineered CasX variant
QEIKRINKIRRRLVKDSNTKKAGKTGPMKTLLVRVMTPDLRERLENLRKKPENIPQPISNTSQANLNKLLTDYTEMKKAILHVYWEEFQKDPVGLMSRVAQPASKKIDQNKLKPEMDEKGNLTTAGFACSQCGQPLFVYKLEQVSEKGKAYTNYFGRCNVAEHEKLILLAQLKPEKDSDEAVTYSLGKFGQRALDFYSIHVTKESTHPVKPLAQIAGNRYASTPVGKALSDACMGTIASFLSKYQDIIIEHQKVVKGNQKRLESLRELAGKENLEYPSVTLPPQPHTKEGVDAYNEVIARVRMWVNLNLWQKLKLSRDDAKPLLRLKGFPSFPLVERQANEVDWWDMVCNVKKLINEKKEDGKVFWQNLAGYKRQEALRPYLSSEEDRKKGKKFARTQLGDLLLHLEKKHGEDWGKVYDEAWERIDKKVEGLSKHIKLEEERRSEDAQSKAALTDWLRAKASFVIEGLKEADKDEFCRCELKLQKWYGDLRGKPFAIEAENSILDISGFSKQYNCAFIWQKDGVKKLNLYLIINYFKGGKLRFKKIKPEAFEANRFYTVINKKSGEIVPMEVNFNFDDPNLIILPLAFGKRQGREFIWNDLLSLETGSLKLANGRVIEKTLYNRRTRQDEPALFVALTFERREVLDSSNIKPMNLIGVDRGENIPAVIALTDPEGCPLSRFKDSLGNPTHILRIGESYKEKQRTIQAKKEVEQRRAGGYSRKYASKAKNLADDMVRNTARDLLYYAVTQDAMLIFENLSRGFGRQGKRTFMAERQYTRMEDWLTAKLAYEGLPSKTYLSKTLAQYTSKTCSNCGFTITSADYDRVLEKLKKTATGWMTTINGKELKVEGQITYYNRYKRQNVVKDLSVELDRLSEESVNNDISSWTKGRSGEALSLLKKRFSHRPVQEKFVCLNCGFETHADEQAALNIARSWLFLRSQEYKKYQTNKTTGNTDKRAFVETWQSFYRKKLKEVWKPAV

SEQ ID NO: 34143 - protein, 978 aa, synthetic construct
  REGION 1..978: note = engineered CasX variant
QEIKRINKIRRRLVKDSNTKKAGKTGPMKTLLVRVMTPDLRERLENLRKKPENIPQPISNTSQANLNKLLTDYTEMKKAILHVYWEEFQKDPVGLMSRVAQPASKKIDQNKLKPEMDEKGNLTTAGFACSQCGQPLFVYKLEQVSEKGKAYTNYFGRCNVAEHEKLILLAQLKPEKDSDEAVTYSLGKFGQRALDFYSIHVTKESTHPVKPLAQIAGNRYASAPVGKALSDACMGTIASFLSKYQDIIIEHQKVVKGNQKRLESLRELAGKENLEYPSVTLPPQPHTKEGVDAYNEVIARVRMWVNLNLWQKLKLSRDDAKPLLRLKGFPSFPLVERQANEVDWWDMVCNVKKLINEKKEDGKVFWQNLAGYKRQEALRPYLSSEEDRKKGKKFARTQLGDLLLHLEKKHGEDWGKVYDEAWERIDKKVEGLSKHIKLEEERRSEDAQSKAALTDWLRAKASFVIEGLKEADKDEFCRCELKLQKWYGDLRGKPFAIEAENSILDISGFSKQYNCAFIWQKDGVKKLNLYLIINYFKGGKLRFKKIKPEAFEANRFYTVINKKSGEIVPMEVNFNFDDPNLIILPLAFGKRQGREFIWNDLLSLETGSLKLANGRVIEKTLYNRRTRQDEPALFVALTFERREVLDSSNIKPMNLIGVDRGENIPAVIALTDPEGCPLSRFKDSLGNPTHILRIGESYKEKQRTIQAKKEVEQRRAGGYSRKYASKAKNLADDMVRNTARDLLYYAVTQDAMLIFENLSRGFGRQGKRTFMAERQYTRMEDWLTAKLAYEGLPSKTYLSKTLAQYTSKTCSNCGFTITSADYDRVLEKLKKTATGWMTTINGKELKVEGQITYYNRYKRQNVVKDLSVELDRLSEESVNNDISSWTKGRSGEALSLLKKRFSHRPVQEKFVCLNCGFETHADEQAALNIARSWLFLRSQEYKKYQTNKTTGNTDKRAFVETWQSFYRKKLKEVWKPAV

SEQ ID NO: 34144 - protein, 978 aa, synthetic construct
  REGION 1..978: note = engineered CasX variant
QEIKRINKIRRRLVKDSNTKKAGKTGPMKTLLVRVMTPDLRERLENLRKKPENIPQPISNTSQANLNKLLTDYTEMKKAILHVYWEEFQKDPVGLMSRVAQPASKKIDQNKLKPEMDEKGNLTTAGFACSQCGQPLFVYKLEQVSEKGKAYTNYFGRCNVAEHEKLILLAQLKPEKDSDEAVTYSLGKFGQRALDFYSIHVTKESTHPVKPLAQIAGNRYASVPVGKALSDACMGTIASFLSKYQDIIIEHQKVVKGNQKRLESLRELAGKENLEYPSVTLPPQPHTKEGVDAYNEVIARVRMWVNLNLWQKLKLSRDDAKPLLRLKGFPSFPLVERQANEVDWWDMVCNVKKLINEKKEDGKVFWQNLAGYKRQEALRPYLSSEEDRKKGKKFARTQLGDLLLHLEKKHGEDWGKVYDEAWERIDKKVEGLSKHIKLEEERRSEDAQSKAALTDWLRAKASFVIEGLKEADKDEFCRCELKLQKWYGDLRGKPFAIEAENSILDISGFSKQYNCAFIWQKDGVKKLNLYLIINYFKGGKLRFKKIKPEAFEANRFYTVINKKSGEIVPMEVNFNFDDPNLIILPLAFGKRQGREFIWNDLLSLETGSLKLANGRVIEKTLYNRRTRQDEPALFVALTFERREVLDSSNIKPMNLIGVDRGENIPAVIALTDPEGCPLSRFKDSLGNPTHILRIGESYKEKQRTIQAKKEVEQRRAGGYSRKYASKAKNLADDMVRNTARDLLYYAVTQDAMLIFENLSRGFGRQGKRTFMAERQYTRMEDWLTAKLAYEGLPSKTYLSKTLAQYTSKTCSNCGFTITSADYDRVLEKLKKTATGWMTTINGKELKVEGQITYYNRYKRQNVVKDLSVELDRLSEESVNNDISSWTKGRSGEALSLLKKRFSHRPVQEKFVCLNCGFETHADEQAALNIARSWLFLRSQEYKKYQTNKTTGNTDKRAFVETWQSFYRKKLKEVWKPAV

SEQ ID NO: 34145 - protein, 978 aa, synthetic construct
  REGION 1..978: note = engineered CasX variant
QEIKRINKIRRRLVKDSNTKKAGKTGPMKTLLVRVMTPDLRERLENLRKKPENIPQPISNTSQANLNKLLTDYTEMKKAILHVYWEEFQKDPVGLMSRVAQPASKKIDQNKLKPEMDEKGNLTTAGFACSQCGQPLFVYKLEQVSEKGKAYTNYFGRCNVAEHEKLIKLAQLKPEKDSDEAVTYSLGKFGQRALDFYSIHVTKESTHPVKPLAQIAGNRYASGPVGKALSDACMGTIASFLSKYQDIIIEHQKVVKGNQKRLESLRELAGKENLEYPSVTLPPQPHTKEGVDAYNEVIARVRMWVNLNLWQKLKLSRDDAKPLLRLKGFPSFPLVERQANEVDWWDMVCNVKKLINEKKEDGKVFWQNLAGYKRQEALRPYLSSEEDRKKGKKFARTQLGDLLLHLEKKHGEDWGKVYDEAWERIDKKVEGLSKHIKLEEERRSEDAQSKAALTDWLRAKASFVIEGLKEADKDEFCRCELKLQKWYGDLRGKPFAIEAENSILDISGFSKQYNCAFIWQKDGVKKLNLYLIINYFKGGKLRFKKIKPEAFEANRFYTVINKKSGEIVPMEVNFNFDDPNLIILPLAFGKRQGREFIWNDLLSLETGSLKLANGRVIEKTLYNRRTRQDEPALFVALTFERREVLDSSNIKPMNLIGVDRGENIPAVIALTDPEGCPLSRFKDSLGNPTHILRIGESYKEKQRTIQAKKEVEQRRAGGYSRKYASKAKNLADDMVRNTARDLLYYAVTQDAMLIFENLSRGFGRQGKRTFMAERQYTRMEDWLTAKLAYEGLPSKTYLSKTLAQYTSKTCSNCGFTITSADYDRVLEKLKKTATGWMTTINGKELKVEGQITYYNRYKRQNVVKDLSVELDRLSEESVNNDISSWTKGRSGEALSLLKKRFSHRPVQEKFVCLNCGFETHADEQAALNIARSWLFLRSQEYKKYQTNKTTGNTDKRAFVETWQSFYRKKLKEVWKPAV

SEQ ID NO: 34146 - protein, 977 aa, synthetic construct
  REGION 1..977: note = engineered CasX variant
QEIKRINKIRRRLVKDSNTKKAGKTGPMKTLLVRVMTPDLRERLENLRKKPENIPQPISNTSQANLNKLLTDYTEMKKAILHVYWEEFQKDPVGLMSRVAQPASKKIDQNKLKPEMDEKGNLTTAGFACSQCGQPLFVYKLEQVSEKGKAYTNYFGRCNVAEHEKLILLAQLKPEKDSDEAVTYSLGKFGQRALDFYSIHVTKESTHPVKPLAQIAGNRYASPVGKALSDACMGTIASFLSKYQDIIIEHQKVVKGNQKRLESLRELAGKENLEYPSVTLPPQPHTKEGVDAYNEVIARVRMWVNLNLWQKLKLSRDDAKPLLRLKGFPSFPLVERQANEVDWWDMVCNVKKLINEKKEDGKVFWQNLAGYKRQEALRPYLSSEEDRKKGKKFARTQLGDLLLHLEKKHGEDWGKVYDEAWERIDKKVEGLSKHIKLEEERRSEDAQSKAALTDWLRAKASFVIEGLKEADKDEFCRCELKLQKWYGDLRGKPFAIEAENSILDISGFSKQYNCAFIWQKDGVKKLNLYLIINYFKGGKLRFKKIKPEAFEANRFYTVINKKSGEIVPMEVNFNFDDPNLIILPLAFGKRQGREFIWNDLLSLETGSLKLANGRVIEKTLYNRRTRQDEPALFVALTFERREVLDSSNIKPMNLIGVDRGENIPAVIALTDPEGCPLSRFKDSLGNPTHILRIGESYKEKQRTIQAKKEVEQRRAGGYSRKYASKAKNLADDMVRNTARDLLYYAVTQDAMLIFENLSRGFGRQGKRTFMAERQYTRMEDWLTAKLAYEGLPSKTYLSKTLAQYTSKTCSNCGFTITSADYDRVLEKLKKTATGWMTTINGKELKVEGQITYYNRYKRQNVVKDLSVELDRLSEESVNNDISSWTKGRSGEALSLLKKRFSHRPVQEKFVCLNCGFETHADEQAALNIARSWLFLRSQEYKKYQTNKTTGNTDKRAFVETWQSFYRKKLKEVWKPAV

SEQ ID NO: 34147 - protein, 979 aa, synthetic construct
  REGION 1..979: note = engineered CasX variant
QEIKRINKIRRRLVKDSNTKKAGKTGPMKTLLVRVMTPDLRERLENLRKKPENIPQPISNTSQANLNKLLTDYTEMKKAILHVYWEEFQKDPVGLMSRVAQPASKKIDQNKLKPEMDEKGNLTTAGFACSQCGQPLFVYKLEQVSEKGKAYTNYFGRCNVAEHEKLILLAQLKPEKDSDEAVTYSLGKFGQRALDFYSIHVTKESTHPVKPLAQIAGNRYASYPVGKALSDACMGTIASFLSKYQDIIIEHQKVVKGNQKRLESLRELAGKENLEYPSVTLPPQPHTKEGVDAYNEVIARVRMWVNLNLWQKLKLSRDDAKPLLRLKGFPSFPLVERQANEVDWWDMVCNVKKLINEKKEDGKVFWQNLAGYKRQEALRPYLSSEEDRKKGKKFARYQLGDLLLHLEKKHEGEDWGKVYDEAWERIDKKVEGLSKHIKLEEERRSEDAQSKAALTDWLRAKASFVIEGLKEADKDEFCRCELKLQKWYGDLRGKPFAIEAENSILDISGFSKQYNCAFIWQKDGVKKLNLYLIINYFKGGKLRFKKIKPEAFEANRFYTVINKKSGEIVPMEVNFNFDDPNLIILPLAFGKRQGREFIWNDLLSLETGSLKLANGRVIEKTLYNRRTRQDEPALFVALTFERREVLDSSNIKPMNLIGVDRGENIPAVIALTDPEGCPLSRFKDSLGNPTHILRIGESYKEKQRTIQAKKEVEQRRAGGYSRKYASKAKNLADDMVRNTARDLLYYAVTQDAMLIFENLSRGFGRQGKRTFMAERQYTRMEDWLTAKLAYEGLPSKTYLSKTLAQYTSKTCSNCGFTITSADYDRVLEKLKKTATGWMTTINGKELKVEGQITYYNRYKRQNVVKDLSVELDRLSEESVNNDISSWTKGRSGEALSLLKKRFSHRPVQEKFVCLNCGFETHADEQAALNIARSWLFLRSQEYKKYQTNKTTGNTDKRAFVETWQSFYRKKLKEVWKPAV

SEQ ID NO: 34148 - protein, 979 aa, synthetic construct
  REGION 1..979: note = engineered CasX variant
QEIKRINKIRRRLVKDSNTKKAGKTGPMKTLLVRVMTPDLRERLENLRKKPENIPQPISNTSQANLNKLLTDYTEMKKAILHVYWEEFQKDPVGLMSRVAQPASKKIDQNKLKPEMDEKGNLTTAGFACSQCGQPLFVYKLEQVSEKGKAYTNYFGRCNVAEHEKLILLAQLKPEKDSDEAVTYSLGKFGQRALDFYSIHVTKESTHPVKPLAQIAGNRYASHPVGKALSDACMGTIASFLSKYQDIIIEHQKVVKGNQKRLESLRELAGKENLEYPSVTLPPQPHTKEGVDAYNEVIARVRMWVNLNLWQKLKLSRDDAKPLLRLKGFPSFPLVERQANEVDWWDMVCNVKKLINEKKEDGKVFWQNLAGYKRQEALRPYLSSEEDRKKGKKFARYQLGDLLLHLEKKHEGEDWGKVYDEAWERIDKKVEGLSKHIKLEEERRSEDAQSKAALTDWLRAKASFVIEGLKEADKDEFCRCELKLQKWYGDLRGKPFAIEAENSILDISGFSKQYNCAFIWQKDGVKKLNLYLIINYFKGGKLRFKKIKPEAFEANRFYTVINKKSGEIVPMEVNFNFDDPNLIILPLAFGKRQGREFIWNDLLSLETGSLKLANGRVIEKTLYNRRTRQDEPALFVALTFERREVLDSSNIKPMNLIGVDRGENIPAVIALTDPEGCPLSRFKDSLGNPTHILRIGESYKEKQRTIQAKKEVEQRRAGGYSRKYASKAKNLADDMVRNTARDLLYYAVTQDAMLIFENLSRGFGRQGKRTFMAERQYTRMEDWLTAKLAYEGLPSKTYLSKTLAQYTSKTCSNCGFTITSADYDRVLEKLKKTATGWMTTINGKELKVEGQITYYNRYKRQNVVKDLSVELDRLSEESVNNDISSWTKGRSGEALSLLKKRFSHRPVQEKFVCLNCGFETHADEQAALNIARSWLFLRSQEYKKYQTNKTTGNTDKRAFVETWQSFYRKKLKEVWKPAV

SEQ ID NO: 34149 - protein, 979 aa, synthetic construct
  REGION 1..979: note = engineered CasX variant
QEIKRINKIRRRLVKDSNTKKAGKTGPMKTLLVRVMTPDLRERLENLRKKPENIPQPISNTSQANLNKLLTDYTEMKKAILHVYWEEFQKDPVGLMSRVAQPASKKIDQNKLKPEMDEKGNLTTAGFACSQCGQPLFVYKLEQVSEKGKAYTNYFGRCNVAEHEKLILLAQLKPEKDSDEAVTYSLGKFGQRALDFYSIHVTKESTHPVKPLAQIAGNRYASSPVGKALSDACMGTIASFLSKYQDIIIEHQKVVKGNQKRLESLRELAGKENLEYPSVTLPPQPHTKEGVDAYNEVIARVRMWVNLNLWQKLKLSRDDAKPLLRLKGFPSFPLVERQANEVDWWDMVCNVKKLINEKKEDGKVFWQNLAGYKRQEALRPYLSSEEDRKKGKKFARYQLGDLLLHLEKKHEGEDWGKVYDEAWERIDKKVEGLSKHIKLEEERRSEDAQSKAALTDWLRAKASFVIEGLKEADKDEFCRCELKLQKWYGDLRGKPFAIEAENSILDISGFSKQYNCAFIWQKDGVKKLNLYLIINYFKGGKLRFKKIKPEAFEANRFYTVINKKSGEIVPMEVNFNFDDPNLIILPLAFGKRQGREFIWNDLLSLETGSLKLANGRVIEKTLYNRRTRQDEPALFVALTFERREVLDSSNIKPMNLIGVDRGENIPAVIALTDPEGCPLSRFKDSLGNPTHILRIGESYKEKQRTIQAKKEVEQRRAGGYSRKYASKAKNLADDMVRNTARDLLYYAVTQDAMLIFENLSRGFGRQGKRTFMAERQYTRMEDWLTAKLAYEGLPSKTYLSKTLAQYTSKTCSNCGFTITSADYDRVLEKLKKTATGWMTTINGKELKVEGQITYYNRYKRQNVVKDLSVELDRLSEESVNNDISSWTKGRSGEALSLLKKRFSHRPVQEKFVCLNCGFETHADEQAALNIARSWLFLRSQEYKKYQTNKTTGNTDKRAFVETWQSFYRKKLKEVWKPAV

SEQ ID NO: 34150 - protein, 979 aa, synthetic construct
  REGION 1..979: note = engineered CasX variant
QEIKRINKIRRRLVKDSNTKKAGKTGPMKTLLVRVMTPDLRERLENLRKKPENIPQPISNTSQANLNKLLTDYTEMKKAILHVYWEEFQKDPVGLMSRVAQPASKKIDQNKLKPEMDEKGNLTTAGFACSQCGQPLFVYKLEQVSEKGKAYTNYFGRCNVAEHEKLILLAQLKPEKDSDEAVTYSLGKFGQRALDFYSIHVTKESTHPVKPLAQIAGNRYASTPVGKALSDACMGTIASFLSKYQDIIIEHQKVVKGNQKRLESLRELAGKENLEYPSVTLPPQPHTKEGVDAYNEVIARVRMWVNLNLWQKLKLSRDDAKPLLRLKGFPSFPLVERQANEVDWWDMVCNVKKLINEKKEDGKVFWQNLAGYKRQEALRPYLSSEEDRKKGKKFARYQLGDLLLHLEKKHEGEDWGKVYDEAWERIDKKVEGLSKHIKLEEERRSEDAQSKAALTDWLRAKASFVIEGLKEADKDEFCRCELKLQKWYGDLRGKPFAIEAENSILDISGFSKQYNCAFIWQKDGVKKLNLYLIINYFKGGKLRFKKIKPEAFEANRFYTVINKKSGEIVPMEVNFNFDDPNLIILPLAFGKRQGREFIWNDLLSLETGSLKLANGRVIEKTLYNRRTRQDEPALFVALTFERREVLDSSNIKPMNLIGVDRGENIPAVIALTDPEGCPLSRFKDSLGNPTHILRIGESYKEKQRTIQAKKEVEQRRAGGYSRKYASKAKNLADDMVRNTARDLLYYAVTQDAMLIFENLSRGFGRQGKRTFMAERQYTRMEDWLTAKLAYEGLPSKTYLSKTLAQYTSKTCSNCGFTITSADYDRVLEKLKKTATGWMTTINGKELKVEGQITYYNRYKRQNVVKDLSVELDRLSEESVNNDISSWTKGRSGEALSLLKKRFSHRPVQEKFVCLNCGFETHADEQAALNIARSWLFLRSQEYKKYQTNKTTGNTDKRAFVETWQSFYRKKLKEVWKPAV

SEQ ID NO: 34151 - protein, 979 aa, synthetic construct
  REGION 1..979: note = engineered CasX variant
QEIKRINKIRRRLVKDSNTKKAGKTGPMKTLLVRVMTPDLRERLENLRKKPENIPQPISNTSQANLNKLLTDYTEMKKAILHVYWEEFQKDPVGLMSRVAQPASKKIDQNKLKPEMDEKGNLTTAGFACSQCGQPLFVYKLEQVSEKGKAYTNYFGRCNVAEHEKLILLAQLKPEKDSDEAVTYSLGKFGQRALDFYSIHVTKESTHPVKPLAQIAGNRYASAPVGKALSDACMGTIASFLSKYQDIIIEHQKVVKGNQKRLESLRELAGKENLEYPSVTLPPQPHTKEGVDAYNEVIARVRMWVNLNLWQKLKLSRDDAKPLLRLKGFPSFPLVERQANEVDWWDMVCNVKKLINEKKEDGKVFWQNLAGYKRQEALRPYLSSEEDRKKGKKFARYQLGDLLLHLEKKHEGEDWGKVYDEAWERIDKKVEGLSKHIKLEEERRSEDAQSKAALTDWLRAKASFVIEGLKEADKDEFCRCELKLQKWYGDLRGKPFAIEAENSILDISGFSKQYNCAFIWQKDGVKKLNLYLIINYFKGGKLRFKKIKPEAFEANRFYTVINKKSGEIVPMEVNFNFDDPNLIILPLAFGKRQGREFIWNDLLSLETGSLKLANGRVIEKTLYNRRTRQDEPALFVALTFERREVLDSSNIKPMNLIGVDRGENIPAVIALTDPEGCPLSRFKDSLGNPTHILRIGESYKEKQRTIQAKKEVEQRRAGGYSRKYASKAKNLADDMVRNTARDLLYYAVTQDAMLIFENLSRGFGRQGKRTFMAERQYTRMEDWLTAKLAYEGLPSKTYLSKTLAQYTSKTCSNCGFTITSADYDRVLEKLKKTATGWMTTINGKELKVEGQITYYNRYKRQNVVKDLSVELDRLSEESVNNDISSWTKGRSGEALSLLKKRFSHRPVQEKFVCLNCGFETHADEQAALNIARSWLFLRSQEYKKYQTNKTTGNTDKRAFVETWQSFYRKKLKEVWKPAV

SEQ ID NO: 34152 - protein, 979 aa, synthetic construct
  REGION 1..979: note = engineered CasX variant
QEIKRINKIRRRLVKDSNTKKAGKTGPMKTLLVRVMTPDLRERLENLRKKPENIPQPISNTSQANLNKLLTDYTEMKKAILHVYWEEFQKDPVGLMSRVAQPASKKIDQNKLKPEMDEKGNLTTAGFACSQCGQPLFVYKLEQVSEKGKAYTNYFGRCNVAEHEKLILLAQLKPEKDSDEAVTYSLGKFGQRALDFYSIHVTKESTHPVKPLAQIAGNRYASVPVGKALSDACMGTIASFLSKYQDIIIEHQKVVKGNQKRLESLRELAGKENLEYPSVTLPPQPHTKEGVDAYNEVIARVRMWVNLNLWQKLKLSRDDAKPLLRLKGFPSFPLVERQANEVDWWDMVCNVKKLINEKKEDGKVFWQNLAGYKRQEALRPYLSSEEDRKKGKKFARYQLGDLLLHLEKKHEGEDWGKVYDEAWERIDKKVEGLSKHIKLEEERRSEDAQSKAALTDWLRAKASFVIEGLKEADKDEFCRCELKLQKWYGDLRGKPFAIEAENSILDISGFSKQYNCAFIWQKDGVKKLNLYLIINYFKGGKLRFKKIKPEAFEANRFYTVINKKSGEIVPMEVNFNFDDPNLIILPLAFGKRQGREFIWNDLLSLETGSLKLANGRVIEKTLYNRRTRQDEPALFVALTFERREVLDSSNIKPMNLIGVDRGENIPAVIALTDPEGCPLSRFKDSLGNPTHILRIGESYKEKQRTIQAKKEVEQRRAGGYSRKYASKAKNLADDMVRNTARDLLYYAVTQDAMLIFENLSRGFGRQGKRTFMAERQYTRMEDWLTAKLAYEGLPSKTYLSKTLAQYTSKTCSNCGFTITSADYDRVLEKLKKTATGWMTTINGKELKVEGQITYYNRYKRQNVVKDLSVELDRLSEESVNNDISSWTKGRSGEALSLLKKRFSHRPVQEKFVCLNCGFETHADEQAALNIARSWLFLRSQEYKKYQTNKTTGNTDKRAFVETWQSFYRKKLKEVWKPAV

SEQ ID NO: 34153 - protein, 979 aa, synthetic construct
  REGION 1..979: note = engineered CasX variant
QEIKRINKIRRRLVKDSNTKKAGKTGPMKTLLVRVMTPDLRERLENLRKKPENIPQPISNTSQANLNKLLTDYTEMKKAILHVYWEEFQKDPVGLMSRVAQPASKKIDQNKLKPEMDEKGNLTTAGFACSQCGQPLFVYKLEQVSEKGKAYTNYFGRCNVAEHEKLIKLAQLKPEKDSDEAVTYSLGKFGQRALDFYSIHVTKESTHPVKPLAQIAGNRYASGPVGKALSDACMGTIASFLSKYQDIIIEHQKVVKGNQKRLESLRELAGKENLEYPSVTLPPQPHTKEGVDAYNEVIARVRMWVNLNLWQKLKLSRDDAKPLLRLKGFPSFPLVERQANEVDWWDMVCNVKKLINEKKEDGKVFWQNLAGYKRQEALRPYLSSEEDRKKGKKFARYQLGDLLLHLEKKHEGEDWGKVYDEAWERIDKKVEGLSKHIKLEEERRSEDAQSKAALTDWLRAKASFVIEGLKEADKDEFCRCELKLQKWYGDLRGKPFAIEAENSILDISGFSKQYNCAFIWQKDGVKKLNLYLIINYFKGGKLRFKKIKPEAFEANRFYTVINKKSGEIVPMEVNFNFDDPNLIILPLAFGKRQGREFIWNDLLSLETGSLKLANGRVIEKTLYNRRTRQDEPALFVALTFERREVLDSSNIKPMNLIGVDRGENIPAVIALTDPEGCPLSRFKDSLGNPTHILRIGESYKEKQRTIQAKKEVEQRRAGGYSRKYASKAKNLADDMVRNTARDLLYYAVTQDAMLIFENLSRGFGRQGKRTFMAERQYTRMEDWLTAKLAYEGLPSKTYLSKTLAQYTSKTCSNCGFTITSADYDRVLEKLKKTATGWMTTINGKELKVEGQITYYNRYKRQNVVKDLSVELDRLSEESVNNDISSWTKGRSGEALSLLKKRFSHRPVQEKFVCLNCGFETHADEQAALNIARSWLFLRSQEYKKYQTNKTTGNTDKRAFVETWQSFYRKKLKEVWKPAV

SEQ ID NO: 34154 - protein, 978 aa, synthetic construct
  REGION 1..978: note = engineered CasX variant
QEIKRINKIRRRLVKDSNTKKAGKTGPMKTLLVRVMTPDLRERLENLRKKPENIPQPISNTSQANLNKLLTDYTEMKKAILHVYWEEFQKDPVGLMSRVAQPASKKIDQNKLKPEMDEKGNLTTAGFACSQCGQPLFVYKLEQVSEKGKAYTNYFGRCNVAEHEKLILLAQLKPEKDSDEAVTYSLGKFGQRALDFYSIHVTKESTHPVKPLAQIAGNRYASPVGKALSDACMGTIASFLSKYQDIIIEHQKVVKGNQKRLESLRELAGKENLEYPSVTLPPQPHTKEGVDAYNEVIARVRMWVNLNLWQKLKLSRDDAKPLLRLKGFPSFPLVERQANEVDWWDMVCNVKKLINEKKEDGKVFWQNLAGYKRQEALRPYLSSEEDRKKGKKFARYQLGDLLLHLEKKHEGEDWGKVYDEAWERIDKKVEGLSKHIKLEEERRSEDAQSKAALTDWLRAKASFVIEGLKEADKDEFCRCELKLQKWYGDLRGKPFAIEAENSILDISGFSKQYNCAFIWQKDGVKKLNLYLIINYFKGGKLRFKKIKPEAFEANRFYTVINKKSGEIVPMEVNFNFDDPNLIILPLAFGKRQGREFIWNDLLSLETGSLKLANGRVIEKTLYNRRTRQDEPALFVALTFERREVLDSSNIKPMNLIGVDRGENIPAVIALTDPEGCPLSRFKDSLGNPTHILRIGESYKEKQRTIQAKKEVEQRRAGGYSRKYASKAKNLADDMVRNTARDLLYYAVTQDAMLIFENLSRGFGRQGKRTFMAERQYTRMEDWLTAKLAYEGLPSKTYLSKTLAQYTSKTCSNCGFTITSADYDRVLEKLKKTATGWMTTINGKELKVEGQITYYNRYKRQNVVKDLSVELDRLSEESVNNDISSWTKGRSGEALSLLKKRFSHRPVQEKFVCLNCGFETHADEQAALNIARSWLFLRSQEYKKYQTNKTTGNTDKRAFVETWQSFYRKKLKEVWKPAV

SEQ ID NO: 34155 - protein, 978 aa, synthetic construct
  REGION 1..978: note = engineered CasX variant
QEIKRINKIRRRLVKDSNTKKAGKTGPMKTLLVRVMTPDLRERLENLRKKPENIPQPISNTSQANLNKLLTDYTEMKKAILHVYWEEFQKDPVGLMSRVAQPASKKIDQNKLKPEMDEKGNLTTAGFACSQCGQPLFVYKLEQVSEKGKAYTNYFGRCNVAEHEKLILLAQLKPEKDSDEAVTYSLGKFGQRALDFYSIHVTKESTHPVKPLAQIAGNRYASYPVGKALSDACMGTIASFLSKYQDIIIEHQKVVKGNQKRLESLRELAGKENLEYPSVTLPPQPHTKEGVDAYNEVIARVRMWVNLNLWQKLKLSRDDAKPLLRLKGFPSFPLVERQANEVDWWDMVCNVKKLINEKKEDGKVFWQNLAGYKRQEALRPYLSSEEDRKKGKKFARYQLGDLLLHLEKKHGEDWGKVYDEAWERIDKKVEGLSKHIKLEEERRSEDAQSKAALTDWLRAKASFVIEGLKEADKDEFCRCDLKLQKWYGDLRGKPFAIEAENSILDISGFSKQYNCAFIWQKDGVKKLNLYLIINYFKGGKLRFKKIKPEAFEANRFYTVINKKSGEIVPMEVNFNFDDPNLIILPLAFGKRQGREFIWNDLLSLETGSLKLANGRVIEKTLYNRRTRQDEPALFVALTFERREVLDSSNIKPMNLIGVDRGENIPAVIALTDPEGCPLSRFKDSLGNPTHILRIGESYKEKQRTIQAKKEVEQRRAGGYSRKYASKAKNLADDMVRNTARDLLYYAVTQDAMLIFENLSRGFGRQGKRTFMAERQYTRMEDWLTAKLAYEGLPSKTYLSKTLAQYTSKTCSNCGFTITSADYDRVLEKLKKTATGWMTTINGKELKVEGQITYYNRYKRQNVVKDLSVELDRLSEESVNNDISSWTKGRSGEALSLLKKRFSHRPVQEKFVCLNCGFETHADEQAALNIARSWLFLRSQEYKKYQTNKTTGNTDKRAFVETWQSFYRKKLKEVWKPAV

SEQ ID NO: 34156 - protein, 978 aa, synthetic construct
  REGION 1..978: note = engineered CasX variant
QEIKRINKIRRRLVKDSNTKKAGKTGPMKTLLVRVMTPDLRERLENLRKKPENIPQPISNTSQANLNKLLTDYTEMKKAILHVYWEEFQKDPVGLMSRVAQPASKKIDQNKLKPEMDEKGNLTTAGFACSQCGQPLFVYKLEQVSEKGKAYTNYFGRCNVAEHEKLILLAQLKPEKDSDEAVTYSLGKFGQRALDFYSIHVTKESTHPVKPLAQIAGNRYASHPVGKALSDACMGTIASFLSKYQDIIIEHQKVVKGNQKRLESLRELAGKENLEYPSVTLPPQPHTKEGVDAYNEVIARVRMWVNLNLWQKLKLSRDDAKPLLRLKGFPSFPLVERQANEVDWWDMVCNVKKLINEKKEDGKVFWQNLAGYKRQEALRPYLSSEEDRKKGKKFARYQLGDLLLHLEKKHGEDWGKVYDEAWERIDKKVEGLSKHIKLEEERRSEDAQSKAALTDWLRAKASFVIEGLKEADKDEFCRCDLKLQKWYGDLRGKPFAIEAENSILDISGFSKQYNCAFIWQKDGVKKLNLYLIINYFKGGKLRFKKIKPEAFEANRFYTVINKKSGEIVPMEVNFNFDDPNLIILPLAFGKRQGREFIWNDLLSLETGSLKLANGRVIEKTLYNRRTRQDEPALFVALTFERREVLDSSNIKPMNLIGVDRGENIPAVIALTDPEGCPLSRFKDSLGNPTHILRIGESYKEKQRTIQAKKEVEQRRAGGYSRKYASKAKNLADDMVRNTARDLLYYAVTQDAMLIFENLSRGFGRQGKRTFMAERQYTRMEDWLTAKLAYEGLPSKTYLSKTLAQYTSKTCSNCGFTITSADYDRVLEKLKKTATGWMTTINGKELKVEGQITYYNRYKRQNVVKDLSVELDRLSEESVNNDISSWTKGRSGEALSLLKKRFSHRPVQEKFVCLNCGFETHADEQAALNIARSWLFLRSQEYKKYQTNKTTGNTDKRAFVETWQSFYRKKLKEVWKPAV

SEQ ID NO: 34157 - protein, 978 aa, synthetic construct
  REGION 1..978: note = engineered CasX variant
QEIKRINKIRRRLVKDSNTKKAGKTGPMKTLLVRVMTPDLRERLENLRKKPENIPQPISNTSQANLNKLLTDYTEMKKAILHVYWEEFQKDPVGLMSRVAQPASKKIDQNKLKPEMDEKGNLTTAGFACSQCGQPLFVYKLEQVSEKGKAYTNYFGRCNVAEHEKLILLAQLKPEKDSDEAVTYSLGKFGQRALDFYSIHVTKESTHPVKPLAQIAGNRYASSPVGKALSDACMGTIASFLSKYQDIIIEHQKVVKGNQKRLESLRELAGKENLEYPSVTLPPQPHTKEGVDAYNEVIARVRMWVNLNLWQKLKLSRDDAKPLLRLKGFPSFPLVERQANEVDWWDMVCNVKKLINEKKEDGKVFWQNLAGYKRQEALRPYLSSEEDRKKGKKFARYQLGDLLLHLEKKHGEDWGKVYDEAWERIDKKVEGLSKHIKLEEERRSEDAQSKAALTDWLRAKASFVIEGLKEADKDEFCRCDLKLQKWYGDLRGKPFAIEAENSILDISGFSKQYNCAFIWQKDGVKKLNLYLIINYFKGGKLRFKKIKPEAFEANRFYTVINKKSGEIVPMEVNFNFDDPNLIILPLAFGKRQGREFIWNDLLSLETGSLKLANGRVIEKTLYNRRTRQDEPALFVALTFERREVLDSSNIKPMNLIGVDRGENIPAVIALTDPEGCPLSRFKDSLGNPTHILRIGESYKEKQRTIQAKKEVEQRRAGGYSRKYASKAKNLADDMVRNTARDLLYYAVTQDAMLIFENLSRGFGRQGKRTFMAERQYTRMEDWLTAKLAYEGLPSKTYLSKTLAQYTSKTCSNCGFTITSADYDRVLEKLKKTATGWMTTINGKELKVEGQITYYNRYKRQNVVKDLSVELDRLSEESVNNDISSWTKGRSGEALSLLKKRFSHRPVQEKFVCLNCGFETHADEQAALNIARSWLFLRSQEYKKYQTNKTTGNTDKRAFVETWQSFYRKKLKEVWKPAV

SEQ ID NO: 34158 - protein, 978 aa, synthetic construct
  REGION 1..978: note = engineered CasX variant
QEIKRINKIRRRLVKDSNTKKAGKTGPMKTLLVRVMTPDLRERLENLRKKPENIPQPISNTSQANLNKLLTDYTEMKKAILHVYWEEFQKDPVGLMSRVAQPASKKIDQNKLKPEMDEKGNLTTAGFACSQCGQPLFVYKLEQVSEKGKAYTNYFGRCNVAEHEKLILLAQLKPEKDSDEAVTYSLGKFGQRALDFYSIHVTKESTHPVKPLAQIAGNRYASTPVGKALSDACMGTIASFLSKYQDIIIEHQKVVKGNQKRLESLRELAGKENLEYPSVTLPPQPHTKEGVDAYNEVIARVRMWVNLNLWQKLKLSRDDAKPLLRLKGFPSFPLVERQANEVDWWDMVCNVKKLINEKKEDGKVFWQNLAGYKRQEALRPYLSSEEDRKKGKKFARYQLGDLLLHLEKKHGEDWGKVYDEAWERIDKKVEGLSKHIKLEEERRSEDAQSKAALTDWLRAKASFVIEGLKEADKDEFCRCDLKLQKWYGDLRGKPFAIEAENSILDISGFSKQYNCAFIWQKDGVKKLNLYLIINYFKGGKLRFKKIKPEAFEANRFYTVINKKSGEIVPMEVNFNFDDPNLIILPLAFGKRQGREFIWNDLLSLETGSLKLANGRVIEKTLYNRRTRQDEPALFVALTFERREVLDSSNIKPMNLIGVDRGENIPAVIALTDPEGCPLSRFKDSLGNPTHILRIGESYKEKQRTIQAKKEVEQRRAGGYSRKYASKAKNLADDMVRNTARDLLYYAVTQDAMLIFENLSRGFGRQGKRTFMAERQYTRMEDWLTAKLAYEGLPSKTYLSKTLAQYTSKTCSNCGFTITSADYDRVLEKLKKTATGWMTTINGKELKVEGQITYYNRYKRQNVVKDLSVELDRLSEESVNNDISSWTKGRSGEALSLLKKRFSHRPVQEKFVCLNCGFETHADEQAALNIARSWLFLRSQEYKKYQTNKTTGNTDKRAFVETWQSFYRKKLKEVWKPAV

SEQ ID NO: 34159 - protein, 978 aa, synthetic construct
  REGION 1..978: note = engineered CasX variant
QEIKRINKIRRRLVKDSNTKKAGKTGPMKTLLVRVMTPDLRERLENLRKKPENIPQPISNTSQANLNKLLTDYTEMKKAILHVYWEEFQKDPVGLMSRVAQPASKKIDQNKLKPEMDEKGNLTTAGFACSQCGQPLFVYKLEQVSEKGKAYTNYFGRCNVAEHEKLILLAQLKPEKDSDEAVTYSLGKFGQRALDFYSIHVTKESTHPVKPLAQIAGNRYASAPVGKALSDACMGTIASFLSKYQDIIIEHQKVVKGNQKRLESLRELAGKENLEYPSVTLPPQPHTKEGVDAYNEVIARVRMWVNLNLWQKLKLSRDDAKPLLRLKGFPSFPLVERQANEVDWWDMVCNVKKLINEKKEDGKVFWQNLAGYKRQEALRPYLSSEEDRKKGKKFARYQLGDLLLHLEKKHGEDWGKVYDEAWERIDKKVEGLSKHIKLEEERRSEDAQSKAALTDWLRAKASFVIEGLKEADKDEFCRCDLKLQKWYGDLRGKPFAIEAENSILDISGFSKQYNCAFIWQKDGVKKLNLYLIINYFKGGKLRFKKIKPEAFEANRFYTVINKKSGEIVPMEVNFNFDDPNLIILPLAFGKRQGREFIWNDLLSLETGSLKLANGRVIEKTLYNRRTRQDEPALFVALTFERREVLDSSNIKPMNLIGVDRGENIPAVIALTDPEGCPLSRFKDSLGNPTHILRIGESYKEKQRTIQAKKEVEQRRAGGYSRKYASKAKNLADDMVRNTARDLLYYAVTQDAMLIFENLSRGFGRQGKRTFMAERQYTRMEDWLTAKLAYEGLPSKTYLSKTLAQYTSKTCSNCGFTITSADYDRVLEKLKKTATGWMTTINGKELKVEGQITYYNRYKRQNVVKDLSVELDRLSEESVNNDISSWTKGRSGEALSLLKKRFSHRPVQEKFVCLNCGFETHADEQAALNIARSWLFLRSQEYKKYQTNKTTGNTDKRAFVETWQSFYRKKLKEVWKPAV

SEQ ID NO: 34160 - protein, 978 aa, synthetic construct
  REGION 1..978: note = engineered CasX variant
QEIKRINKIRRRLVKDSNTKKAGKTGPMKTLLVRVMTPDLRERLENLRKKPENIPQPISNTSQANLNKLLTDYTEMKKAILHVYWEEFQKDPVGLMSRVAQPASKKIDQNKLKPEMDEKGNLTTAGFACSQCGQPLFVYKLEQVSEKGKAYTNYFGRCNVAEHEKLILLAQLKPEKDSDEAVTYSLGKFGQRALDFYSIHVTKESTHPVKPLAQIAGNRYASVPVGKALSDACMGTIASFLSKYQDIIIEHQKVVKGNQKRLESLRELAGKENLEYPSVTLPPQPHTKEGVDAYNEVIARVRMWVNLNLWQKLKLSRDDAKPLLRLKGFPSFPLVERQANEVDWWDMVCNVKKLINEKKEDGKVFWQNLAGYKRQEALRPYLSSEEDRKKGKKFARYQLGDLLLHLEKKHGEDWGKVYDEAWERIDKKVEGLSKHIKLEEERRSEDAQSKAALTDWLRAKASFVIEGLKEADKDEFCRCDLKLQKWYGDLRGKPFAIEAENSILDISGFSKQYNCAFIWQKDGVKKLNLYLIINYFKGGKLRFKKIKPEAFEANRFYTVINKKSGEIVPMEVNFNFDDPNLIILPLAFGKRQGREFIWNDLLSLETGSLKLANGRVIEKTLYNRRTRQDEPALFVALTFERREVLDSSNIKPMNLIGVDRGENIPAVIALTDPEGCPLSRFKDSLGNPTHILRIGESYKEKQRTIQAKKEVEQRRAGGYSRKYASKAKNLADDMVRNTARDLLYYAVTQDAMLIFENLSRGFGRQGKRTFMAERQYTRMEDWLTAKLAYEGLPSKTYLSKTLAQYTSKTCSNCGFTITSADYDRVLEKLKKTATGWMTTINGKELKVEGQITYYNRYKRQNVVKDLSVELDRLSEESVNNDISSWTKGRSGEALSLLKKRFSHRPVQEKFVCLNCGFETHADEQAALNIARSWLFLRSQEYKKYQTNKTTGNTDKRAFVETWQSFYRKKLKEVWKPAV

SEQ ID NO: 34161 - protein, 978 aa, synthetic construct
  REGION 1..978: note = engineered CasX variant
QEIKRINKIRRRLVKDSNTKKAGKTGPMKTLLVRVMTPDLRERLENLRKKPENIPQPISNTSQANLNKLLTDYTEMKKAILHVYWEEFQKDPVGLMSRVAQPASKKIDQNKLKPEMDEKGNLTTAGFACSQCGQPLFVYKLEQVSEKGKAYTNYFGRCNVAEHEKLIKLAQLKPEKDSDEAVTYSLGKFGQRALDFYSIHVTKESTHPVKPLAQIAGNRYASGPVGKALSDACMGTIASFLSKYQDIIIEHQKVVKGNQKRLESLRELAGKENLEYPSVTLPPQPHTKEGVDAYNEVIARVRMWVNLNLWQKLKLSRDDAKPLLRLKGFPSFPLVERQANEVDWWDMVCNVKKLINEKKEDGKVFWQNLAGYKRQEALRPYLSSEEDRKKGKKFARYQLGDLLLHLEKKHGEDWGKVYDEAWERIDKKVEGLSKHIKLEEERRSEDAQSKAALTDWLRAKASFVIEGLKEADKDEFCRCDLKLQKWYGDLRGKPFAIEAENSILDISGFSKQYNCAFIWQKDGVKKLNLYLIINYFKGGKLRFKKIKPEAFEANRFYTVINKKSGEIVPMEVNFNFDDPNLIILPLAFGKRQGREFIWNDLLSLETGSLKLANGRVIEKTLYNRRTRQDEPALFVALTFERREVLDSSNIKPMNLIGVDRGENIPAVIALTDPEGCPLSRFKDSLGNPTHILRIGESYKEKQRTIQAKKEVEQRRAGGYSRKYASKAKNLADDMVRNTARDLLYYAVTQDAMLIFENLSRGFGRQGKRTFMAERQYTRMEDWLTAKLAYEGLPSKTYLSKTLAQYTSKTCSNCGFTITSADYDRVLEKLKKTATGWMTTINGKELKVEGQITYYNRYKRQNVVKDLSVELDRLSEESVNNDISSWTKGRSGEALSLLKKRFSHRPVQEKFVCLNCGFETHADEQAALNIARSWLFLRSQEYKKYQTNKTTGNTDKRAFVETWQSFYRKKLKEVWKPAV

SEQ ID NO: 34162 - protein, 977 aa, synthetic construct
  REGION 1..977: note = engineered CasX variant
QEIKRINKIRRRLVKDSNTKKAGKTGPMKTLLVRVMTPDLRERLENLRKKPENIPQPISNTSQANLNKLLTDYTEMKKAILHVYWEEFQKDPVGLMSRVAQPASKKIDQNKLKPEMDEKGNLTTAGFACSQCGQPLFVYKLEQVSEKGKAYTNYFGRCNVAEHEKLILLAQLKPEKDSDEAVTYSLGKFGQRALDFYSIHVTKESTHPVKPLAQIAGNRYASPVGKALSDACMGTIASFLSKYQDIIIEHQKVVKGNQKRLESLRELAGKENLEYPSVTLPPQPHTKEGVDAYNEVIARVRMWVNLNLWQKLKLSRDDAKPLLRLKGFPSFPLVERQANEVDWWDMVCNVKKLINEKKEDGKVFWQNLAGYKRQEALRPYLSSEEDRKKGKKFARYQLGDLLLHLEKKHGEDWGKVYDEAWERIDKKVEGLSKHIKLEEERRSEDAQSKAALTDWLRAKASFVIEGLKEADKDEFCRCDLKLQKWYGDLRGKPFAIEAENSILDISGFSKQYNCAFIWQKDGVKKLNLYLIINYFKGGKLRFKKIKPEAFEANRFYTVINKKSGEIVPMEVNFNFDDPNLIILPLAFGKRQGREFIWNDLLSLETGSLKLANGRVIEKTLYNRRTRQDEPALFVALTFERREVLDSSNIKPMNLIGVDRGENIPAVIALTDPEGCPLSRFKDSLGNPTHILRIGESYKEKQRTIQAKKEVEQRRAGGYSRKYASKAKNLADDMVRNTARDLLYYAVTQDAMLIFENLSRGFGRQGKRTFMAERQYTRMEDWLTAKLAYEGLPSKTYLSKTLAQYTSKTCSNCGFTITSADYDRVLEKLKKTATGWMTTINGKELKVEGQITYYNRYKRQNVVKDLSVELDRLSEESVNNDISSWTKGRSGEALSLLKKRFSHRPVQEKFVCLNCGFETHADEQAALNIARSWLFLRSQEYKKYQTNKTTGNTDKRAFVETWQSFYRKKLKEVWKPAV

SEQ ID NO: 34163 - protein, 978 aa, synthetic construct
  REGION 1..978: note = engineered CasX variant
QEIKRINKIRRRLVKDSNTKKAGKTGPMKTLLVRVMTPDLRERLENLRKKPENIPQPISNTSQANLNKLLTDYTEMKKAILHVYWEEFQKDPVGLMSRVAQPASKKIDQNKLKPEMDEKGNLTTAGFACSQCGQPLFVYKLEQVSEKGKAYTNYFGRCNVAEHEKLILLAQLKPEKDSDEAVTYSLGKFGQRALDFYSIHVTKESTHPVKPLAQIAGNRYASYPVGKALSDACMGTIASFLSKYQDIIIEHQKVVKGNQKRLESLRELAGKENLEYPSVTLPPQPHTKEGVDAYNEVIARVRMWVNLNLWQKLKLSRDDAKPLLRLKGFPSFPLVERQANEVDWWDMVCNVKKLINEKKEDGKVFWQNLAGYKRQEALRPYLSSEEDRKKGKKFARYQLGDLLLHLEKKHGEDWGKVYDEAWERIDKKVEGLSKHIKLEEERRSEDAQSKAALTDWLRAKASFVIEGLKEADKDEFCRCELKLQKWYGDLRGKPFAIEAENSILDISGFSKQYNCAFIWQKDGVKKLNLYLIINYFKGGKLRFKKIKPEAFEANRFYTVINKKSGEIVPMEVNFNFDDPNLIILPLAFGKRFGREFIWNDLLSLETGSLKLANGRVIEKTLYNRRTRQDEPALFVALTFERREVLDSSNIKPMNLIGVDRGENIPAVIALTDPEGCPLSRFKDSLGNPTHILRIGESYKEKQRTIQAKKEVEQRRAGGYSRKYASKAKNLADDMVRNTARDLLYYAVTQDAMLIFENLSRGFGRQGKRTFMAERQYTRMEDWLTAKLAYEGLPSKTYLSKTLAQYTSKTCSNCGFTITSADYDRVLEKLKKTATGWMTTINGKELKVEGQITYYNRYKRQNVVKDLSVELDRLSEESVNNDISSWTKGRSGEALSLLKKRFSHRPVQEKFVCLNCGFETHADEQAALNIARSWLFLRSQEYKKYQTNKTTGNTDKRAFVETWQSFYRKKLKEVWKPAV

SEQ ID NO: 34164 - protein, 978 aa, synthetic construct
  REGION 1..978: note = engineered CasX variant
QEIKRINKIRRRLVKDSNTKKAGKTGPMKTLLVRVMTPDLRERLENLRKKPENIPQPISNTSQANLNKLLTDYTEMKKAILHVYWEEFQKDPVGLMSRVAQPASKKIDQNKLKPEMDEKGNLTTAGFACSQCGQPLFVYKLEQVSEKGKAYTNYFGRCNVAEHEKLILLAQLKPEKDSDEAVTYSLGKFGQRALDFYSIHVTKESTHPVKPLAQIAGNRYASHPVGKALSDACMGTIASFLSKYQDIIIEHQKVVKGNQKRLESLRELAGKENLEYPSVTLPPQPHTKEGVDAYNEVIARVRMWVNLNLWQKLKLSRDDAKPLLRLKGFPSFPLVERQANEVDWWDMVCNVKKLINEKKEDGKVFWQNLAGYKRQEALRPYLSSEEDRKKGKKFARYQLGDLLLHLEKKHGEDWGKVYDEAWERIDKKVEGLSKHIKLEEERRSEDAQSKAALTDWLRAKASFVIEGLKEADKDEFCRCELKLQKWYGDLRGKPFAIEAENSILDISGFSKQYNCAFIWQKDGVKKLNLYLIINYFKGGKLRFKKIKPEAFEANRFYTVINKKSGEIVPMEVNFNFDDPNLIILPLAFGKRFGREFIWNDLLSLETGSLKLANGRVIEKTLYNRRTRQDEPALFVALTFERREVLDSSNIKPMNLIGVDRGENIPAVIALTDPEGCPLSRFKDSLGNPTHILRIGESYKEKQRTIQAKKEVEQRRAGGYSRKYASKAKNLADDMVRNTARDLLYYAVTQDAMLIFENLSRGFGRQGKRTFMAERQYTRMEDWLTAKLAYEGLPSKTYLSKTLAQYTSKTCSNCGFTITSADYDRVLEKLKKTATGWMTTINGKELKVEGQITYYNRYKRQNVVKDLSVELDRLSEESVNNDISSWTKGRSGEALSLLKKRFSHRPVQEKFVCLNCGFETHADEQAALNIARSWLFLRSQEYKKYQTNKTTGNTDKRAFVETWQSFYRKKLKEVWKPAV

SEQ ID NO: 34165 - protein, 978 aa, synthetic construct
  REGION 1..978: note = engineered CasX variant
QEIKRINKIRRRLVKDSNTKKAGKTGPMKTLLVRVMTPDLRERLENLRKKPENIPQPISNTSQANLNKLLTDYTEMKKAILHVYWEEFQKDPVGLMSRVAQPASKKIDQNKLKPEMDEKGNLTTAGFACSQCGQPLFVYKLEQVSEKGKAYTNYFGRCNVAEHEKLILLAQLKPEKDSDEAVTYSLGKFGQRALDFYSIHVTKESTHPVKPLAQIAGNRYASSPVGKALSDACMGTIASFLSKYQDIIIEHQKVVKGNQKRLESLRELAGKENLEYPSVTLPPQPHTKEGVDAYNEVIARVRMWVNLNLWQKLKLSRDDAKPLLRLKGFPSFPLVERQANEVDWWDMVCNVKKLINEKKEDGKVFWQNLAGYKRQEALRPYLSSEEDRKKGKKFARYQLGDLLLHLEKKHGEDWGKVYDEAWERIDKKVEGLSKHIKLEEERRSEDAQSKAALTDWLRAKASFVIEGLKEADKDEFCRCELKLQKWYGDLRGKPFAIEAENSILDISGFSKQYNCAFIWQKDGVKKLNLYLIINYFKGGKLRFKKIKPEAFEANRFYTVINKKSGEIVPMEVNFNFDDPNLIILPLAFGKRFGREFIWNDLLSLETGSLKLANGRVIEKTLYNRRTRQDEPALFVALTFERREVLDSSNIKPMNLIGVDRGENIPAVIALTDPEGCPLSRFKDSLGNPTHILRIGESYKEKQRTIQAKKEVEQRRAGGYSRKYASKAKNLADDMVRNTARDLLYYAVTQDAMLIFENLSRGFGRQGKRTFMAERQYTRMEDWLTAKLAYEGLPSKTYLSKTLAQYTSKTCSNCGFTITSADYDRVLEKLKKTATGWMTTINGKELKVEGQITYYNRYKRQNVVKDLSVELDRLSEESVNNDISSWTKGRSGEALSLLKKRFSHRPVQEKFVCLNCGFETHADEQAALNIARSWLFLRSQEYKKYQTNKTTGNTDKRAFVETWQSFYRKKLKEVWKPAV

SEQ ID NO: 34166 - protein, 978 aa, synthetic construct
  REGION 1..978: note = engineered CasX variant
QEIKRINKIRRRLVKDSNTKKAGKTGPMKTLLVRVMTPDLRERLENLRKKPENIPQPISNTSQANLNKLLTDYTEMKKAILHVYWEEFQKDPVGLMSRVAQPASKKIDQNKLKPEMDEKGNLTTAGFACSQCGQPLFVYKLEQVSEKGKAYTNYFGRCNVAEHEKLILLAQLKPEKDSDEAVTYSLGKFGQRALDFYSIHVTKESTHPVKPLAQIAGNRYASTPVGKALSDACMGTIASFLSKYQDIIIEHQKVVKGNQKRLESLRELAGKENLEYPSVTLPPQPHTKEGVDAYNEVIARVRMWVNLNLWQKLKLSRDDAKPLLRLKGFPSFPLVERQANEVDWWDMVCNVKKLINEKKEDGKVFWQNLAGYKRQEALRPYLSSEEDRKKGKKFARYQLGDLLLHLEKKHGEDWGKVYDEAWERIDKKVEGLSKHIKLEEERRSEDAQSKAALTDWLRAKASFVIEGLKEADKDEFCRCELKLQKWYGDLRGKPFAIEAENSILDISGFSKQYNCAFIWQKDGVKKLNLYLIINYFKGGKLRFKKIKPEAFEANRFYTVINKKSGEIVPMEVNFNFDDPNLIILPLAFGKRFGREFIWNDLLSLETGSLKLANGRVIEKTLYNRRTRQDEPALFVALTFERREVLDSSNIKPMNLIGVDRGENIPAVIALTDPEGCPLSRFKDSLGNPTHILRIGESYKEKQRTIQAKKEVEQRRAGGYSRKYASKAKNLADDMVRNTARDLLYYAVTQDAMLIFENLSRGFGRQGKRTFMAERQYTRMEDWLTAKLAYEGLPSKTYLSKTLAQYTSKTCSNCGFTITSADYDRVLEKLKKTATGWMTTINGKELKVEGQITYYNRYKRQNVVKDLSVELDRLSEESVNNDISSWTKGRSGEALSLLKKRFSHRPVQEKFVCLNCGFETHADEQAALNIARSWLFLRSQEYKKYQTNKTTGNTDKRAFVETWQSFYRKKLKEVWKPAV

SEQ ID NO: 34167 - protein, 978 aa, synthetic construct
  REGION 1..978: note = engineered CasX variant
QEIKRINKIRRRLVKDSNTKKAGKTGPMKTLLVRVMTPDLRERLENLRKKPENIPQPISNTSQANLNKLLTDYTEMKKAILHVYWEEFQKDPVGLMSRVAQPASKKIDQNKLKPEMDEKGNLTTAGFACSQCGQPLFVYKLEQVSEKGKAYTNYFGRCNVAEHEKLILLAQLKPEKDSDEAVTYSLGKFGQRALDFYSIHVTKESTHPVKPLAQIAGNRYASAPVGKALSDACMGTIASFLSKYQDIIIEHQKVVKGNQKRLESLRELAGKENLEYPSVTLPPQPHTKEGVDAYNEVIARVRMWVNLNLWQKLKLSRDDAKPLLRLKGFPSFPLVERQANEVDWWDMVCNVKKLINEKKEDGKVFWQNLAGYKRQEALRPYLSSEEDRKKGKKFARYQLGDLLLHLEKKHGEDWGKVYDEAWERIDKKVEGLSKHIKLEEERRSEDAQSKAALTDWLRAKASFVIEGLKEADKDEFCRCELKLQKWYGDLRGKPFAIEAENSILDISGFSKQYNCAFIWQKDGVKKLNLYLIINYFKGGKLRFKKIKPEAFEANRFYTVINKKSGEIVPMEVNFNFDDPNLIILPLAFGKRFGREFIWNDLLSLETGSLKLANGRVIEKTLYNRRTRQDEPALFVALTFERREVLDSSNIKPMNLIGVDRGENIPAVIALTDPEGCPLSRFKDSLGNPTHILRIGESYKEKQRTIQAKKEVEQRRAGGYSRKYASKAKNLADDMVRNTARDLLYYAVTQDAMLIFENLSRGFGRQGKRTFMAERQYTRMEDWLTAKLAYEGLPSKTYLSKTLAQYTSKTCSNCGFTITSADYDRVLEKLKKTATGWMTTINGKELKVEGQITYYNRYKRQNVVKDLSVELDRLSEESVNNDISSWTKGRSGEALSLLKKRFSHRPVQEKFVCLNCGFETHADEQAALNIARSWLFLRSQEYKKYQTNKTTGNTDKRAFVETWQSFYRKKLKEVWKPAV

SEQ ID NO: 34168 - protein, 978 aa, synthetic construct
  REGION 1..978: note = engineered CasX variant
QEIKRINKIRRRLVKDSNTKKAGKTGPMKTLLVRVMTPDLRERLENLRKKPENIPQPISNTSQANLNKLLTDYTEMKKAILHVYWEEFQKDPVGLMSRVAQPASKKIDQNKLKPEMDEKGNLTTAGFACSQCGQPLFVYKLEQVSEKGKAYTNYFGRCNVAEHEKLILLAQLKPEKDSDEAVTYSLGKFGQRALDFYSIHVTKESTHPVKPLAQIAGNRYASVPVGKALSDACMGTIASFLSKYQDIIIEHQKVVKGNQKRLESLRELAGKENLEYPSVTLPPQPHTKEGVDAYNEVIARVRMWVNLNLWQKLKLSRDDAKPLLRLKGFPSFPLVERQANEVDWWDMVCNVKKLINEKKEDGKVFWQNLAGYKRQEALRPYLSSEEDRKKGKKFARYQLGDLLLHLEKKHGEDWGKVYDEAWERIDKKVEGLSKHIKLEEERRSEDAQSKAALTDWLRAKASFVIEGLKEADKDEFCRCELKLQKWYGDLRGKPFAIEAENSILDISGFSKQYNCAFIWQKDGVKKLNLYLIINYFKGGKLRFKKIKPEAFEANRFYTVINKKSGEIVPMEVNFNFDDPNLIILPLAFGKRFGREFIWNDLLSLETGSLKLANGRVIEKTLYNRRTRQDEPALFVALTFERREVLDSSNIKPMNLIGVDRGENIPAVIALTDPEGCPLSRFKDSLGNPTHILRIGESYKEKQRTIQAKKEVEQRRAGGYSRKYASKAKNLADDMVRNTARDLLYYAVTQDAMLIFENLSRGFGRQGKRTFMAERQYTRMEDWLTAKLAYEGLPSKTYLSKTLAQYTSKTCSNCGFTITSADYDRVLEKLKKTATGWMTTINGKELKVEGQITYYNRYKRQNVVKDLSVELDRLSEESVNNDISSWTKGRSGEALSLLKKRFSHRPVQEKFVCLNCGFETHADEQAALNIARSWLFLRSQEYKKYQTNKTTGNTDKRAFVETWQSFYRKKLKEVWKPAV

SEQ ID NO: 34169 - protein, 978 aa, synthetic construct
  REGION 1..978: note = engineered CasX variant
QEIKRINKIRRRLVKDSNTKKAGKTGPMKTLLVRVMTPDLRERLENLRKKPENIPQPISNTSQANLNKLLTDYTEMKKAILHVYWEEFQKDPVGLMSRVAQPASKKIDQNKLKPEMDEKGNLTTAGFACSQCGQPLFVYKLEQVSEKGKAYTNYFGRCNVAEHEKLIKLAQLKPEKDSDEAVTYSLGKFGQRALDFYSIHVTKESTHPVKPLAQIAGNRYASGPVGKALSDACMGTIASFLSKYQDIIIEHQKVVKGNQKRLESLRELAGKENLEYPSVTLPPQPHTKEGVDAYNEVIARVRMWVNLNLWQKLKLSRDDAKPLLRLKGFPSFPLVERQANEVDWWDMVCNVKKLINEKKEDGKVFWQNLAGYKRQEALRPYLSSEEDRKKGKKFARYQLGDLLLHLEKKHGEDWGKVYDEAWERIDKKVEGLSKHIKLEEERRSEDAQSKAALTDWLRAKASFVIEGLKEADKDEFCRCELKLQKWYGDLRGKPFAIEAENSILDISGFSKQYNCAFIWQKDGVKKLNLYLIINYFKGGKLRFKKIKPEAFEANRFYTVINKKSGEIVPMEVNFNFDDPNLIILPLAFGKRFGREFIWNDLLSLETGSLKLANGRVIEKTLYNRRTRQDEPALFVALTFERREVLDSSNIKPMNLIGVDRGENIPAVIALTDPEGCPLSRFKDSLGNPTHILRIGESYKEKQRTIQAKKEVEQRRAGGYSRKYASKAKNLADDMVRNTARDLLYYAVTQDAMLIFENLSRGFGRQGKRTFMAERQYTRMEDWLTAKLAYEGLPSKTYLSKTLAQYTSKTCSNCGFTITSADYDRVLEKLKKTATGWMTTINGKELKVEGQITYYNRYKRQNVVKDLSVELDRLSEESVNNDISSWTKGRSGEALSLLKKRFSHRPVQEKFVCLNCGFETHADEQAALNIARSWLFLRSQEYKKYQTNKTTGNTDKRAFVETWQSFYRKKLKEVWKPAV

SEQ ID NO: 34170 - protein, 977 aa, synthetic construct
  REGION 1..977: note = engineered CasX variant
QEIKRINKIRRRLVKDSNTKKAGKTGPMKTLLVRVMTPDLRERLENLRKKPENIPQPISNTSQANLNKLLTDYTEMKKAILHVYWEEFQKDPVGLMSRVAQPASKKIDQNKLKPEMDEKGNLTTAGFACSQCGQPLFVYKLEQVSEKGKAYTNYFGRCNVAEHEKLILLAQLKPEKDSDEAVTYSLGKFGQRALDFYSIHVTKESTHPVKPLAQIAGNRYASPVGKALSDACMGTIASFLSKYQDIIIEHQKVVKGNQKRLESLRELAGKENLEYPSVTLPPQPHTKEGVDAYNEVIARVRMWVNLNLWQKLKLSRDDAKPLLRLKGFPSFPLVERQANEVDWWDMVCNVKKLINEKKEDGKVFWQNLAGYKRQEALRPYLSSEEDRKKGKKFARYQLGDLLLHLEKKHGEDWGKVYDEAWERIDKKVEGLSKHIKLEEERRSEDAQSKAALTDWLRAKASFVIEGLKEADKDEFCRCELKLQKWYGDLRGKPFAIEAENSILDISGFSKQYNCAFIWQKDGVKKLNLYLIINYFKGGKLRFKKIKPEAFEANRFYTVINKKSGEIVPMEVNFNFDDPNLIILPLAFGKRFGREFIWNDLLSLETGSLKLANGRVIEKTLYNRRTRQDEPALFVALTFERREVLDSSNIKPMNLIGVDRGENIPAVIALTDPEGCPLSRFKDSLGNPTHILRIGESYKEKQRTIQAKKEVEQRRAGGYSRKYASKAKNLADDMVRNTARDLLYYAVTQDAMLIFENLSRGFGRQGKRTFMAERQYTRMEDWLTAKLAYEGLPSKTYLSKTLAQYTSKTCSNCGFTITSADYDRVLEKLKKTATGWMTTINGKELKVEGQITYYNRYKRQNVVKDLSVELDRLSEESVNNDISSWTKGRSGEALSLLKKRFSHRPVQEKFVCLNCGFETHADEQAALNIARSWLFLRSQEYKKYQTNKTTGNTDKRAFVETWQSFYRKKLKEVWKPAV

SEQ ID NO: 34171 - protein, 978 aa, synthetic construct
  REGION 1..978: note = engineered CasX variant
QEIKRINKIRRRLVKDSNTKKAGKTGPMKTLLVRVMTPDLRERLENLRKKPENIPQPISNTSQANLNKLLTDYTEMKKAILHVYWEEFQKDPVGLMSRVAQPASKKIDQNKLKPEMDEKGNLTTAGFACSQCGQPLFVYKLEQVSEKGKAYTNYFGRCNVAEHEKLILLAQLKPEKDSDEAVTYSLGKFGQRALDFYSIHVTKESTHPVKPLAQIAGNRYASYPVGKALSDACMGTIASFLSKYQDIIIEHQKVVKGNQKRLESLRELAGKENLEYPSVTLPPQPHTKEGVDAYNEVIARVRMWVNLNLWQKLKLSRDDAKPLLRLKGFPSFPLVERQANEVDWWDMVCNVKKLINEKKEDGKVFWQNLAGYKRQEALRPYLSSEEDRKKGKKFARYQLGDLLLHLEKKHGEDWGKVYDEAWERIDKKVEGLSKHIKLEEERRSEDAQSKAALTDWLRAKASFVIEGLKEADKDEFCRCELKLQKWYGDLRGKPFAIEAENSILDISGFSKQYNCAFIWQKDGVKKLNLYLIINYFKGGKLRFKKIKPEAFEANRFYTVINKKSGEIVPMEVNFNFDDPNLIILPLAFGKRVGREFIWNDLLSLETGSLKLANGRVIEKTLYNRRTRQDEPALFVALTFERREVLDSSNIKPMNLIGVDRGENIPAVIALTDPEGCPLSRFKDSLGNPTHILRIGESYKEKQRTIQAKKEVEQRRAGGYSRKYASKAKNLADDMVRNTARDLLYYAVTQDAMLIFENLSRGFGRQGKRTFMAERQYTRMEDWLTAKLAYEGLPSKTYLSKTLAQYTSKTCSNCGFTITSADYDRVLEKLKKTATGWMTTINGKELKVEGQITYYNRYKRQNVVKDLSVELDRLSEESVNNDISSWTKGRSGEALSLLKKRFSHRPVQEKFVCLNCGFETHADEQAALNIARSWLFLRSQEYKKYQTNKTTGNTDKRAFVETWQSFYRKKLKEVWKPAV

SEQ ID NO: 34172 - protein, 978 aa, synthetic construct
  REGION 1..978: note = engineered CasX variant
QEIKRINKIRRRLVKDSNTKKAGKTGPMKTLLVRVMTPDLRERLENLRKKPENIPQPISNTSQANLNKLLTDYTEMKKAILHVYWEEFQKDPVGLMSRVAQPASKKIDQNKLKPEMDEKGNLTTAGFACSQCGQPLFVYKLEQVSEKGKAYTNYFGRCNVAEHEKLILLAQLKPEKDSDEAVTYSLGKFGQRALDFYSIHVTKESTHPVKPLAQIAGNRYASHPVGKALSDACMGTIASFLSKYQDIIIEHQKVVKGNQKRLESLRELAGKENLEYPSVTLPPQPHTKEGVDAYNEVIARVRMWVNLNLWQKLKLSRDDAKPLLRLKGFPSFPLVERQANEVDWWDMVCNVKKLINEKKEDGKVFWQNLAGYKRQEALRPYLSSEEDRKKGKKFARYQLGDLLLHLEKKHGEDWGKVYDEAWERIDKKVEGLSKHIKLEEERRSEDAQSKAALTDWLRAKASFVIEGLKEADKDEFCRCELKLQKWYGDLRGKPFAIEAENSILDISGFSKQYNCAFIWQKDGVKKLNLYLIINYFKGGKLRFKKIKPEAFEANRFYTVINKKSGEIVPMEVNFNFDDPNLIILPLAFGKRVGREFIWNDLLSLETGSLKLANGRVIEKTLYNRRTRQDEPALFVALTFERREVLDSSNIKPMNLIGVDRGENIPAVIALTDPEGCPLSRFKDSLGNPTHILRIGESYKEKQRTIQAKKEVEQRRAGGYSRKYASKAKNLADDMVRNTARDLLYYAVTQDAMLIFENLSRGFGRQGKRTFMAERQYTRMEDWLTAKLAYEGLPSKTYLSKTLAQYTSKTCSNCGFTITSADYDRVLEKLKKTATGWMTTINGKELKVEGQITYYNRYKRQNVVKDLSVELDRLSEESVNNDISSWTKGRSGEALSLLKKRFSHRPVQEKFVCLNCGFETHADEQAALNIARSWLFLRSQEYKKYQTNKTTGNTDKRAFVETWQSFYRKKLKEVWKPAV

SEQ ID NO: 34173 - protein, 978 aa, synthetic construct
  REGION 1..978: note = engineered CasX variant
QEIKRINKIRRRLVKDSNTKKAGKTGPMKTLLVRVMTPDLRERLENLRKKPENIPQPISNTSQANLNKLLTDYTEMKKAILHVYWEEFQKDPVGLMSRVAQPASKKIDQNKLKPEMDEKGNLTTAGFACSQCGQPLFVYKLEQVSEKGKAYTNYFGRCNVAEHEKLILLAQLKPEKDSDEAVTYSLGKFGQRALDFYSIHVTKESTHPVKPLAQIAGNRYASSPVGKALSDACMGTIASFLSKYQDIIIEHQKVVKGNQKRLESLRELAGKENLEYPSVTLPPQPHTKEGVDAYNEVIARVRMWVNLNLWQKLKLSRDDAKPLLRLKGFPSFPLVERQANEVDWWDMVCNVKKLINEKKEDGKVFWQNLAGYKRQEALRPYLSSEEDRKKGKKFARYQLGDLLLHLEKKHGEDWGKVYDEAWERIDKKVEGLSKHIKLEEERRSEDAQSKAALTDWLRAKASFVIEGLKEADKDEFCRCELKLQKWYGDLRGKPFAIEAENSILDISGFSKQYNCAFIWQKDGVKKLNLYLIINYFKGGKLRFKKIKPEAFEANRFYTVINKKSGEIVPMEVNFNFDDPNLIILPLAFGKRVGREFIWNDLLSLETGSLKLANGRVIEKTLYNRRTRQDEPALFVALTFERREVLDSSNIKPMNLIGVDRGENIPAVIALTDPEGCPLSRFKDSLGNPTHILRIGESYKEKQRTIQAKKEVEQRRAGGYSRKYASKAKNLADDMVRNTARDLLYYAVTQDAMLIFENLSRGFGRQGKRTFMAERQYTRMEDWLTAKLAYEGLPSKTYLSKTLAQYTSKTCSNCGFTITSADYDRVLEKLKKTATGWMTTINGKELKVEGQITYYNRYKRQNVVKDLSVELDRLSEESVNNDISSWTKGRSGEALSLLKKRFSHRPVQEKFVCLNCGFETHADEQAALNIARSWLFLRSQEYKKYQTNKTTGNTDKRAFVETWQSFYRKKLKEVWKPAV

SEQ ID NO: 34174 - protein, 978 aa, synthetic construct
  REGION 1..978: note = engineered CasX variant
QEIKRINKIRRRLVKDSNTKKAGKTGPMKTLLVRVMTPDLRERLENLRKKPENIPQPISNTSQANLNKLLTDYTEMKKAILHVYWEEFQKDPVGLMSRVAQPASKKIDQNKLKPEMDEKGNLTTAGFACSQCGQPLFVYKLEQVSEKGKAYTNYFGRCNVAEHEKLILLAQLKPEKDSDEAVTYSLGKFGQRALDFYSIHVTKESTHPVKPLAQIAGNRYASTPVGKALSDACMGTIASFLSKYQDIIIEHQKVVKGNQKRLESLRELAGKENLEYPSVTLPPQPHTKEGVDAYNEVIARVRMWVNLNLWQKLKLSRDDAKPLLRLKGFPSFPLVERQANEVDWWDMVCNVKKLINEKKEDGKVFWQNLAGYKRQEALRPYLSSEEDRKKGKKFARYQLGDLLLHLEKKHGEDWGKVYDEAWERIDKKVEGLSKHIKLEEERRSEDAQSKAALTDWLRAKASFVIEGLKEADKDEFCRCELKLQKWYGDLRGKPFAIEAENSILDISGFSKQYNCAFIWQKDGVKKLNLYLIINYFKGGKLRFKKIKPEAFEANRFYTVINKKSGEIVPMEVNFNFDDPNLIILPLAFGKRVGREFIWNDLLSLETGSLKLANGRVIEKTLYNRRTRQDEPALFVALTFERREVLDSSNIKPMNLIGVDRGENIPAVIALTDPEGCPLSRFKDSLGNPTHILRIGESYKEKQRTIQAKKEVEQRRAGGYSRKYASKAKNLADDMVRNTARDLLYYAVTQDAMLIFENLSRGFGRQGKRTFMAERQYTRMEDWLTAKLAYEGLPSKTYLSKTLAQYTSKTCSNCGFTITSADYDRVLEKLKKTATGWMTTINGKELKVEGQITYYNRYKRQNVVKDLSVELDRLSEESVNNDISSWTKGRSGEALSLLKKRFSHRPVQEKFVCLNCGFETHADEQAALNIARSWLFLRSQEYKKYQTNKTTGNTDKRAFVETWQSFYRKKLKEVWKPAV

SEQ ID NO: 34175 - protein, 978 aa, synthetic construct
  REGION 1..978: note = engineered CasX variant
QEIKRINKIRRRLVKDSNTKKAGKTGPMKTLLVRVMTPDLRERLENLRKKPENIPQPISNTSQANLNKLLTDYTEMKKAILHVYWEEFQKDPVGLMSRVAQPASKKIDQNKLKPEMDEKGNLTTAGFACSQCGQPLFVYKLEQVSEKGKAYTNYFGRCNVAEHEKLILLAQLKPEKDSDEAVTYSLGKFGQRALDFYSIHVTKESTHPVKPLAQIAGNRYASAPVGKALSDACMGTIASFLSKYQDIIIEHQKVVKGNQKRLESLRELAGKENLEYPSVTLPPQPHTKEGVDAYNEVIARVRMWVNLNLWQKLKLSRDDAKPLLRLKGFPSFPLVERQANEVDWWDMVCNVKKLINEKKEDGKVFWQNLAGYKRQEALRPYLSSEEDRKKGKKFARYQLGDLLLHLEKKHGEDWGKVYDEAWERIDKKVEGLSKHIKLEEERRSEDAQSKAALTDWLRAKASFVIEGLKEADKDEFCRCELKLQKWYGDLRGKPFAIEAENSILDISGFSKQYNCAFIWQKDGVKKLNLYLIINYFKGGKLRFKKIKPEAFEANRFYTVINKKSGEIVPMEVNFNFDDPNLIILPLAFGKRVGREFIWNDLLSLETGSLKLANGRVIEKTLYNRRTRQDEPALFVALTFERREVLDSSNIKPMNLIGVDRGENIPAVIALTDPEGCPLSRFKDSLGNPTHILRIGESYKEKQRTIQAKKEVEQRRAGGYSRKYASKAKNLADDMVRNTARDLLYYAVTQDAMLIFENLSRGFGRQGKRTFMAERQYTRMEDWLTAKLAYEGLPSKTYLSKTLAQYTSKTCSNCGFTITSADYDRVLEKLKKTATGWMTTINGKELKVEGQITYYNRYKRQNVVKDLSVELDRLSEESVNNDISSWTKGRSGEALSLLKKRFSHRPVQEKFVCLNCGFETHADEQAALNIARSWLFLRSQEYKKYQTNKTTGNTDKRAFVETWQSFYRKKLKEVWKPAV

SEQ ID NO: 34176 - protein, 978 aa, synthetic construct
  REGION 1..978: note = engineered CasX variant
QEIKRINKIRRRLVKDSNTKKAGKTGPMKTLLVRVMTPDLRERLENLRKKPENIPQPISNTSQANLNKLLTDYTEMKKAILHVYWEEFQKDPVGLMSRVAQPASKKIDQNKLKPEMDEKGNLTTAGFACSQCGQPLFVYKLEQVSEKGKAYTNYFGRCNVAEHEKLILLAQLKPEKDSDEAVTYSLGKFGQRALDFYSIHVTKESTHPVKPLAQIAGNRYASVPVGKALSDACMGTIASFLSKYQDIIIEHQKVVKGNQKRLESLRELAGKENLEYPSVTLPPQPHTKEGVDAYNEVIARVRMWVNLNLWQKLKLSRDDAKPLLRLKGFPSFPLVERQANEVDWWDMVCNVKKLINEKKEDGKVFWQNLAGYKRQEALRPYLSSEEDRKKGKKFARYQLGDLLLHLEKKHGEDWGKVYDEAWERIDKKVEGLSKHIKLEEERRSEDAQSKAALTDWLRAKASFVIEGLKEADKDEFCRCELKLQKWYGDLRGKPFAIEAENSILDISGFSKQYNCAFIWQKDGVKKLNLYLIINYFKGGKLRFKKIKPEAFEANRFYTVINKKSGEIVPMEVNFNFDDPNLIILPLAFGKRVGREFIWNDLLSLETGSLKLANGRVIEKTLYNRRTRQDEPALFVALTFERREVLDSSNIKPMNLIGVDRGENIPAVIALTDPEGCPLSRFKDSLGNPTHILRIGESYKEKQRTIQAKKEVEQRRAGGYSRKYASKAKNLADDMVRNTARDLLYYAVTQDAMLIFENLSRGFGRQGKRTFMAERQYTRMEDWLTAKLAYEGLPSKTYLSKTLAQYTSKTCSNCGFTITSADYDRVLEKLKKTATGWMTTINGKELKVEGQITYYNRYKRQNVVKDLSVELDRLSEESVNNDISSWTKGRSGEALSLLKKRFSHRPVQEKFVCLNCGFETHADEQAALNIARSWLFLRSQEYKKYQTNKTTGNTDKRAFVETWQSFYRKKLKEVWKPAV

SEQ ID NO: 34177 - protein, 978 aa, synthetic construct
  REGION 1..978: note = engineered CasX variant
QEIKRINKIRRRLVKDSNTKKAGKTGPMKTLLVRVMTPDLRERLENLRKKPENIPQPISNTSQANLNKLLTDYTEMKKAILHVYWEEFQKDPVGLMSRVAQPASKKIDQNKLKPEMDEKGNLTTAGFACSQCGQPLFVYKLEQVSEKGKAYTNYFGRCNVAEHEKLIKLAQLKPEKDSDEAVTYSLGKFGQRALDFYSIHVTKESTHPVKPLAQIAGNRYASGPVGKALSDACMGTIASFLSKYQDIIIEHQKVVKGNQKRLESLRELAGKENLEYPSVTLPPQPHTKEGVDAYNEVIARVRMWVNLNLWQKLKLSRDDAKPLLRLKGFPSFPLVERQANEVDWWDMVCNVKKLINEKKEDGKVFWQNLAGYKRQEALRPYLSSEEDRKKGKKFARYQLGDLLLHLEKKHGEDWGKVYDEAWERIDKKVEGLSKHIKLEEERRSEDAQSKAALTDWLRAKASFVIEGLKEADKDEFCRCELKLQKWYGDLRGKPFAIEAENSILDISGFSKQYNCAFIWQKDGVKKLNLYLIINYFKGGKLRFKKIKPEAFEANRFYTVINKKSGEIVPMEVNFNFDDPNLIILPLAFGKRVGREFIWNDLLSLETGSLKLANGRVIEKTLYNRRTRQDEPALFVALTFERREVLDSSNIKPMNLIGVDRGENIPAVIALTDPEGCPLSRFKDSLGNPTHILRIGESYKEKQRTIQAKKEVEQRRAGGYSRKYASKAKNLADDMVRNTARDLLYYAVTQDAMLIFENLSRGFGRQGKRTFMAERQYTRMEDWLTAKLAYEGLPSKTYLSKTLAQYTSKTCSNCGFTITSADYDRVLEKLKKTATGWMTTINGKELKVEGQITYYNRYKRQNVVKDLSVELDRLSEESVNNDISSWTKGRSGEALSLLKKRFSHRPVQEKFVCLNCGFETHADEQAALNIARSWLFLRSQEYKKYQTNKTTGNTDKRAFVETWQSFYRKKLKEVWKPAV

SEQ ID NO: 34178 - protein, 977 aa, synthetic construct
  REGION 1..977: note = engineered CasX variant
QEIKRINKIRRRLVKDSNTKKAGKTGPMKTLLVRVMTPDLRERLENLRKKPENIPQPISNTSQANLNKLLTDYTEMKKAILHVYWEEFQKDPVGLMSRVAQPASKKIDQNKLKPEMDEKGNLTTAGFACSQCGQPLFVYKLEQVSEKGKAYTNYFGRCNVAEHEKLILLAQLKPEKDSDEAVTYSLGKFGQRALDFYSIHVTKESTHPVKPLAQIAGNRYASPVGKALSDACMGTIASFLSKYQDIIIEHQKVVKGNQKRLESLRELAGKENLEYPSVTLPPQPHTKEGVDAYNEVIARVRMWVNLNLWQKLKLSRDDAKPLLRLKGFPSFPLVERQANEVDWWDMVCNVKKLINEKKEDGKVFWQNLAGYKRQEALRPYLSSEEDRKKGKKFARYQLGDLLLHLEKKHGEDWGKVYDEAWERIDKKVEGLSKHIKLEEERRSEDAQSKAALTDWLRAKASFVIEGLKEADKDEFCRCELKLQKWYGDLRGKPFAIEAENSILDISGFSKQYNCAFIWQKDGVKKLNLYLIINYFKGGKLRFKKIKPEAFEANRFYTVINKKSGEIVPMEVNFNFDDPNLIILPLAFGKRVGREFIWNDLLSLETGSLKLANGRVIEKTLYNRRTRQDEPALFVALTFERREVLDSSNIKPMNLIGVDRGENIPAVIALTDPEGCPLSRFKDSLGNPTHILRIGESYKEKQRTIQAKKEVEQRRAGGYSRKYASKAKNLADDMVRNTARDLLYYAVTQDAMLIFENLSRGFGRQGKRTFMAERQYTRMEDWLTAKLAYEGLPSKTYLSKTLAQYTSKTCSNCGFTITSADYDRVLEKLKKTATGWMTTINGKELKVEGQITYYNRYKRQNVVKDLSVELDRLSEESVNNDISSWTKGRSGEALSLLKKRFSHRPVQEKFVCLNCGFETHADEQAALNIARSWLFLRSQEYKKYQTNKTTGNTDKRAFVETWQSFYRKKLKEVWKPAV

SEQ ID NO: 34179 - protein, 979 aa, synthetic construct
  REGION 1..979: note = engineered CasX variant
QEIKRINKIRRRLVKDSNTKKAGKTGPMKTLLVRVMTPDLRERLENLRKKPENIPQPISNTSQANLNKLLTDYTEMKKAILHVYWEEFQKDPVGLMSRVAQPASKKIDQNKLKPEMDEKGNLTTAGFACSQCGQPLFVYKLEQVSEKGKAYTNYFGRCNVAEHEKLILLAQLKPEKDSDEAVTYSLGKFGQRALDFYSIHVTKESTHPVKPLAQIAGNRYASYPVGKALSDACMGTIASFLSKYQDIIIEHQKVVKGNQKRLESLRELAGKENLEYPSVTLPPQPHTKEGVDAYNEVIARVRMWVNLNLWQKLKLSRDDAKPLLRLKGFPSFPLVERQANEVDWWDMVCNVKKLINEKKEDGKVFWQNLAGYKRQEALRPYLSSEEDRKKGKKFARYQLGDLLLHLEKKHGEDWGKVYDEAWERIDKKVEGLSKHIKLEEERRSEDAQSKAALTDWLRAKASFVIEGLKEADKDEFCRCELKLQKWYGDLRGKPFAIEAENSILDISGFSKQYNCAFIWQKDGVKKLNLYLIINYFKGGKLRFKKIKPEAFEANRFYTVINKKSGEIVPMEVNFNFDDPNLIILPLAFGKRQGREFIWNDLLSLETGSLKLANGRVIEKTLYNRRTRQDEPALFVALTFERREVLDSSNIKTPMNLIGVDRGENIPAVIALTDPEGCPLSRFKDSLGNPTHILRIGESYKEKQRTIQAKKEVEQRRAGGYSRKYASKAKNLADDMVRNTARDLLYYAVTQDAMLIFENLSRGFGRQGKRTFMAERQYTRMEDWLTAKLAYEGLPSKTYLSKTLAQYTSKTCSNCGFTITSADYDRVLEKLKKTATGWMTTINGKELKVEGQITYYNRYKRQNVVKDLSVELDRLSEESVNNDISSWTKGRSGEALSLLKKRFSHRPVQEKFVCLNCGFETHADEQAALNIARSWLFLRSQEYKKYQTNKTTGNTDKRAFVETWQSFYRKKLKEVWKPAV

SEQ ID NO: 34180 - protein, 979 aa, synthetic construct
  REGION 1..979: note = engineered CasX variant
QEIKRINKIRRRLVKDSNTKKAGKTGPMKTLLVRVMTPDLRERLENLRKKPENIPQPISNTSQANLNKLLTDYTEMKKAILHVYWEEFQKDPVGLMSRVAQPASKKIDQNKLKPEMDEKGNLTTAGFACSQCGQPLFVYKLEQVSEKGKAYTNYFGRCNVAEHEKLILLAQLKPEKDSDEAVTYSLGKFGQRALDFYSIHVTKESTHPVKPLAQIAGNRYASHPVGKALSDACMGTIASFLSKYQDIIIEHQKVVKGNQKRLESLRELAGKENLEYPSVTLPPQPHTKEGVDAYNEVIARVRMWVNLNLWQKLKLSRDDAKPLLRLKGFPSFPLVERQANEVDWWDMVCNVKKLINEKKEDGKVFWQNLAGYKRQEALRPYLSSEEDRKKGKKFARYQLGDLLLHLEKKHGEDWGKVYDEAWERIDKKVEGLSKHIKLEEERRSEDAQSKAALTDWLRAKASFVIEGLKEADKDEFCRCELKLQKWYGDLRGKPFAIEAENSILDISGFSKQYNCAFIWQKDGVKKLNLYLIINYFKGGKLRFKKIKPEAFEANRFYTVINKKSGEIVPMEVNFNFDDPNLIILPLAFGKRQGREFIWNDLLSLETGSLKLANGRVIEKTLYNRRTRQDEPALFVALTFERREVLDSSNIKTPMNLIGVDRGENIPAVIALTDPEGCPLSRFKDSLGNPTHILRIGESYKEKQRTIQAKKEVEQRRAGGYSRKYASKAKNLADDMVRNTARDLLYYAVTQDAMLIFENLSRGFGRQGKRTFMAERQYTRMEDWLTAKLAYEGLPSKTYLSKTLAQYTSKTCSNCGFTITSADYDRVLEKLKKTATGWMTTINGKELKVEGQITYYNRYKRQNVVKDLSVELDRLSEESVNNDISSWTKGRSGEALSLLKKRFSHRPVQEKFVCLNCGFETHADEQAALNIARSWLFLRSQEYKKYQTNKTTGNTDKRAFVETWQSFYRKKLKEVWKPAV

SEQ ID NO: 34181 - protein, 979 aa, synthetic construct
  REGION 1..979: note = engineered CasX variant
QEIKRINKIRRRLVKDSNTKKAGKTGPMKTLLVRVMTPDLRERLENLRKKPENIPQPISNTSQANLNKLLTDYTEMKKAILHVYWEEFQKDPVGLMSRVAQPASKKIDQNKLKPEMDEKGNLTTAGFACSQCGQPLFVYKLEQVSEKGKAYTNYFGRCNVAEHEKLILLAQLKPEKDSDEAVTYSLGKFGQRALDFYSIHVTKESTHPVKPLAQIAGNRYASSPVGKALSDACMGTIASFLSKYQDIIIEHQKVVKGNQKRLESLRELAGKENLEYPSVTLPPQPHTKEGVDAYNEVIARVRMWVNLNLWQKLKLSRDDAKPLLRLKGFPSFPLVERQANEVDWWDMVCNVKKLINEKKEDGKVFWQNLAGYKRQEALRPYLSSEEDRKKGKKFARYQLGDLLLHLEKKHGEDWGKVYDEAWERIDKKVEGLSKHIKLEEERRSEDAQSKAALTDWLRAKASFVIEGLKEADKDEFCRCELKLQKWYGDLRGKPFAIEAENSILDISGFSKQYNCAFIWQKDGVKKLNLYLIINYFKGGKLRFKKIKPEAFEANRFYTVINKKSGEIVPMEVNFNFDDPNLIILPLAFGKRQGREFIWNDLLSLETGSLKLANGRVIEKTLYNRRTRQDEPALFVALTFERREVLDSSNIKTPMNLIGVDRGENIPAVIALTDPEGCPLSRFKDSLGNPTHILRIGESYKEKQRTIQAKKEVEQRRAGGYSRKYASKAKNLADDMVRNTARDLLYYAVTQDAMLIFENLSRGFGRQGKRTFMAERQYTRMEDWLTAKLAYEGLPSKTYLSKTLAQYTSKTCSNCGFTITSADYDRVLEKLKKTATGWMTTINGKELKVEGQITYYNRYKRQNVVKDLSVELDRLSEESVNNDISSWTKGRSGEALSLLKKRFSHRPVQEKFVCLNCGFETHADEQAALNIARSWLFLRSQEYKKYQTNKTTGNTDKRAFVETWQSFYRKKLKEVWKPAV

SEQ ID NO: 34182 - protein, 979 aa, synthetic construct
  REGION 1..979: note = engineered CasX variant
QEIKRINKIRRRLVKDSNTKKAGKTGPMKTLLVRVMTPDLRERLENLRKKPENIPQPISNTSQANLNKLLTDYTEMKKAILHVYWEEFQKDPVGLMSRVAQPASKKIDQNKLKPEMDEKGNLTTAGFACSQCGQPLFVYKLEQVSEKGKAYTNYFGRCNVAEHEKLILLAQLKPEKDSDEAVTYSLGKFGQRALDFYSIHVTKESTHPVKPLAQIAGNRYASTPVGKALSDACMGTIASFLSKYQDIIIEHQKVVKGNQKRLESLRELAGKENLEYPSVTLPPQPHTKEGVDAYNEVIARVRMWVNLNLWQKLKLSRDDAKPLLRLKGFPSFPLVERQANEVDWWDMVCNVKKLINEKKEDGKVFWQNLAGYKRQEALRPYLSSEEDRKKGKKFARYQLGDLLLHLEKKHGEDWGKVYDEAWERIDKKVEGLSKHIKLEEERRSEDAQSKAALTDWLRAKASFVIEGLKEADKDEFCRCELKLQKWYGDLRGKPFAIEAENSILDISGFSKQYNCAFIWQKDGVKKLNLYLIINYFKGGKLRFKKIKPEAFEANRFYTVINKKSGEIVPMEVNFNFDDPNLIILPLAFGKRQGREFIWNDLLSLETGSLKLANGRVIEKTLYNRRTRQDEPALFVALTFERREVLDSSNIKTPMNLIGVDRGENIPAVIALTDPEGCPLSRFKDSLGNPTHILRIGESYKEKQRTIQAKKEVEQRRAGGYSRKYASKAKNLADDMVRNTARDLLYYAVTQDAMLIFENLSRGFGRQGKRTFMAERQYTRMEDWLTAKLAYEGLPSKTYLSKTLAQYTSKTCSNCGFTITSADYDRVLEKLKKTATGWMTTINGKELKVEGQITYYNRYKRQNVVKDLSVELDRLSEESVNNDISSWTKGRSGEALSLLKKRFSHRPVQEKFVCLNCGFETHADEQAALNIARSWLFLRSQEYKKYQTNKTTGNTDKRAFVETWQSFYRKKLKEVWKPAV

SEQ ID NO: 34183 - protein, 979 aa, synthetic construct
  REGION 1..979: note = engineered CasX variant
QEIKRINKIRRRLVKDSNTKKAGKTGPMKTLLVRVMTPDLRERLENLRKKPENIPQPISNTSQANLNKLLTDYTEMKKAILHVYWEEFQKDPVGLMSRVAQPASKKIDQNKLKPEMDEKGNLTTAGFACSQCGQPLFVYKLEQVSEKGKAYTNYFGRCNVAEHEKLILLAQLKPEKDSDEAVTYSLGKFGQRALDFYSIHVTKESTHPVKPLAQIAGNRYASAPVGKALSDACMGTIASFLSKYQDIIIEHQKVVKGNQKRLESLRELAGKENLEYPSVTLPPQPHTKEGVDAYNEVIARVRMWVNLNLWQKLKLSRDDAKPLLRLKGFPSFPLVERQANEVDWWDMVCNVKKLINEKKEDGKVFWQNLAGYKRQEALRPYLSSEEDRKKGKKFARYQLGDLLLHLEKKHGEDWGKVYDEAWERIDKKVEGLSKHIKLEEERRSEDAQSKAALTDWLRAKASFVIEGLKEADKDEFCRCELKLQKWYGDLRGKPFAIEAENSILDISGFSKQYNCAFIWQKDGVKKLNLYLIINYFKGGKLRFKKIKPEAFEANRFYTVINKKSGEIVPMEVNFNFDDPNLIILPLAFGKRQGREFIWNDLLSLETGSLKLANGRVIEKTLYNRRTRQDEPALFVALTFERREVLDSSNIKTPMNLIGVDRGENIPAVIALTDPEGCPLSRFKDSLGNPTHILRIGESYKEKQRTIQAKKEVEQRRAGGYSRKYASKAKNLADDMVRNTARDLLYYAVTQDAMLIFENLSRGFGRQGKRTFMAERQYTRMEDWLTAKLAYEGLPSKTYLSKTLAQYTSKTCSNCGFTITSADYDRVLEKLKKTATGWMTTINGKELKVEGQITYYNRYKRQNVVKDLSVELDRLSEESVNNDISSWTKGRSGEALSLLKKRFSHRPVQEKFVCLNCGFETHADEQAALNIARSWLFLRSQEYKKYQTNKTTGNTDKRAFVETWQSFYRKKLKEVWKPAV

SEQ ID NO: 34184 - protein, 979 aa, synthetic construct
  REGION 1..979: note = engineered CasX variant
QEIKRINKIRRRLVKDSNTKKAGKTGPMKTLLVRVMTPDLRERLENLRKKPENIPQPISNTSQANLNKLLTDYTEMKKAILHVYWEEFQKDPVGLMSRVAQPASKKIDQNKLKPEMDEKGNLTTAGFACSQCGQPLFVYKLEQVSEKGKAYTNYFGRCNVAEHEKLILLAQLKPEKDSDEAVTYSLGKFGQRALDFYSIHVTKESTHPVKPLAQIAGNRYASVPVGKALSDACMGTIASFLSKYQDIIIEHQKVVKGNQKRLESLRELAGKENLEYPSVTLPPQPHTKEGVDAYNEVIARVRMWVNLNLWQKLKLSRDDAKPLLRLKGFPSFPLVERQANEVDWWDMVCNVKKLINEKKEDGKVFWQNLAGYKRQEALRPYLSSEEDRKKGKKFARYQLGDLLLHLEKKHGEDWGKVYDEAWERIDKKVEGLSKHIKLEEERRSEDAQSKAALTDWLRAKASFVIEGLKEADKDEFCRCELKLQKWYGDLRGKPFAIEAENSILDISGFSKQYNCAFIWQKDGVKKLNLYLIINYFKGGKLRFKKIKPEAFEANRFYTVINKKSGEIVPMEVNFNFDDPNLIILPLAFGKRQGREFIWNDLLSLETGSLKLANGRVIEKTLYNRRTRQDEPALFVALTFERREVLDSSNIKTPMNLIGVDRGENIPAVIALTDPEGCPLSRFKDSLGNPTHILRIGESYKEKQRTIQAKKEVEQRRAGGYSRKYASKAKNLADDMVRNTARDLLYYAVTQDAMLIFENLSRGFGRQGKRTFMAERQYTRMEDWLTAKLAYEGLPSKTYLSKTLAQYTSKTCSNCGFTITSADYDRVLEKLKKTATGWMTTINGKELKVEGQITYYNRYKRQNVVKDLSVELDRLSEESVNNDISSWTKGRSGEALSLLKKRFSHRPVQEKFVCLNCGFETHADEQAALNIARSWLFLRSQEYKKYQTNKTTGNTDKRAFVETWQSFYRKKLKEVWKPAV

SEQ ID NO: 34185 - protein, 979 aa, synthetic construct
  REGION 1..979: note = engineered CasX variant
QEIKRINKIRRRLVKDSNTKKAGKTGPMKTLLVRVMTPDLRERLENLRKKPENIPQPISNTSQANLNKLLTDYTEMKKAILHVYWEEFQKDPVGLMSRVAQPASKKIDQNKLKPEMDEKGNLTTAGFACSQCGQPLFVYKLEQVSEKGKAYTNYFGRCNVAEHEKLIKLAQLKPEKDSDEAVTYSLGKFGQRALDFYSIHVTKESTHPVKPLAQIAGNRYASGPVGKALSDACMGTIASFLSKYQDIIIEHQKVVKGNQKRLESLRELAGKENLEYPSVTLPPQPHTKEGVDAYNEVIARVRMWVNLNLWQKLKLSRDDAKPLLRLKGFPSFPLVERQANEVDWWDMVCNVKKLINEKKEDGKVFWQNLAGYKRQEALRPYLSSEEDRKKGKKFARYQLGDLLLHLEKKHGEDWGKVYDEAWERIDKKVEGLSKHIKLEEERRSEDAQSKAALTDWLRAKASFVIEGLKEADKDEFCRCELKLQKWYGDLRGKPFAIEAENSILDISGFSKQYNCAFIWQKDGVKKLNLYLIINYFKGGKLRFKKIKPEAFEANRFYTVINKKSGEIVPMEVNFNFDDPNLIILPLAFGKRQGREFIWNDLLSLETGSLKLANGRVIEKTLYNRRTRQDEPALFVALTFERREVLDSSNIKTPMNLIGVDRGENIPAVIALTDPEGCPLSRFKDSLGNPTHILRIGESYKEKQRTIQAKKEVEQRRAGGYSRKYASKAKNLADDMVRNTARDLLYYAVTQDAMLIFENLSRGFGRQGKRTFMAERQYTRMEDWLTAKLAYEGLPSKTYLSKTLAQYTSKTCSNCGFTITSADYDRVLEKLKKTATGWMTTINGKELKVEGQITYYNRYKRQNVVKDLSVELDRLSEESVNNDISSWTKGRSGEALSLLKKRFSHRPVQEKFVCLNCGFETHADEQAALNIARSWLFLRSQEYKKYQTNKTTGNTDKRAFVETWQSFYRKKLKEVWKPAV

SEQ ID NO: 34186 - protein, 978 aa, synthetic construct
  REGION 1..978: note = engineered CasX variant
QEIKRINKIRRRLVKDSNTKKAGKTGPMKTLLVRVMTPDLRERLENLRKKPENIPQPISNTSQANLNKLLTDYTEMKKAILHVYWEEFQKDPVGLMSRVAQPASKKIDQNKLKPEMDEKGNLTTAGFACSQCGQPLFVYKLEQVSEKGKAYTNYFGRCNVAEHEKLILLAQLKPEKDSDEAVTYSLGKFGQRALDFYSIHVTKESTHPVKPLAQIAGNRYASPVGKALSDACMGTIASFLSKYQDIIIEHQKVVKGNQKRLESLRELAGKENLEYPSVTLPPQPHTKEGVDAYNEVIARVRMWVNLNLWQKLKLSRDDAKPLLRLKGFPSFPLVERQANEVDWWDMVCNVKKLINEKKEDGKVFWQNLAGYKRQEALRPYLSSEEDRKKGKKFARYQLGDLLLHLEKKHGEDWGKVYDEAWERIDKKVEGLSKHIKLEEERRSEDAQSKAALTDWLRAKASFVIEGLKEADKDEFCRCELKLQKWYGDLRGKPFAIEAENSILDISGFSKQYNCAFIWQKDGVKKLNLYLIINYFKGGKLRFKKIKPEAFEANRFYTVINKKSGEIVPMEVNFNFDDPNLIILPLAFGKRQGREFIWNDLLSLETGSLKLANGRVIEKTLYNRRTRQDEPALFVALTFERREVLDSSNIKTPMNLIGVDRGENIPAVIALTDPEGCPLSRFKDSLGNPTHILRIGESYKEKQRTIQAKKEVEQRRAGGYSRKYASKAKNLADDMVRNTARDLLYYAVTQDAMLIFENLSRGFGRQGKRTFMAERQYTRMEDWLTAKLAYEGLPSKTYLSKTLAQYTSKTCSNCGFTITSADYDRVLEKLKKTATGWMTTINGKELKVEGQITYYNRYKRQNVVKDLSVELDRLSEESVNNDISSWTKGRSGEALSLLKKRFSHRPVQEKFVCLNCGFETHADEQAALNIARSWLFLRSQEYKKYQTNKTTGNTDKRAFVETWQSFYRKKLKEVWKPAV

SEQ ID NO: 34187 - protein, 979 aa, synthetic construct
  REGION 1..979: note = engineered CasX variant
QEIKRINKIRRRLVKDSNTKKAGKTGPMKTLLVRVMTPDLRERLENLRKKPENIPQPISNTSQANLNKLLTDYTEMKKAILHVYWEEFQKDPVGLMSRVAQPASKKIDQNKLKPEMDEKGNLTTAGFACSQCGQPLFVYKLEQVSEKGKAYTNYFGRCNVAEHEKLILLAQLKPEKDSDEAVTYSLGKFGQRALDFYSIHVTKESTHPVKPLAQIAGNRYASYPVGKALSDACMGTIASFLSKYQDIIIEHQKVVKGNQKRLESLRELAGKENLEYPSVTLPPQPHTKEGVDAYNEVIARVRMWVNLNLWQKLKLSRDDAKPLLRLKGFPSFPLVERQANEVDWWDMVCNVKKLINEKKEDGKVFWQNLAGYKRQEALRPYLSSEEDRKKGKKFARYQLGDLLLHLEKKHGEDWGKVYDEAWERIDKKVEGLSKHIKLEEERRSEDAQSKAALTDWLRAKASFVIEGLKEADKDEFCRCELKLQKWYGDLRGKPFAIEAENSILDISGFSKQYNCAFIWQKDGVKKLNLYLIINYFKGGKLRFKKIKPEAFEANRFYTVINKKSGEIVPMEVNFNFDDPNLIILPLAFGKRQGREFIWNDLLSLETGSLKLANGRVIEKTLYNRRTRQDEPALFVALTFERREVLDSSNIKPMSNLIGVDRGENIPAVIALTDPEGCPLSRFKDSLGNPTHILRIGESYKEKQRTIQAKKEVEQRRAGGYSRKYASKAKNLADDMVRNTARDLLYYAVTQDAMLIFENLSRGFGRQGKRTFMAERQYTRMEDWLTAKLAYEGLPSKTYLSKTLAQYTSKTCSNCGFTITSADYDRVLEKLKKTATGWMTTINGKELKVEGQITYYNRYKRQNVVKDLSVELDRLSEESVNNDISSWTKGRSGEALSLLKKRFSHRPVQEKFVCLNCGFETHADEQAALNIARSWLFLRSQEYKKYQTNKTTGNTDKRAFVETWQSFYRKKLKEVWKPAV

SEQ ID NO: 34188 - protein, 979 aa, synthetic construct
  REGION 1..979: note = engineered CasX variant
QEIKRINKIRRRLVKDSNTKKAGKTGPMKTLLVRVMTPDLRERLENLRKKPENIPQPISNTSQANLNKLLTDYTEMKKAILHVYWEEFQKDPVGLMSRVAQPASKKIDQNKLKPEMDEKGNLTTAGFACSQCGQPLFVYKLEQVSEKGKAYTNYFGRCNVAEHEKLILLAQLKPEKDSDEAVTYSLGKFGQRALDFYSIHVTKESTHPVKPLAQIAGNRYASHPVGKALSDACMGTIASFLSKYQDIIIEHQKVVKGNQKRLESLRELAGKENLEYPSVTLPPQPHTKEGVDAYNEVIARVRMWVNLNLWQKLKLSRDDAKPLLRLKGFPSFPLVERQANEVDWWDMVCNVKKLINEKKEDGKVFWQNLAGYKRQEALRPYLSSEEDRKKGKKFARYQLGDLLLHLEKKHGEDWGKVYDEAWERIDKKVEGLSKHIKLEEERRSEDAQSKAALTDWLRAKASFVIEGLKEADKDEFCRCELKLQKWYGDLRGKPFAIEAENSILDISGFSKQYNCAFIWQKDGVKKLNLYLIINYFKGGKLRFKKIKPEAFEANRFYTVINKKSGEIVPMEVNFNFDDPNLIILPLAFGKRQGREFIWNDLLSLETGSLKLANGRVIEKTLYNRRTRQDEPALFVALTFERREVLDSSNIKPMSNLIGVDRGENIPAVIALTDPEGCPLSRFKDSLGNPTHILRIGESYKEKQRTIQAKKEVEQRRAGGYSRKYASKAKNLADDMVRNTARDLLYYAVTQDAMLIFENLSRGFGRQGKRTFMAERQYTRMEDWLTAKLAYEGLPSKTYLSKTLAQYTSKTCSNCGFTITSADYDRVLEKLKKTATGWMTTINGKELKVEGQITYYNRYKRQNVVKDLSVELDRLSEESVNNDISSWTKGRSGEALSLLKKRFSHRPVQEKFVCLNCGFETHADEQAALNIARSWLFLRSQEYKKYQTNKTTGNTDKRAFVETWQSFYRKKLKEVWKPAV

SEQ ID NO: 34189 - protein, 979 aa, synthetic construct
  REGION 1..979: note = engineered CasX variant
QEIKRINKIRRRLVKDSNTKKAGKTGPMKTLLVRVMTPDLRERLENLRKKPENIPQPISNTSQANLNKLLTDYTEMKKAILHVYWEEFQKDPVGLMSRVAQPASKKIDQNKLKPEMDEKGNLTTAGFACSQCGQPLFVYKLEQVSEKGKAYTNYFGRCNVAEHEKLILLAQLKPEKDSDEAVTYSLGKFGQRALDFYSIHVTKESTHPVKPLAQIAGNRYASSPVGKALSDACMGTIASFLSKYQDIIIEHQKVVKGNQKRLESLRELAGKENLEYPSVTLPPQPHTKEGVDAYNEVIARVRMWVNLNLWQKLKLSRDDAKPLLRLKGFPSFPLVERQANEVDWWDMVCNVKKLINEKKEDGKVFWQNLAGYKRQEALRPYLSSEEDRKKGKKFARYQLGDLLLHLEKKHGEDWGKVYDEAWERIDKKVEGLSKHIKLEEERRSEDAQSKAALTDWLRAKASFVIEGLKEADKDEFCRCELKLQKWYGDLRGKPFAIEAENSILDISGFSKQYNCAFIWQKDGVKKLNLYLIINYFKGGKLRFKKIKPEAFEANRFYTVINKKSGEIVPMEVNFNFDDPNLIILPLAFGKRQGREFIWNDLLSLETGSLKLANGRVIEKTLYNRRTRQDEPALFVALTFERREVLDSSNIKPMSNLIGVDRGENIPAVIALTDPEGCPLSRFKDSLGNPTHILRIGESYKEKQRTIQAKKEVEQRRAGGYSRKYASKAKNLADDMVRNTARDLLYYAVTQDAMLIFENLSRGFGRQGKRTFMAERQYTRMEDWLTAKLAYEGLPSKTYLSKTLAQYTSKTCSNCGFTITSADYDRVLEKLKKTATGWMTTINGKELKVEGQITYYNRYKRQNVVKDLSVELDRLSEESVNNDISSWTKGRSGEALSLLKKRFSHRPVQEKFVCLNCGFETHADEQAALNIARSWLFLRSQEYKKYQTNKTTGNTDKRAFVETWQSFYRKKLKEVWKPAV

SEQ ID NO: 34190 - protein, 979 aa, synthetic construct
  REGION 1..979: note = engineered CasX variant
QEIKRINKIRRRLVKDSNTKKAGKTGPMKTLLVRVMTPDLRERLENLRKKPENIPQPISNTSQANLNKLLTDYTEMKKAILHVYWEEFQKDPVGLMSRVAQPASKKIDQNKLKPEMDEKGNLTTAGFACSQCGQPLFVYKLEQVSEKGKAYTNYFGRCNVAEHEKLILLAQLKPEKDSDEAVTYSLGKFGQRALDFYSIHVTKESTHPVKPLAQIAGNRYASTPVGKALSDACMGTIASFLSKYQDIIIEHQKVVKGNQKRLESLRELAGKENLEYPSVTLPPQPHTKEGVDAYNEVIARVRMWVNLNLWQKLKLSRDDAKPLLRLKGFPSFPLVERQANEVDWWDMVCNVKKLINEKKEDGKVFWQNLAGYKRQEALRPYLSSEEDRKKGKKFARYQLGDLLLHLEKKHGEDWGKVYDEAWERIDKKVEGLSKHIKLEEERRSEDAQSKAALTDWLRAKASFVIEGLKEADKDEFCRCELKLQKWYGDLRGKPFAIEAENSILDISGFSKQYNCAFIWQKDGVKKLNLYLIINYFKGGKLRFKKIKPEAFEANRFYTVINKKSGEIVPMEVNFNFDDPNLIILPLAFGKRQGREFIWNDLLSLETGSLKLANGRVIEKTLYNRRTRQDEPALFVALTFERREVLDSSNIKPMSNLIGVDRGENIPAVIALTDPEGCPLSRFKDSLGNPTHILRIGESYKEKQRTIQAKKEVEQRRAGGYSRKYASKAKNLADDMVRNTARDLLYYAVTQDAMLIFENLSRGFGRQGKRTFMAERQYTRMEDWLTAKLAYEGLPSKTYLSKTLAQYTSKTCSNCGFTITSADYDRVLEKLKKTATGWMTTINGKELKVEGQITYYNRYKRQNVVKDLSVELDRLSEESVNNDISSWTKGRSGEALSLLKKRFSHRPVQEKFVCLNCGFETHADEQAALNIARSWLFLRSQEYKKYQTNKTTGNTDKRAFVETWQSFYRKKLKEVWKPAV

SEQ ID NO: 34191 - protein, 979 aa, synthetic construct
  REGION 1..979: note = engineered CasX variant
QEIKRINKIRRRLVKDSNTKKAGKTGPMKTLLVRVMTPDLRERLENLRKKPENIPQPISNTSQANLNKLLTDYTEMKKAILHVYWEEFQKDPVGLMSRVAQPASKKIDQNKLKPEMDEKGNLTTAGFACSQCGQPLFVYKLEQVSEKGKAYTNYFGRCNVAEHEKLILLAQLKPEKDSDEAVTYSLGKFGQRALDFYSIHVTKESTHPVKPLAQIAGNRYASAPVGKALSDACMGTIASFLSKYQDIIIEHQKVVKGNQKRLESLRELAGKENLEYPSVTLPPQPHTKEGVDAYNEVIARVRMWVNLNLWQKLKLSRDDAKPLLRLKGFPSFPLVERQANEVDWWDMVCNVKKLINEKKEDGKVFWQNLAGYKRQEALRPYLSSEEDRKKGKKFARYQLGDLLLHLEKKHGEDWGKVYDEAWERIDKKVEGLSKHIKLEEERRSEDAQSKAALTDWLRAKASFVIEGLKEADKDEFCRCELKLQKWYGDLRGKPFAIEAENSILDISGFSKQYNCAFIWQKDGVKKLNLYLIINYFKGGKLRFKKIKPEAFEANRFYTVINKKSGEIVPMEVNFNFDDPNLIILPLAFGKRQGREFIWNDLLSLETGSLKLANGRVIEKTLYNRRTRQDEPALFVALTFERREVLDSSNIKPMSNLIGVDRGENIPAVIALTDPEGCPLSRFKDSLGNPTHILRIGESYKEKQRTIQAKKEVEQRRAGGYSRKYASKAKNLADDMVRNTARDLLYYAVTQDAMLIFENLSRGFGRQGKRTFMAERQYTRMEDWLTAKLAYEGLPSKTYLSKTLAQYTSKTCSNCGFTITSADYDRVLEKLKKTATGWMTTINGKELKVEGQITYYNRYKRQNVVKDLSVELDRLSEESVNNDISSWTKGRSGEALSLLKKRFSHRPVQEKFVCLNCGFETHADEQAALNIARSWLFLRSQEYKKYQTNKTTGNTDKRAFVETWQSFYRKKLKEVWKPAV

SEQ ID NO: 34192 - protein, 979 aa, synthetic construct
  REGION 1..979: note = engineered CasX variant
QEIKRINKIRRRLVKDSNTKKAGKTGPMKTLLVRVMTPDLRERLENLRKKPENIPQPISNTSQANLNKLLTDYTEMKKAILHVYWEEFQKDPVGLMSRVAQPASKKIDQNKLKPEMDEKGNLTTAGFACSQCGQPLFVYKLEQVSEKGKAYTNYFGRCNVAEHEKLILLAQLKPEKDSDEAVTYSLGKFGQRALDFYSIHVTKESTHPVKPLAQIAGNRYASVPVGKALSDACMGTIASFLSKYQDIIIEHQKVVKGNQKRLESLRELAGKENLEYPSVTLPPQPHTKEGVDAYNEVIARVRMWVNLNLWQKLKLSRDDAKPLLRLKGFPSFPLVERQANEVDWWDMVCNVKKLINEKKEDGKVFWQNLAGYKRQEALRPYLSSEEDRKKGKKFARYQLGDLLLHLEKKHGEDWGKVYDEAWERIDKKVEGLSKHIKLEEERRSEDAQSKAALTDWLRAKASFVIEGLKEADKDEFCRCELKLQKWYGDLRGKPFAIEAENSILDISGFSKQYNCAFIWQKDGVKKLNLYLIINYFKGGKLRFKKIKPEAFEANRFYTVINKKSGEIVPMEVNFNFDDPNLIILPLAFGKRQGREFIWNDLLSLETGSLKLANGRVIEKTLYNRRTRQDEPALFVALTFERREVLDSSNIKPMSNLIGVDRGENIPAVIALTDPEGCPLSRFKDSLGNPTHILRIGESYKEKQRTIQAKKEVEQRRAGGYSRKYASKAKNLADDMVRNTARDLLYYAVTQDAMLIFENLSRGFGRQGKRTFMAERQYTRMEDWLTAKLAYEGLPSKTYLSKTLAQYTSKTCSNCGFTITSADYDRVLEKLKKTATGWMTTINGKELKVEGQITYYNRYKRQNVVKDLSVELDRLSEESVNNDISSWTKGRSGEALSLLKKRFSHRPVQEKFVCLNCGFETHADEQAALNIARSWLFLRSQEYKKYQTNKTTGNTDKRAFVETWQSFYRKKLKEVWKPAV

SEQ ID NO: 34193 - protein, 979 aa, synthetic construct
  REGION 1..979: note = engineered CasX variant
QEIKRINKIRRRLVKDSNTKKAGKTGPMKTLLVRVMTPDLRERLENLRKKPENIPQPISNTSQANLNKLLTDYTEMKKAILHVYWEEFQKDPVGLMSRVAQPASKKIDQNKLKPEMDEKGNLTTAGFACSQCGQPLFVYKLEQVSEKGKAYTNYFGRCNVAEHEKLIKLAQLKPEKDSDEAVTYSLGKFGQRALDFYSIHVTKESTHPVKPLAQIAGNRYASGPVGKALSDACMGTIASFLSKYQDIIIEHQKVVKGNQKRLESLRELAGKENLEYPSVTLPPQPHTKEGVDAYNEVIARVRMWVNLNLWQKLKLSRDDAKPLLRLKGFPSFPLVERQANEVDWWDMVCNVKKLINEKKEDGKVFWQNLAGYKRQEALRPYLSSEEDRKKGKKFARYQLGDLLLHLEKKHGEDWGKVYDEAWERIDKKVEGLSKHIKLEEERRSEDAQSKAALTDWLRAKASFVIEGLKEADKDEFCRCELKLQKWYGDLRGKPFAIEAENSILDISGFSKQYNCAFIWQKDGVKKLNLYLIINYFKGGKLRFKKIKPEAFEANRFYTVINKKSGEIVPMEVNFNFDDPNLIILPLAFGKRQGREFIWNDLLSLETGSLKLANGRVIEKTLYNRRTRQDEPALFVALTFERREVLDSSNIKPMSNLIGVDRGENIPAVIALTDPEGCPLSRFKDSLGNPTHILRIGESYKEKQRTIQAKKEVEQRRAGGYSRKYASKAKNLADDMVRNTARDLLYYAVTQDAMLIFENLSRGFGRQGKRTFMAERQYTRMEDWLTAKLAYEGLPSKTYLSKTLAQYTSKTCSNCGFTITSADYDRVLEKLKKTATGWMTTINGKELKVEGQITYYNRYKRQNVVKDLSVELDRLSEESVNNDISSWTKGRSGEALSLLKKRFSHRPVQEKFVCLNCGFETHADEQAALNIARSWLFLRSQEYKKYQTNKTTGNTDKRAFVETWQSFYRKKLKEVWKPAV

SEQ ID NO: 34194 - protein, 978 aa, synthetic construct
  REGION 1..978: note = engineered CasX variant
QEIKRINKIRRRLVKDSNTKKAGKTGPMKTLLVRVMTPDLRERLENLRKKPENIPQPISNTSQANLNKLLTDYTEMKKAILHVYWEEFQKDPVGLMSRVAQPASKKIDQNKLKPEMDEKGNLTTAGFACSQCGQPLFVYKLEQVSEKGKAYTNYFGRCNVAEHEKLILLAQLKPEKDSDEAVTYSLGKFGQRALDFYSIHVTKESTHPVKPLAQIAGNRYASPVGKALSDACMGTIASFLSKYQDIIIEHQKVVKGNQKRLESLRELAGKENLEYPSVTLPPQPHTKEGVDAYNEVIARVRMWVNLNLWQKLKLSRDDAKPLLRLKGFPSFPLVERQANEVDWWDMVCNVKKLINEKKEDGKVFWQNLAGYKRQEALRPYLSSEEDRKKGKKFARYQLGDLLLHLEKKHGEDWGKVYDEAWERIDKKVEGLSKHIKLEEERRSEDAQSKAALTDWLRAKASFVIEGLKEADKDEFCRCELKLQKWYGDLRGKPFAIEAENSILDISGFSKQYNCAFIWQKDGVKKLNLYLIINYFKGGKLRFKKIKPEAFEANRFYTVINKKSGEIVPMEVNFNFDDPNLIILPLAFGKRQGREFIWNDLLSLETGSLKLANGRVIEKTLYNRRTRQDEPALFVALTFERREVLDSSNIKPMSNLIGVDRGENIPAVIALTDPEGCPLSRFKDSLGNPTHILRIGESYKEKQRTIQAKKEVEQRRAGGYSRKYASKAKNLADDMVRNTARDLLYYAVTQDAMLIFENLSRGFGRQGKRTFMAERQYTRMEDWLTAKLAYEGLPSKTYLSKTLAQYTSKTCSNCGFTITSADYDRVLEKLKKTATGWMTTINGKELKVEGQITYYNRYKRQNVVKDLSVELDRLSEESVNNDISSWTKGRSGEALSLLKKRFSHRPVQEKFVCLNCGFETHADEQAALNIARSWLFLRSQEYKKYQTNKTTGNTDKRAFVETWQSFYRKKLKEVWKPAV

SEQ ID NO: 34195 - protein, 978 aa, synthetic construct
  REGION 1..978: note = engineered CasX variant
QEIKRINKIRRRLVKDSNTKKAGKTGPMKTLLVRVMTPDLRERLENLRKKPENIPQPISNTSQANLNKLLTDYTEMKKAILHVYWEEFQKDPVGLMSRVAQPASKKIDQNKLKPEMDEKGNLTTAGFACSQCGQPLFVYKLEQVSEKGKAYTNYFGRCNVAEHEKLILLAQLKPEKDSDEAVTYSLGKFGQRALDFYSIHVTKESTHPVKPLAQIAGNRYASYPVGKALSDACMGTIASFLSKYQDIIIEHQKVVKGNQKRLESLRELAGKENLEYPSVTLPPQPHTKEGVDAYNEVIARVRMWVNLNLWQKLKLSRDDAKPLLRLKGFPSFPLVERQANEVDWWDMVCNVKKLINEKKEDGKVFWQNLAGYKRQEALRPYLSSEEDRKKGKKFARYQLGDLLLHLEKKHGEDWGKVYDEAWERIDKKVEGLSKHIKLEEERRSEDAQSKAALTDWLRAKASFVIEGLKEADKDEFCRCELKLQKWYGDLRGKPFAIEAENSILDISGFSKQYNCAFIWQKDGVKKLNLYLIINYFKGGKLRFKKIKPEAFEANRFYTVINKKSGEIVPMEVNFNFDDPNLIILPLAFGKRQGREFIWNDLLSLETGSLKLANGRVIEKTLYNRRTRQDEPALFVALTFERREVLDSSNIKPMNLIGVDRGENIPAVIALTDPEGCPLSRFKDSLGNPTHILRIRESYKEKQRTIQAKKEVEQRRAGGYSRKYASKAKNLADDMVRNTARDLLYYAVTQDAMLIFENLSRGFGRQGKRTFMAERQYTRMEDWLTAKLAYEGLPSKTYLSKTLAQYTSKTCSNCGFTITSADYDRVLEKLKKTATGWMTTINGKELKVEGQITYYNRYKRQNVVKDLSVELDRLSEESVNNDISSWTKGRSGEALSLLKKRFSHRPVQEKFVCLNCGFETHADEQAALNIARSWLFLRSQEYKKYQTNKTTGNTDKRAFVETWQSFYRKKLKEVWKPAV

SEQ ID NO: 34196 - protein, 978 aa, synthetic construct
  REGION 1..978: note = engineered CasX variant
QEIKRINKIRRRLVKDSNTKKAGKTGPMKTLLVRVMTPDLRERLENLRKKPENIPQPISNTSQANLNKLLTDYTEMKKAILHVYWEEFQKDPVGLMSRVAQPASKKIDQNKLKPEMDEKGNLTTAGFACSQCGQPLFVYKLEQVSEKGKAYTNYFGRCNVAEHEKLILLAQLKPEKDSDEAVTYSLGKFGQRALDFYSIHVTKESTHPVKPLAQIAGNRYASHPVGKALSDACMGTIASFLSKYQDIIIEHQKVVKGNQKRLESLRELAGKENLEYPSVTLPPQPHTKEGVDAYNEVIARVRMWVNLNLWQKLKLSRDDAKPLLRLKGFPSFPLVERQANEVDWWDMVCNVKKLINEKKEDGKVFWQNLAGYKRQEALRPYLSSEEDRKKGKKFARYQLGDLLLHLEKKHGEDWGKVYDEAWERIDKKVEGLSKHIKLEEERRSEDAQSKAALTDWLRAKASFVIEGLKEADKDEFCRCELKLQKWYGDLRGKPFAIEAENSILDISGFSKQYNCAFIWQKDGVKKLNLYLIINYFKGGKLRFKKIKPEAFEANRFYTVINKKSGEIVPMEVNFNFDDPNLIILPLAFGKRQGREFIWNDLLSLETGSLKLANGRVIEKTLYNRRTRQDEPALFVALTFERREVLDSSNIKPMNLIGVDRGENIPAVIALTDPEGCPLSRFKDSLGNPTHILRIRESYKEKQRTIQAKKEVEQRRAGGYSRKYASKAKNLADDMVRNTARDLLYYAVTQDAMLIFENLSRGFGRQGKRTFMAERQYTRMEDWLTAKLAYEGLPSKTYLSKTLAQYTSKTCSNCGFTITSADYDRVLEKLKKTATGWMTTINGKELKVEGQITYYNRYKRQNVVKDLSVELDRLSEESVNNDISSWTKGRSGEALSLLKKRFSHRPVQEKFVCLNCGFETHADEQAALNIARSWLFLRSQEYKKYQTNKTTGNTDKRAFVETWQSFYRKKLKEVWKPAV

SEQ ID NO: 34197 - protein, 978 aa, synthetic construct
  REGION 1..978: note = engineered CasX variant
QEIKRINKIRRRLVKDSNTKKAGKTGPMKTLLVRVMTPDLRERLENLRKKPENIPQPISNTSQANLNKLLTDYTEMKKAILHVYWEEFQKDPVGLMSRVAQPASKKIDQNKLKPEMDEKGNLTTAGFACSQCGQPLFVYKLEQVSEKGKAYTNYFGRCNVAEHEKLILLAQLKPEKDSDEAVTYSLGKFGQRALDFYSIHVTKESTHPVKPLAQIAGNRYASSPVGKALSDACMGTIASFLSKYQDIIIEHQKVVKGNQKRLESLRELAGKENLEYPSVTLPPQPHTKEGVDAYNEVIARVRMWVNLNLWQKLKLSRDDAKPLLRLKGFPSFPLVERQANEVDWWDMVCNVKKLINEKKEDGKVFWQNLAGYKRQEALRPYLSSEEDRKKGKKFARYQLGDLLLHLEKKHGEDWGKVYDEAWERIDKKVEGLSKHIKLEEERRSEDAQSKAALTDWLRAKASFVIEGLKEADKDEFCRCELKLQKWYGDLRGKPFAIEAENSILDISGFSKQYNCAFIWQKDGVKKLNLYLIINYFKGGKLRFKKIKPEAFEANRFYTVINKKSGEIVPMEVNFNFDDPNLIILPLAFGKRQGREFIWNDLLSLETGSLKLANGRVIEKTLYNRRTRQDEPALFVALTFERREVLDSSNIKPMNLIGVDRGENIPAVIALTDPEGCPLSRFKDSLGNPTHILRIRESYKEKQRTIQAKKEVEQRRAGGYSRKYASKAKNLADDMVRNTARDLLYYAVTQDAMLIFENLSRGFGRQGKRTFMAERQYTRMEDWLTAKLAYEGLPSKTYLSKTLAQYTSKTCSNCGFTITSADYDRVLEKLKKTATGWMTTINGKELKVEGQITYYNRYKRQNVVKDLSVELDRLSEESVNNDISSWTKGRSGEALSLLKKRFSHRPVQEKFVCLNCGFETHADEQAALNIARSWLFLRSQEYKKYQTNKTTGNTDKRAFVETWQSFYRKKLKEVWKPAV

SEQ ID NO: 34198 - protein, 978 aa, synthetic construct
  REGION 1..978: note = engineered CasX variant
QEIKRINKIRRRLVKDSNTKKAGKTGPMKTLLVRVMTPDLRERLENLRKKPENIPQPISNTSQANLNKLLTDYTEMKKAILHVYWEEFQKDPVGLMSRVAQPASKKIDQNKLKPEMDEKGNLTTAGFACSQCGQPLFVYKLEQVSEKGKAYTNYFGRCNVAEHEKLILLAQLKPEKDSDEAVTYSLGKFGQRALDFYSIHVTKESTHPVKPLAQIAGNRYASTPVGKALSDACMGTIASFLSKYQDIIIEHQKVVKGNQKRLESLRELAGKENLEYPSVTLPPQPHTKEGVDAYNEVIARVRMWVNLNLWQKLKLSRDDAKPLLRLKGFPSFPLVERQANEVDWWDMVCNVKKLINEKKEDGKVFWQNLAGYKRQEALRPYLSSEEDRKKGKKFARYQLGDLLLHLEKKHGEDWGKVYDEAWERIDKKVEGLSKHIKLEEERRSEDAQSKAALTDWLRAKASFVIEGLKEADKDEFCRCELKLQKWYGDLRGKPFAIEAENSILDISGFSKQYNCAFIWQKDGVKKLNLYLIINYFKGGKLRFKKIKPEAFEANRFYTVINKKSGEIVPMEVNFNFDDPNLIILPLAFGKRQGREFIWNDLLSLETGSLKLANGRVIEKTLYNRRTRQDEPALFVALTFERREVLDSSNIKPMNLIGVDRGENIPAVIALTDPEGCPLSRFKDSLGNPTHILRIRESYKEKQRTIQAKKEVEQRRAGGYSRKYASKAKNLADDMVRNTARDLLYYAVTQDAMLIFENLSRGFGRQGKRTFMAERQYTRMEDWLTAKLAYEGLPSKTYLSKTLAQYTSKTCSNCGFTITSADYDRVLEKLKKTATGWMTTINGKELKVEGQITYYNRYKRQNVVKDLSVELDRLSEESVNNDISSWTKGRSGEALSLLKKRFSHRPVQEKFVCLNCGFETHADEQAALNIARSWLFLRSQEYKKYQTNKTTGNTDKRAFVETWQSFYRKKLKEVWKPAV

SEQ ID NO: 34199 - protein, 978 aa, synthetic construct
  REGION 1..978: note = engineered CasX variant
QEIKRINKIRRRLVKDSNTKKAGKTGPMKTLLVRVMTPDLRERLENLRKKPENIPQPISNTSQANLNKLLTDYTEMKKAILHVYWEEFQKDPVGLMSRVAQPASKKIDQNKLKPEMDEKGNLTTAGFACSQCGQPLFVYKLEQVSEKGKAYTNYFGRCNVAEHEKLILLAQLKPEKDSDEAVTYSLGKFGQRALDFYSIHVTKESTHPVKPLAQIAGNRYASAPVGKALSDACMGTIASFLSKYQDIIIEHQKVVKGNQKRLESLRELAGKENLEYPSVTLPPQPHTKEGVDAYNEVIARVRMWVNLNLWQKLKLSRDDAKPLLRLKGFPSFPLVERQANEVDWWDMVCNVKKLINEKKEDGKVFWQNLAGYKRQEALRPYLSSEEDRKKGKKFARYQLGDLLLHLEKKHGEDWGKVYDEAWERIDKKVEGLSKHIKLEEERRSEDAQSKAALTDWLRAKASFVIEGLKEADKDEFCRCELKLQKWYGDLRGKPFAIEAENSILDISGFSKQYNCAFIWQKDGVKKLNLYLIINYFKGGKLRFKKIKPEAFEANRFYTVINKKSGEIVPMEVNFNFDDPNLIILPLAFGKRQGREFIWNDLLSLETGSLKLANGRVIEKTLYNRRTRQDEPALFVALTFERREVLDSSNIKPMNLIGVDRGENIPAVIALTDPEGCPLSRFKDSLGNPTHILRIRESYKEKQRTIQAKKEVEQRRAGGYSRKYASKAKNLADDMVRNTARDLLYYAVTQDAMLIFENLSRGFGRQGKRTFMAERQYTRMEDWLTAKLAYEGLPSKTYLSKTLAQYTSKTCSNCGFTITSADYDRVLEKLKKTATGWMTTINGKELKVEGQITYYNRYKRQNVVKDLSVELDRLSEESVNNDISSWTKGRSGEALSLLKKRFSHRPVQEKFVCLNCGFETHADEQAALNIARSWLFLRSQEYKKYQTNKTTGNTDKRAFVETWQSFYRKKLKEVWKPAV

SEQ ID NO: 34200 - protein, 978 aa, synthetic construct
  REGION 1..978: note = engineered CasX variant
QEIKRINKIRRRLVKDSNTKKAGKTGPMKTLLVRVMTPDLRERLENLRKKPENIPQPISNTSQANLNKLLTDYTEMKKAILHVYWEEFQKDPVGLMSRVAQPASKKIDQNKLKPEMDEKGNLTTAGFACSQCGQPLFVYKLEQVSEKGKAYTNYFGRCNVAEHEKLILLAQLKPEKDSDEAVTYSLGKFGQRALDFYSIHVTKESTHPVKPLAQIAGNRYASVPVGKALSDACMGTIASFLSKYQDIIIEHQKVVKGNQKRLESLRELAGKENLEYPSVTLPPQPHTKEGVDAYNEVIARVRMWVNLNLWQKLKLSRDDAKPLLRLKGFPSFPLVERQANEVDWWDMVCNVKKLINEKKEDGKVFWQNLAGYKRQEALRPYLSSEEDRKKGKKFARYQLGDLLLHLEKKHGEDWGKVYDEAWERIDKKVEGLSKHIKLEEERRSEDAQSKAALTDWLRAKASFVIEGLKEADKDEFCRCELKLQKWYGDLRGKPFAIEAENSILDISGFSKQYNCAFIWQKDGVKKLNLYLIINYFKGGKLRFKKIKPEAFEANRFYTVINKKSGEIVPMEVNFNFDDPNLIILPLAFGKRQGREFIWNDLLSLETGSLKLANGRVIEKTLYNRRTRQDEPALFVALTFERREVLDSSNIKPMNLIGVDRGENIPAVIALTDPEGCPLSRFKDSLGNPTHILRIRESYKEKQRTIQAKKEVEQRRAGGYSRKYASKAKNLADDMVRNTARDLLYYAVTQDAMLIFENLSRGFGRQGKRTFMAERQYTRMEDWLTAKLAYEGLPSKTYLSKTLAQYTSKTCSNCGFTITSADYDRVLEKLKKTATGWMTTINGKELKVEGQITYYNRYKRQNVVKDLSVELDRLSEESVNNDISSWTKGRSGEALSLLKKRFSHRPVQEKFVCLNCGFETHADEQAALNIARSWLFLRSQEYKKYQTNKTTGNTDKRAFVETWQSFYRKKLKEVWKPAV

SEQ ID NO: 34201 - protein, 978 aa, synthetic construct
  REGION 1..978: note = engineered CasX variant
QEIKRINKIRRRLVKDSNTKKAGKTGPMKTLLVRVMTPDLRERLENLRKKPENIPQPISNTSQANLNKLLTDYTEMKKAILHVYWEEFQKDPVGLMSRVAQPASKKIDQNKLKPEMDEKGNLTTAGFACSQCGQPLFVYKLEQVSEKGKAYTNYFGRCNVAEHEKLIKLAQLKPEKDSDEAVTYSLGKFGQRALDFYSIHVTKESTHPVKPLAQIAGNRYASGPVGKALSDACMGTIASFLSKYQDIIIEHQKVVKGNQKRLESLRELAGKENLEYPSVTLPPQPHTKEGVDAYNEVIARVRMWVNLNLWQKLKLSRDDAKPLLRLKGFPSFPLVERQANEVDWWDMVCNVKKLINEKKEDGKVFWQNLAGYKRQEALRPYLSSEEDRKKGKKFARYQLGDLLLHLEKKHGEDWGKVYDEAWERIDKKVEGLSKHIKLEEERRSEDAQSKAALTDWLRAKASFVIEGLKEADKDEFCRCELKLQKWYGDLRGKPFAIEAENSILDISGFSKQYNCAFIWQKDGVKKLNLYLIINYFKGGKLRFKKIKPEAFEANRFYTVINKKSGEIVPMEVNFNFDDPNLIILPLAFGKRQGREFIWNDLLSLETGSLKLANGRVIEKTLYNRRTRQDEPALFVALTFERREVLDSSNIKPMNLIGVDRGENIPAVIALTDPEGCPLSRFKDSLGNPTHILRIRESYKEKQRTIQAKKEVEQRRAGGYSRKYASKAKNLADDMVRNTARDLLYYAVTQDAMLIFENLSRGFGRQGKRTFMAERQYTRMEDWLTAKLAYEGLPSKTYLSKTLAQYTSKTCSNCGFTITSADYDRVLEKLKKTATGWMTTINGKELKVEGQITYYNRYKRQNVVKDLSVELDRLSEESVNNDISSWTKGRSGEALSLLKKRFSHRPVQEKFVCLNCGFETHADEQAALNIARSWLFLRSQEYKKYQTNKTTGNTDKRAFVETWQSFYRKKLKEVWKPAV

SEQ ID NO: 34202 - protein, 977 aa, synthetic construct
  REGION 1..977: note = engineered CasX variant
QEIKRINKIRRRLVKDSNTKKAGKTGPMKTLLVRVMTPDLRERLENLRKKPENIPQPISNTSQANLNKLLTDYTEMKKAILHVYWEEFQKDPVGLMSRVAQPASKKIDQNKLKPEMDEKGNLTTAGFACSQCGQPLFVYKLEQVSEKGKAYTNYFGRCNVAEHEKLILLAQLKPEKDSDEAVTYSLGKFGQRALDFYSIHVTKESTHPVKPLAQIAGNRYASPVGKALSDACMGTIASFLSKYQDIIIEHQKVVKGNQKRLESLRELAGKENLEYPSVTLPPQPHTKEGVDAYNEVIARVRMWVNLNLWQKLKLSRDDAKPLLRLKGFPSFPLVERQANEVDWWDMVCNVKKLINEKKEDGKVFWQNLAGYKRQEALRPYLSSEEDRKKGKKFARYQLGDLLLHLEKKHGEDWGKVYDEAWERIDKKVEGLSKHIKLEEERRSEDAQSKAALTDWLRAKASFVIEGLKEADKDEFCRCELKLQKWYGDLRGKPFAIEAENSILDISGFSKQYNCAFIWQKDGVKKLNLYLIINYFKGGKLRFKKIKPEAFEANRFYTVINKKSGEIVPMEVNFNFDDPNLIILPLAFGKRQGREFIWNDLLSLETGSLKLANGRVIEKTLYNRRTRQDEPALFVALTFERREVLDSSNIKPMNLIGVDRGENIPAVIALTDPEGCPLSRFKDSLGNPTHILRIRESYKEKQRTIQAKKEVEQRRAGGYSRKYASKAKNLADDMVRNTARDLLYYAVTQDAMLIFENLSRGFGRQGKRTFMAERQYTRMEDWLTAKLAYEGLPSKTYLSKTLAQYTSKTCSNCGFTITSADYDRVLEKLKKTATGWMTTINGKELKVEGQITYYNRYKRQNVVKDLSVELDRLSEESVNNDISSWTKGRSGEALSLLKKRFSHRPVQEKFVCLNCGFETHADEQAALNIARSWLFLRSQEYKKYQTNKTTGNTDKRAFVETWQSFYRKKLKEVWKPAV

SEQ ID NO: 34203 - protein, 978 aa, synthetic construct
  REGION 1..978: note = engineered CasX variant
QEIKRINKIRRRLVKDSNTKKAGKTGPMKTLLVRVMTPDLRERLENLRKKPENIPQPISNTSQANLNKLLTDYTEMKKAILHVYWEEFQKDPVGLMSRVAQPASKKIDQNKLKPEMDEKGNLTTAGFACSQCGQPLFVYKLEQVSEKGKAYTNYFGRCNVAEHEKLILLAQLKPEKDSDEAVTYSLGKFGQRALDFYSIHVTKESTHPVKPLAQIAGNRYASYPVGKALSDACMGTIASFLSKYQDIIIEHQKVVKGNQKRLESLRELAGKENLEYPSVTLPPQPHTKEGVDAYNEVIARVRMWVNLNLWQKLKLSRDDAKPLLRLKGFPSFPLVERQANEVDWWDMVCNVKKLINEKKEDGKVFWQNLAGYKRQEALRPYLSSEEDRKKGKKFARYQLGDLLLHLEKKHGEDWGKVYDEAWERIDKKVEGLSKHIKLEEERRSEDAQSKAALTDWLRAKASFVIEGLKEADKDEFCRCELKLQKWYGDLRGKPFAIEAENSILDISGFSKQYNCAFIWQKDGVKKLNLYLIINYFKGGKLRFKKIKPEAFEANRFYTVINKKSGEIVPMEVNFNFDDPNLIILPLAFGKRQGREFIWNDLLSLETGSLKLANGRVIEKTLYNRRTRQDEPALFVALTFERREVLDSSNIKPMNLIGVDRGENIPAVIALTDPEGCPLSRFKDSLGNPTHILRIGESYKEKQRTIQAKKEVEQRRAGGYSRKYASKAKNLADDMVRNTARDLLYYAVTQDAMLIFENLSRGFGRQGKRTFSAERQYTRMEDWLTAKLAYEGLPSKTYLSKTLAQYTSKTCSNCGFTITSADYDRVLEKLKKTATGWMTTINGKELKVEGQITYYNRYKRQNVVKDLSVELDRLSEESVNNDISSWTKGRSGEALSLLKKRFSHRPVQEKFVCLNCGFETHADEQAALNIARSWLFLRSQEYKKYQTNKTTGNTDKRAFVETWQSFYRKKLKEVWKPAV

SEQ ID NO: 34204 - protein, 978 aa, synthetic construct
  REGION 1..978: note = engineered CasX variant
QEIKRINKIRRRLVKDSNTKKAGKTGPMKTLLVRVMTPDLRERLENLRKKPENIPQPISNTSQANLNKLLTDYTEMKKAILHVYWEEFQKDPVGLMSRVAQPASKKIDQNKLKPEMDEKGNLTTAGFACSQCGQPLFVYKLEQVSEKGKAYTNYFGRCNVAEHEKLILLAQLKPEKDSDEAVTYSLGKFGQRALDFYSIHVTKESTHPVKPLAQIAGNRYASHPVGKALSDACMGTIASFLSKYQDIIIEHQKVVKGNQKRLESLRELAGKENLEYPSVTLPPQPHTKEGVDAYNEVIARVRMWVNLNLWQKLKLSRDDAKPLLRLKGFPSFPLVERQANEVDWWDMVCNVKKLINEKKEDGKVFWQNLAGYKRQEALRPYLSSEEDRKKGKKFARYQLGDLLLHLEKKHGEDWGKVYDEAWERIDKKVEGLSKHIKLEEERRSEDAQSKAALTDWLRAKASFVIEGLKEADKDEFCRCELKLQKWYGDLRGKPFAIEAENSILDISGFSKQYNCAFIWQKDGVKKLNLYLIINYFKGGKLRFKKIKPEAFEANRFYTVINKKSGEIVPMEVNFNFDDPNLIILPLAFGKRQGREFIWNDLLSLETGSLKLANGRVIEKTLYNRRTRQDEPALFVALTFERREVLDSSNIKPMNLIGVDRGENIPAVIALTDPEGCPLSRFKDSLGNPTHILRIGESYKEKQRTIQAKKEVEQRRAGGYSRKYASKAKNLADDMVRNTARDLLYYAVTQDAMLIFENLSRGFGRQGKRTFSAERQYTRMEDWLTAKLAYEGLPSKTYLSKTLAQYTSKTCSNCGFTITSADYDRVLEKLKKTATGWMTTINGKELKVEGQITYYNRYKRQNVVKDLSVELDRLSEESVNNDISSWTKGRSGEALSLLKKRFSHRPVQEKFVCLNCGFETHADEQAALNIARSWLFLRSQEYKKYQTNKTTGNTDKRAFVETWQSFYRKKLKEVWKPAV

SEQ ID NO: 34205 - protein, 978 aa, synthetic construct
  REGION 1..978: note = engineered CasX variant
QEIKRINKIRRRLVKDSNTKKAGKTGPMKTLLVRVMTPDLRERLENLRKKPENIPQPISNTSQANLNKLLTDYTEMKKAILHVYWEEFQKDPVGLMSRVAQPASKKIDQNKLKPEMDEKGNLTTAGFACSQCGQPLFVYKLEQVSEKGKAYTNYFGRCNVAEHEKLILLAQLKPEKDSDEAVTYSLGKFGQRALDFYSIHVTKESTHPVKPLAQIAGNRYASSPVGKALSDACMGTIASFLSKYQDIIIEHQKVVKGNQKRLESLRELAGKENLEYPSVTLPPQPHTKEGVDAYNEVIARVRMWVNLNLWQKLKLSRDDAKPLLRLKGFPSFPLVERQANEVDWWDMVCNVKKLINEKKEDGKVFWQNLAGYKRQEALRPYLSSEEDRKKGKKFARYQLGDLLLHLEKKHGEDWGKVYDEAWERIDKKVEGLSKHIKLEEERRSEDAQSKAALTDWLRAKASFVIEGLKEADKDEFCRCELKLQKWYGDLRGKPFAIEAENSILDISGFSKQYNCAFIWQKDGVKKLNLYLIINYFKGGKLRFKKIKPEAFEANRFYTVINKKSGEIVPMEVNFNFDDPNLIILPLAFGKRQGREFIWNDLLSLETGSLKLANGRVIEKTLYNRRTRQDEPALFVALTFERREVLDSSNIKPMNLIGVDRGENIPAVIALTDPEGCPLSRFKDSLGNPTHILRIGESYKEKQRTIQAKKEVEQRRAGGYSRKYASKAKNLADDMVRNTARDLLYYAVTQDAMLIFENLSRGFGRQGKRTFSAERQYTRMEDWLTAKLAYEGLPSKTYLSKTLAQYTSKTCSNCGFTITSADYDRVLEKLKKTATGWMTTINGKELKVEGQITYYNRYKRQNVVKDLSVELDRLSEESVNNDISSWTKGRSGEALSLLKKRFSHRPVQEKFVCLNCGFETHADEQAALNIARSWLFLRSQEYKKYQTNKTTGNTDKRAFVETWQSFYRKKLKEVWKPAV

SEQ ID NO: 34206 - protein, 978 aa, synthetic construct
  REGION 1..978: note = engineered CasX variant
QEIKRINKIRRRLVKDSNTKKAGKTGPMKTLLVRVMTPDLRERLENLRKKPENIPQPISNTSQANLNKLLTDYTEMKKAILHVYWEEFQKDPVGLMSRVAQPASKKIDQNKLKPEMDEKGNLTTAGFACSQCGQPLFVYKLEQVSEKGKAYTNYFGRCNVAEHEKLILLAQLKPEKDSDEAVTYSLGKFGQRALDFYSIHVTKESTHPVKPLAQIAGNRYASTPVGKALSDACMGTIASFLSKYQDIIIEHQKVVKGNQKRLESLRELAGKENLEYPSVTLPPQPHTKEGVDAYNEVIARVRMWVNLNLWQKLKLSRDDAKPLLRLKGFPSFPLVERQANEVDWWDMVCNVKKLINEKKEDGKVFWQNLAGYKRQEALRPYLSSEEDRKKGKKFARYQLGDLLLHLEKKHGEDWGKVYDEAWERIDKKVEGLSKHIKLEEERRSEDAQSKAALTDWLRAKASFVIEGLKEADKDEFCRCELKLQKWYGDLRGKPFAIEAENSILDISGFSKQYNCAFIWQKDGVKKLNLYLIINYFKGGKLRFKKIKPEAFEANRFYTVINKKSGEIVPMEVNFNFDDPNLIILPLAFGKRQGREFIWNDLLSLETGSLKLANGRVIEKTLYNRRTRQDEPALFVALTFERREVLDSSNIKPMNLIGVDRGENIPAVIALTDPEGCPLSRFKDSLGNPTHILRIGESYKEKQRTIQAKKEVEQRRAGGYSRKYASKAKNLADDMVRNTARDLLYYAVTQDAMLIFENLSRGFGRQGKRTFSAERQYTRMEDWLTAKLAYEGLPSKTYLSKTLAQYTSKTCSNCGFTITSADYDRVLEKLKKTATGWMTTINGKELKVEGQITYYNRYKRQNVVKDLSVELDRLSEESVNNDISSWTKGRSGEALSLLKKRFSHRPVQEKFVCLNCGFETHADEQAALNIARSWLFLRSQEYKKYQTNKTTGNTDKRAFVETWQSFYRKKLKEVWKPAV

SEQ ID NO: 34207 - protein, 978 aa, synthetic construct
  REGION 1..978: note = engineered CasX variant
QEIKRINKIRRRLVKDSNTKKAGKTGPMKTLLVRVMTPDLRERLENLRKKPENIPQPISNTSQANLNKLLTDYTEMKKAILHVYWEEFQKDPVGLMSRVAQPASKKIDQNKLKPEMDEKGNLTTAGFACSQCGQPLFVYKLEQVSEKGKAYTNYFGRCNVAEHEKLILLAQLKPEKDSDEAVTYSLGKFGQRALDFYSIHVTKESTHPVKPLAQIAGNRYASAPVGKALSDACMGTIASFLSKYQDIIIEHQKVVKGNQKRLESLRELAGKENLEYPSVTLPPQPHTKEGVDAYNEVIARVRMWVNLNLWQKLKLSRDDAKPLLRLKGFPSFPLVERQANEVDWWDMVCNVKKLINEKKEDGKVFWQNLAGYKRQEALRPYLSSEEDRKKGKKFARYQLGDLLLHLEKKHGEDWGKVYDEAWERIDKKVEGLSKHIKLEEERRSEDAQSKAALTDWLRAKASFVIEGLKEADKDEFCRCELKLQKWYGDLRGKPFAIEAENSILDISGFSKQYNCAFIWQKDGVKKLNLYLIINYFKGGKLRFKKIKPEAFEANRFYTVINKKSGEIVPMEVNFNFDDPNLIILPLAFGKRQGREFIWNDLLSLETGSLKLANGRVIEKTLYNRRTRQDEPALFVALTFERREVLDSSNIKPMNLIGVDRGENIPAVIALTDPEGCPLSRFKDSLGNPTHILRIGESYKEKQRTIQAKKEVEQRRAGGYSRKYASKAKNLADDMVRNTARDLLYYAVTQDAMLIFENLSRGFGRQGKRTFSAERQYTRMEDWLTAKLAYEGLPSKTYLSKTLAQYTSKTCSNCGFTITSADYDRVLEKLKKTATGWMTTINGKELKVEGQITYYNRYKRQNVVKDLSVELDRLSEESVNNDISSWTKGRSGEALSLLKKRFSHRPVQEKFVCLNCGFETHADEQAALNIARSWLFLRSQEYKKYQTNKTTGNTDKRAFVETWQSFYRKKLKEVWKPAV

SEQ ID NO: 34208 - protein, 978 aa, synthetic construct
  REGION 1..978: note = engineered CasX variant
QEIKRINKIRRRLVKDSNTKKAGKTGPMKTLLVRVMTPDLRERLENLRKKPENIPQPISNTSQANLNKLLTDYTEMKKAILHVYWEEFQKDPVGLMSRVAQPASKKIDQNKLKPEMDEKGNLTTAGFACSQCGQPLFVYKLEQVSEKGKAYTNYFGRCNVAEHEKLILLAQLKPEKDSDEAVTYSLGKFGQRALDFYSIHVTKESTHPVKPLAQIAGNRYASVPVGKALSDACMGTIASFLSKYQDIIIEHQKVVKGNQKRLESLRELAGKENLEYPSVTLPPQPHTKEGVDAYNEVIARVRMWVNLNLWQKLKLSRDDAKPLLRLKGFPSFPLVERQANEVDWWDMVCNVKKLINEKKEDGKVFWQNLAGYKRQEALRPYLSSEEDRKKGKKFARYQLGDLLLHLEKKHGEDWGKVYDEAWERIDKKVEGLSKHIKLEEERRSEDAQSKAALTDWLRAKASFVIEGLKEADKDEFCRCELKLQKWYGDLRGKPFAIEAENSILDISGFSKQYNCAFIWQKDGVKKLNLYLIINYFKGGKLRFKKIKPEAFEANRFYTVINKKSGEIVPMEVNFNFDDPNLIILPLAFGKRQGREFIWNDLLSLETGSLKLANGRVIEKTLYNRRTRQDEPALFVALTFERREVLDSSNIKPMNLIGVDRGENIPAVIALTDPEGCPLSRFKDSLGNPTHILRIGESYKEKQRTIQAKKEVEQRRAGGYSRKYASKAKNLADDMVRNTARDLLYYAVTQDAMLIFENLSRGFGRQGKRTFSAERQYTRMEDWLTAKLAYEGLPSKTYLSKTLAQYTSKTCSNCGFTITSADYDRVLEKLKKTATGWMTTINGKELKVEGQITYYNRYKRQNVVKDLSVELDRLSEESVNNDISSWTKGRSGEALSLLKKRFSHRPVQEKFVCLNCGFETHADEQAALNIARSWLFLRSQEYKKYQTNKTTGNTDKRAFVETWQSFYRKKLKEVWKPAV

SEQ ID NO: 34209 - protein, 978 aa, synthetic construct
  REGION 1..978: note = engineered CasX variant
QEIKRINKIRRRLVKDSNTKKAGKTGPMKTLLVRVMTPDLRERLENLRKKPENIPQPISNTSQANLNKLLTDYTEMKKAILHVYWEEFQKDPVGLMSRVAQPASKKIDQNKLKPEMDEKGNLTTAGFACSQCGQPLFVYKLEQVSEKGKAYTNYFGRCNVAEHEKLIKLAQLKPEKDSDEAVTYSLGKFGQRALDFYSIHVTKESTHPVKPLAQIAGNRYASGPVGKALSDACMGTIASFLSKYQDIIIEHQKVVKGNQKRLESLRELAGKENLEYPSVTLPPQPHTKEGVDAYNEVIARVRMWVNLNLWQKLKLSRDDAKPLLRLKGFPSFPLVERQANEVDWWDMVCNVKKLINEKKEDGKVFWQNLAGYKRQEALRPYLSSEEDRKKGKKFARYQLGDLLLHLEKKHGEDWGKVYDEAWERIDKKVEGLSKHIKLEEERRSEDAQSKAALTDWLRAKASFVIEGLKEADKDEFCRCELKLQKWYGDLRGKPFAIEAENSILDISGFSKQYNCAFIWQKDGVKKLNLYLIINYFKGGKLRFKKIKPEAFEANRFYTVINKKSGEIVPMEVNFNFDDPNLIILPLAFGKRQGREFIWNDLLSLETGSLKLANGRVIEKTLYNRRTRQDEPALFVALTFERREVLDSSNIKPMNLIGVDRGENIPAVIALTDPEGCPLSRFKDSLGNPTHILRIGESYKEKQRTIQAKKEVEQRRAGGYSRKYASKAKNLADDMVRNTARDLLYYAVTQDAMLIFENLSRGFGRQGKRTFSAERQYTRMEDWLTAKLAYEGLPSKTYLSKTLAQYTSKTCSNCGFTITSADYDRVLEKLKKTATGWMTTINGKELKVEGQITYYNRYKRQNVVKDLSVELDRLSEESVNNDISSWTKGRSGEALSLLKKRFSHRPVQEKFVCLNCGFETHADEQAALNIARSWLFLRSQEYKKYQTNKTTGNTDKRAFVETWQSFYRKKLKEVWKPAV

SEQ ID NO: 34210 - protein, 977 aa, synthetic construct
  REGION 1..977: note = engineered CasX variant
QEIKRINKIRRRLVKDSNTKKAGKTGPMKTLLVRVMTPDLRERLENLRKKPENIPQPISNTSQANLNKLLTDYTEMKKAILHVYWEEFQKDPVGLMSRVAQPASKKIDQNKLKPEMDEKGNLTTAGFACSQCGQPLFVYKLEQVSEKGKAYTNYFGRCNVAEHEKLILLAQLKPEKDSDEAVTYSLGKFGQRALDFYSIHVTKESTHPVKPLAQIAGNRYASPVGKALSDACMGTIASFLSKYQDIIIEHQKVVKGNQKRLESLRELAGKENLEYPSVTLPPQPHTKEGVDAYNEVIARVRMWVNLNLWQKLKLSRDDAKPLLRLKGFPSFPLVERQANEVDWWDMVCNVKKLINEKKEDGKVFWQNLAGYKRQEALRPYLSSEEDRKKGKKFARYQLGDLLLHLEKKHGEDWGKVYDEAWERIDKKVEGLSKHIKLEEERRSEDAQSKAALTDWLRAKASFVIEGLKEADKDEFCRCELKLQKWYGDLRGKPFAIEAENSILDISGFSKQYNCAFIWQKDGVKKLNLYLIINYFKGGKLRFKKIKPEAFEANRFYTVINKKSGEIVPMEVNFNFDDPNLIILPLAFGKRQGREFIWNDLLSLETGSLKLANGRVIEKTLYNRRTRQDEPALFVALTFERREVLDSSNIKPMNLIGVDRGENIPAVIALTDPEGCPLSRFKDSLGNPTHILRIGESYKEKQRTIQAKKEVEQRRAGGYSRKYASKAKNLADDMVRNTARDLLYYAVTQDAMLIFENLSRGFGRQGKRTFSAERQYTRMEDWLTAKLAYEGLPSKTYLSKTLAQYTSKTCSNCGFTITSADYDRVLEKLKKTATGWMTTINGKELKVEGQITYYNRYKRQNVVKDLSVELDRLSEESVNNDISSWTKGRSGEALSLLKKRFSHRPVQEKFVCLNCGFETHADEQAALNIARSWLFLRSQEYKKYQTNKTTGNTDKRAFVETWQSFYRKKLKEVWKPAV

SEQ ID NO: 34211 - protein, 978 aa, synthetic construct
  REGION 1..978: note = engineered CasX variant
QEIKRINKIRRRLVKDSNTKKAGKTGPMKTLLVRVMTPDLRERLENLRKKPENIPQPISNTSQANLNKLLTDYTEMKKAILHVYWEEFQKDPVGLMSRVAQPASKKIDQNKLKPEMDEKGNLTTAGFACSQCGQPLFVYKLEQVSEKGKAYTNYFGRCNVAEHEKLILLAQLKPEKDSDEAVTYSLGKFGQRALDFYSIHVTKESTHPVKPLAQIAGNRYASYPVGKALSDACMGTIASFLSKYQDIIIEHQKVVKGNQKRLESLRELAGKENLEYPSVTLPPQPHTKEGVDAYNEVIARVRMWVNLNLWQKLKLSRDDAKPLLRLKGFPSFPLVERQANEVDWWDMVCNVKKLINEKKEDGKVFWQNLAGYKRQEALRPYLSSEEDRKKGKKFARYQLGDLLLHLEKKHGEDWGKVYDEAWERIDKKVEGLSKHIKLEEERRSEDAQSKAALTDWLRAKASFVIEGLKEADKDEFCRCELKLQKWYGDLRGKPFAIEAENSILDISGFSKQYNCAFIWQKDGVKKLNLYLIINYFKGGKLRFKKIKPEAFEANRFYTVINKKSGEIVPMEVNFNFDDPNLIILPLAFGKRQGREFIWNDLLSLETGSLKLANGRVIEKTLYNRRTRQDEPALFVALTFERREVLDSSNIKPMNLIGVDRGENIPAVIALTDPEGCPLSRFKDSLGNPTHILRIGESYKEKQRTIQAKKEVEQRRAGGYSRKYASKAKNLADDMVRNTARDLLYYAVTQDAMLIFENLSRGFGRQGKRTFMAERQYTRMEDWLTAKLAYEGLPSKTYLSKTLAQYTSKTCSNCGFTITSADYDRVLEKLKKTATGWMTTINGKELKVEGQITYYNRYKRQNVVKDLSVELDRLSEESVNNDISSWDKGRSGEALSLLKKRFSHRPVQEKFVCLNCGFETHADEQAALNIARSWLFLRSQEYKKYQTNKTTGNTDKRAFVETWQSFYRKKLKEVWKPAV

SEQ ID NO: 34212 - protein, 978 aa, synthetic construct
  REGION 1..978: note = engineered CasX variant
QEIKRINKIRRRLVKDSNTKKAGKTGPMKTLLVRVMTPDLRERLENLRKKPENIPQPISNTSQANLNKLLTDYTEMKKAILHVYWEEFQKDPVGLMSRVAQPASKKIDQNKLKPEMDEKGNLTTAGFACSQCGQPLFVYKLEQVSEKGKAYTNYFGRCNVAEHEKLILLAQLKPEKDSDEAVTYSLGKFGQRALDFYSIHVTKESTHPVKPLAQIAGNRYASHPVGKALSDACMGTIASFLSKYQDIIIEHQKVVKGNQKRLESLRELAGKENLEYPSVTLPPQPHTKEGVDAYNEVIARVRMWVNLNLWQKLKLSRDDAKPLLRLKGFPSFPLVERQANEVDWWDMVCNVKKLINEKKEDGKVFWQNLAGYKRQEALRPYLSSEEDRKKGKKFARYQLGDLLLHLEKKHGEDWGKVYDEAWERIDKKVEGLSKHIKLEEERRSEDAQSKAALTDWLRAKASFVIEGLKEADKDEFCRCELKLQKWYGDLRGKPFAIEAENSILDISGFSKQYNCAFIWQKDGVKKLNLYLIINYFKGGKLRFKKIKPEAFEANRFYTVINKKSGEIVPMEVNFNFDDPNLIILPLAFGKRQGREFIWNDLLSLETGSLKLANGRVIEKTLYNRRTRQDEPALFVALTFERREVLDSSNIKPMNLIGVDRGENIPAVIALTDPEGCPLSRFKDSLGNPTHILRIGESYKEKQRTIQAKKEVEQRRAGGYSRKYASKAKNLADDMVRNTARDLLYYAVTQDAMLIFENLSRGFGRQGKRTFMAERQYTRMEDWLTAKLAYEGLPSKTYLSKTLAQYTSKTCSNCGFTITSADYDRVLEKLKKTATGWMTTINGKELKVEGQITYYNRYKRQNVVKDLSVELDRLSEESVNNDISSWDKGRSGEALSLLKKRFSHRPVQEKFVCLNCGFETHADEQAALNIARSWLFLRSQEYKKYQTNKTTGNTDKRAFVETWQSFYRKKLKEVWKPAV

SEQ ID NO: 34213 - protein, 978 aa, synthetic construct
  REGION 1..978: note = engineered CasX variant
QEIKRINKIRRRLVKDSNTKKAGKTGPMKTLLVRVMTPDLRERLENLRKKPENIPQPISNTSQANLNKLLTDYTEMKKAILHVYWEEFQKDPVGLMSRVAQPASKKIDQNKLKPEMDEKGNLTTAGFACSQCGQPLFVYKLEQVSEKGKAYTNYFGRCNVAEHEKLILLAQLKPEKDSDEAVTYSLGKFGQRALDFYSIHVTKESTHPVKPLAQIAGNRYASSPVGKALSDACMGTIASFLSKYQDIIIEHQKVVKGNQKRLESLRELAGKENLEYPSVTLPPQPHTKEGVDAYNEVIARVRMWVNLNLWQKLKLSRDDAKPLLRLKGFPSFPLVERQANEVDWWDMVCNVKKLINEKKEDGKVFWQNLAGYKRQEALRPYLSSEEDRKKGKKFARYQLGDLLLHLEKKHGEDWGKVYDEAWERIDKKVEGLSKHIKLEEERRSEDAQSKAALTDWLRAKASFVIEGLKEADKDEFCRCELKLQKWYGDLRGKPFAIEAENSILDISGFSKQYNCAFIWQKDGVKKLNLYLIINYFKGGKLRFKKIKPEAFEANRFYTVINKKSGEIVPMEVNFNFDDPNLIILPLAFGKRQGREFIWNDLLSLETGSLKLANGRVIEKTLYNRRTRQDEPALFVALTFERREVLDSSNIKPMNLIGVDRGENIPAVIALTDPEGCPLSRFKDSLGNPTHILRIGESYKEKQRTIQAKKEVEQRRAGGYSRKYASKAKNLADDMVRNTARDLLYYAVTQDAMLIFENLSRGFGRQGKRTFMAERQYTRMEDWLTAKLAYEGLPSKTYLSKTLAQYTSKTCSNCGFTITSADYDRVLEKLKKTATGWMTTINGKELKVEGQITYYNRYKRQNVVKDLSVELDRLSEESVNNDISSWDKGRSGEALSLLKKRFSHRPVQEKFVCLNCGFETHADEQAALNIARSWLFLRSQEYKKYQTNKTTGNTDKRAFVETWQSFYRKKLKEVWKPAV

SEQ ID NO: 34214 - protein, 978 aa, synthetic construct
  REGION 1..978: note = engineered CasX variant
QEIKRINKIRRRLVKDSNTKKAGKTGPMKTLLVRVMTPDLRERLENLRKKPENIPQPISNTSQANLNKLLTDYTEMKKAILHVYWEEFQKDPVGLMSRVAQPASKKIDQNKLKPEMDEKGNLTTAGFACSQCGQPLFVYKLEQVSEKGKAYTNYFGRCNVAEHEKLILLAQLKPEKDSDEAVTYSLGKFGQRALDFYSIHVTKESTHPVKPLAQIAGNRYASTPVGKALSDACMGTIASFLSKYQDIIIEHQKVVKGNQKRLESLRELAGKENLEYPSVTLPPQPHTKEGVDAYNEVIARVRMWVNLNLWQKLKLSRDDAKPLLRLKGFPSFPLVERQANEVDWWDMVCNVKKLINEKKEDGKVFWQNLAGYKRQEALRPYLSSEEDRKKGKKFARYQLGDLLLHLEKKHGEDWGKVYDEAWERIDKKVEGLSKHIKLEEERRSEDAQSKAALTDWLRAKASFVIEGLKEADKDEFCRCELKLQKWYGDLRGKPFAIEAENSILDISGFSKQYNCAFIWQKDGVKKLNLYLIINYFKGGKLRFKKIKPEAFEANRFYTVINKKSGEIVPMEVNFNFDDPNLIILPLAFGKRQGREFIWNDLLSLETGSLKLANGRVIEKTLYNRRTRQDEPALFVALTFERREVLDSSNIKPMNLIGVDRGENIPAVIALTDPEGCPLSRFKDSLGNPTHILRIGESYKEKQRTIQAKKEVEQRRAGGYSRKYASKAKNLADDMVRNTARDLLYYAVTQDAMLIFENLSRGFGRQGKRTFMAERQYTRMEDWLTAKLAYEGLPSKTYLSKTLAQYTSKTCSNCGFTITSADYDRVLEKLKKTATGWMTTINGKELKVEGQITYYNRYKRQNVVKDLSVELDRLSEESVNNDISSWDKGRSGEALSLLKKRFSHRPVQEKFVCLNCGFETHADEQAALNIARSWLFLRSQEYKKYQTNKTTGNTDKRAFVETWQSFYRKKLKEVWKPAV

SEQ ID NO: 34215 - protein, 978 aa, synthetic construct
  REGION 1..978: note = engineered CasX variant
QEIKRINKIRRRLVKDSNTKKAGKTGPMKTLLVRVMTPDLRERLENLRKKPENIPQPISNTSQANLNKLLTDYTEMKKAILHVYWEEFQKDPVGLMSRVAQPASKKIDQNKLKPEMDEKGNLTTAGFACSQCGQPLFVYKLEQVSEKGKAYTNYFGRCNVAEHEKLILLAQLKPEKDSDEAVTYSLGKFGQRALDFYSIHVTKESTHPVKPLAQIAGNRYASAPVGKALSDACMGTIASFLSKYQDIIIEHQKVVKGNQKRLESLRELAGKENLEYPSVTLPPQPHTKEGVDAYNEVIARVRMWVNLNLWQKLKLSRDDAKPLLRLKGFPSFPLVERQANEVDWWDMVCNVKKLINEKKEDGKVFWQNLAGYKRQEALRPYLSSEEDRKKGKKFARYQLGDLLLHLEKKHGEDWGKVYDEAWERIDKKVEGLSKHIKLEEERRSEDAQSKAALTDWLRAKASFVIEGLKEADKDEFCRCELKLQKWYGDLRGKPFAIEAENSILDISGFSKQYNCAFIWQKDGVKKLNLYLIINYFKGGKLRFKKIKPEAFEANRFYTVINKKSGEIVPMEVNFNFDDPNLIILPLAFGKRQGREFIWNDLLSLETGSLKLANGRVIEKTLYNRRTRQDEPALFVALTFERREVLDSSNIKPMNLIGVDRGENIPAVIALTDPEGCPLSRFKDSLGNPTHILRIGESYKEKQRTIQAKKEVEQRRAGGYSRKYASKAKNLADDMVRNTARDLLYYAVTQDAMLIFENLSRGFGRQGKRTFMAERQYTRMEDWLTAKLAYEGLPSKTYLSKTLAQYTSKTCSNCGFTITSADYDRVLEKLKKTATGWMTTINGKELKVEGQITYYNRYKRQNVVKDLSVELDRLSEESVNNDISSWDKGRSGEALSLLKKRFSHRPVQEKFVCLNCGFETHADEQAALNIARSWLFLRSQEYKKYQTNKTTGNTDKRAFVETWQSFYRKKLKEVWKPAV

SEQ ID NO: 34216 - protein, 978 aa, synthetic construct
  REGION 1..978: note = engineered CasX variant
QEIKRINKIRRRLVKDSNTKKAGKTGPMKTLLVRVMTPDLRERLENLRKKPENIPQPISNTSQANLNKLLTDYTEMKKAILHVYWEEFQKDPVGLMSRVAQPASKKIDQNKLKPEMDEKGNLTTAGFACSQCGQPLFVYKLEQVSEKGKAYTNYFGRCNVAEHEKLILLAQLKPEKDSDEAVTYSLGKFGQRALDFYSIHVTKESTHPVKPLAQIAGNRYASVPVGKALSDACMGTIASFLSKYQDIIIEHQKVVKGNQKRLESLRELAGKENLEYPSVTLPPQPHTKEGVDAYNEVIARVRMWVNLNLWQKLKLSRDDAKPLLRLKGFPSFPLVERQANEVDWWDMVCNVKKLINEKKEDGKVFWQNLAGYKRQEALRPYLSSEEDRKKGKKFARYQLGDLLLHLEKKHGEDWGKVYDEAWERIDKKVEGLSKHIKLEEERRSEDAQSKAALTDWLRAKASFVIEGLKEADKDEFCRCELKLQKWYGDLRGKPFAIEAENSILDISGFSKQYNCAFIWQKDGVKKLNLYLIINYFKGGKLRFKKIKPEAFEANRFYTVINKKSGEIVPMEVNFNFDDPNLIILPLAFGKRQGREFIWNDLLSLETGSLKLANGRVIEKTLYNRRTRQDEPALFVALTFERREVLDSSNIKPMNLIGVDRGENIPAVIALTDPEGCPLSRFKDSLGNPTHILRIGESYKEKQRTIQAKKEVEQRRAGGYSRKYASKAKNLADDMVRNTARDLLYYAVTQDAMLIFENLSRGFGRQGKRTFMAERQYTRMEDWLTAKLAYEGLPSKTYLSKTLAQYTSKTCSNCGFTITSADYDRVLEKLKKTATGWMTTINGKELKVEGQITYYNRYKRQNVVKDLSVELDRLSEESVNNDISSWDKGRSGEALSLLKKRFSHRPVQEKFVCLNCGFETHADEQAALNIARSWLFLRSQEYKKYQTNKTTGNTDKRAFVETWQSFYRKKLKEVWKPAV

SEQ ID NO: 34217 - protein, 978 aa, synthetic construct
  REGION 1..978: note = engineered CasX variant
QEIKRINKIRRRLVKDSNTKKAGKTGPMKTLLVRVMTPDLRERLENLRKKPENIPQPISNTSQANLNKLLTDYTEMKKAILHVYWEEFQKDPVGLMSRVAQPASKKIDQNKLKPEMDEKGNLTTAGFACSQCGQPLFVYKLEQVSEKGKAYTNYFGRCNVAEHEKLIKLAQLKPEKDSDEAVTYSLGKFGQRALDFYSIHVTKESTHPVKPLAQIAGNRYASGPVGKALSDACMGTIASFLSKYQDIIIEHQKVVKGNQKRLESLRELAGKENLEYPSVTLPPQPHTKEGVDAYNEVIARVRMWVNLNLWQKLKLSRDDAKPLLRLKGFPSFPLVERQANEVDWWDMVCNVKKLINEKKEDGKVFWQNLAGYKRQEALRPYLSSEEDRKKGKKFARYQLGDLLLHLEKKHGEDWGKVYDEAWERIDKKVEGLSKHIKLEEERRSEDAQSKAALTDWLRAKASFVIEGLKEADKDEFCRCELKLQKWYGDLRGKPFAIEAENSILDISGFSKQYNCAFIWQKDGVKKLNLYLIINYFKGGKLRFKKIKPEAFEANRFYTVINKKSGEIVPMEVNFNFDDPNLIILPLAFGKRQGREFIWNDLLSLETGSLKLANGRVIEKTLYNRRTRQDEPALFVALTFERREVLDSSNIKPMNLIGVDRGENIPAVIALTDPEGCPLSRFKDSLGNPTHILRIGESYKEKQRTIQAKKEVEQRRAGGYSRKYASKAKNLADDMVRNTARDLLYYAVTQDAMLIFENLSRGFGRQGKRTFMAERQYTRMEDWLTAKLAYEGLPSKTYLSKTLAQYTSKTCSNCGFTITSADYDRVLEKLKKTATGWMTTINGKELKVEGQITYYNRYKRQNVVKDLSVELDRLSEESVNNDISSWDKGRSGEALSLLKKRFSHRPVQEKFVCLNCGFETHADEQAALNIARSWLFLRSQEYKKYQTNKTTGNTDKRAFVETWQSFYRKKLKEVWKPAV

SEQ ID NO: 34218 - protein, 977 aa, synthetic construct
  REGION 1..977: note = engineered CasX variant
QEIKRINKIRRRLVKDSNTKKAGKTGPMKTLLVRVMTPDLRERLENLRKKPENIPQPISNTSQANLNKLLTDYTEMKKAILHVYWEEFQKDPVGLMSRVAQPASKKIDQNKLKPEMDEKGNLTTAGFACSQCGQPLFVYKLEQVSEKGKAYTNYFGRCNVAEHEKLILLAQLKPEKDSDEAVTYSLGKFGQRALDFYSIHVTKESTHPVKPLAQIAGNRYASPVGKALSDACMGTIASFLSKYQDIIIEHQKVVKGNQKRLESLRELAGKENLEYPSVTLPPQPHTKEGVDAYNEVIARVRMWVNLNLWQKLKLSRDDAKPLLRLKGFPSFPLVERQANEVDWWDMVCNVKKLINEKKEDGKVFWQNLAGYKRQEALRPYLSSEEDRKKGKKFARYQLGDLLLHLEKKHGEDWGKVYDEAWERIDKKVEGLSKHIKLEEERRSEDAQSKAALTDWLRAKASFVIEGLKEADKDEFCRCELKLQKWYGDLRGKPFAIEAENSILDISGFSKQYNCAFIWQKDGVKKLNLYLIINYFKGGKLRFKKIKPEAFEANRFYTVINKKSGEIVPMEVNFNFDDPNLIILPLAFGKRQGREFIWNDLLSLETGSLKLANGRVIEKTLYNRRTRQDEPALFVALTFERREVLDSSNIKPMNLIGVDRGENIPAVIALTDPEGCPLSRFKDSLGNPTHILRIGESYKEKQRTIQAKKEVEQRRAGGYSRKYASKAKNLADDMVRNTARDLLYYAVTQDAMLIFENLSRGFGRQGKRTFMAERQYTRMEDWLTAKLAYEGLPSKTYLSKTLAQYTSKTCSNCGFTITSADYDRVLEKLKKTATGWMTTINGKELKVEGQITYYNRYKRQNVVKDLSVELDRLSEESVNNDISSWDKGRSGEALSLLKKRFSHRPVQEKFVCLNCGFETHADEQAALNIARSWLFLRSQEYKKYQTNKTTGNTDKRAFVETWQSFYRKKLKEVWKPAV

SEQ ID NO: 34219 - protein, 978 aa, synthetic construct
  REGION 1..978: note = engineered CasX variant
QEIKRINKIRRRLVKDSNTKKAGKTGPMKTLLVRVMTPDLRERLENLRKKPENIPQPISNTSQANLNKLLTDYTEMKKAILHVYWEEFQVDPVGLMSRVAQPASKKIDQNKLKPEMDEKGNLTTAGFACSQCGQPLFVYKLEQVSEKGKAYTNYFGRCNVAEHEKLILLAQLKPEKDSDEAVTYSLGKFGQRALDFYSIHVTKESTHPVKPLAQIAGNRYASYPVGKALSDACMGTIASFLSKYQDIIIEHQKVVKGNQKRLESLRELAGKENLEYPSVTLPPQPHTKEGVDAYNEVIARVRMWVNLNLWQKLKLSRDDAKPLLRLKGFPSFPLVERQANEVDWWDMVCNVKKLINEKKEDGKVFWQNLAGYKRQEALRPYLSSEEDRKKGKKFARYQLGDLLLHLEKKHGEDWGKVYDEAWERIDKKVEGLSKHIKLEEERRSEDAQSKAALTDWLRAKASFVIEGLKEADKDEFCRCELKLQKWYGDLRGKPFAIEAENSILDISGFSKQYNCAFIWQKDGVKKLNLYLIINYFKGGKLRFKKIKPEAFEANRFYTVINKKSGEIVPMEVNFNFDDPNLIILPLAFGKRQGREFIWNDLLSLETGSLKLANGRVIEKTLYNRRTRQDEPALFVALTFERREVLDSSNIKPMNLIGVDRGENIPAVIALTDPEGCPLSRFKDSLGNPTHILRIGESYKEKQRTIQAKKEVEQRRAGGYSRKYASKAKNLADDMVRNTARDLLYYAVTQDAMLIFENLSRGFGRQGKRTFMAERQYTRMEDWLTAKLAYEGLPSKTYLSKTLAQYTSKTCSNCGFTITSADYDRVLEKLKKTATGWMTTINGKELKVEGQITYYNRYKRQNVVKDLSVELDRLSEESVNNDISSWTKGRSGEALSLLKKRFSHRPVQEKFVCLNCGFETHADEQAALNIARSWLFLRSQEYKKYQTNKTTGNTDKRAFVETWQSFYRKKLKEVWKPAV

SEQ ID NO: 34220 - protein, 978 aa, synthetic construct
  REGION 1..978: note = engineered CasX variant
QEIKRINKIRRRLVKDSNTKKAGKTGPMKTLLVRVMTPDLRERLENLRKKPENIPQPISNTSQANLNKLLTDYTEMKKAILHVYWEEFQVDPVGLMSRVAQPASKKIDQNKLKPEMDEKGNLTTAGFACSQCGQPLFVYKLEQVSEKGKAYTNYFGRCNVAEHEKLILLAQLKPEKDSDEAVTYSLGKFGQRALDFYSIHVTKESTHPVKPLAQIAGNRYASHPVGKALSDACMGTIASFLSKYQDIIIEHQKVVKGNQKRLESLRELAGKENLEYPSVTLPPQPHTKEGVDAYNEVIARVRMWVNLNLWQKLKLSRDDAKPLLRLKGFPSFPLVERQANEVDWWDMVCNVKKLINEKKEDGKVFWQNLAGYKRQEALRPYLSSEEDRKKGKKFARYQLGDLLLHLEKKHGEDWGKVYDEAWERIDKKVEGLSKHIKLEEERRSEDAQSKAALTDWLRAKASFVIEGLKEADKDEFCRCELKLQKWYGDLRGKPFAIEAENSILDISGFSKQYNCAFIWQKDGVKKLNLYLIINYFKGGKLRFKKIKPEAFEANRFYTVINKKSGEIVPMEVNFNFDDPNLIILPLAFGKRQGREFIWNDLLSLETGSLKLANGRVIEKTLYNRRTRQDEPALFVALTFERREVLDSSNIKPMNLIGVDRGENIPAVIALTDPEGCPLSRFKDSLGNPTHILRIGESYKEKQRTIQAKKEVEQRRAGGYSRKYASKAKNLADDMVRNTARDLLYYAVTQDAMLIFENLSRGFGRQGKRTFMAERQYTRMEDWLTAKLAYEGLPSKTYLSKTLAQYTSKTCSNCGFTITSADYDRVLEKLKKTATGWMTTINGKELKVEGQITYYNRYKRQNVVKDLSVELDRLSEESVNNDISSWTKGRSGEALSLLKKRFSHRPVQEKFVCLNCGFETHADEQAALNIARSWLFLRSQEYKKYQTNKTTGNTDKRAFVETWQSFYRKKLKEVWKPAV

SEQ ID NO: 34221 - protein, 978 aa, synthetic construct
  REGION 1..978: note = engineered CasX variant
QEIKRINKIRRRLVKDSNTKKAGKTGPMKTLLVRVMTPDLRERLENLRKKPENIPQPISNTSQANLNKLLTDYTEMKKAILHVYWEEFQVDPVGLMSRVAQPASKKIDQNKLKPEMDEKGNLTTAGFACSQCGQPLFVYKLEQVSEKGKAYTNYFGRCNVAEHEKLILLAQLKPEKDSDEAVTYSLGKFGQRALDFYSIHVTKESTHPVKPLAQIAGNRYASSPVGKALSDACMGTIASFLSKYQDIIIEHQKVVKGNQKRLESLRELAGKENLEYPSVTLPPQPHTKEGVDAYNEVIARVRMWVNLNLWQKLKLSRDDAKPLLRLKGFPSFPLVERQANEVDWWDMVCNVKKLINEKKEDGKVFWQNLAGYKRQEALRPYLSSEEDRKKGKKFARYQLGDLLLHLEKKHGEDWGKVYDEAWERIDKKVEGLSKHIKLEEERRSEDAQSKAALTDWLRAKASFVIEGLKEADKDEFCRCELKLQKWYGDLRGKPFAIEAENSILDISGFSKQYNCAFIWQKDGVKKLNLYLIINYFKGGKLRFKKIKPEAFEANRFYTVINKKSGEIVPMEVNFNFDDPNLIILPLAFGKRQGREFIWNDLLSLETGSLKLANGRVIEKTLYNRRTRQDEPALFVALTFERREVLDSSNIKPMNLIGVDRGENIPAVIALTDPEGCPLSRFKDSLGNPTHILRIGESYKEKQRTIQAKKEVEQRRAGGYSRKYASKAKNLADDMVRNTARDLLYYAVTQDAMLIFENLSRGFGRQGKRTFMAERQYTRMEDWLTAKLAYEGLPSKTYLSKTLAQYTSKTCSNCGFTITSADYDRVLEKLKKTATGWMTTINGKELKVEGQITYYNRYKRQNVVKDLSVELDRLSEESVNNDISSWTKGRSGEALSLLKKRFSHRPVQEKFVCLNCGFETHADEQAALNIARSWLFLRSQEYKKYQTNKTTGNTDKRAFVETWQSFYRKKLKEVWKPAV

SEQ ID NO: 34222 - protein, 978 aa, synthetic construct
  REGION 1..978: note = engineered CasX variant
QEIKRINKIRRRLVKDSNTKKAGKTGPMKTLLVRVMTPDLRERLENLRKKPENIPQPISNTSQANLNKLLTDYTEMKKAILHVYWEEFQVDPVGLMSRVAQPASKKIDQNKLKPEMDEKGNLTTAGFACSQCGQPLFVYKLEQVSEKGKAYTNYFGRCNVAEHEKLILLAQLKPEKDSDEAVTYSLGKFGQRALDFYSIHVTKESTHPVKPLAQIAGNRYASTPVGKALSDACMGTIASFLSKYQDIIIEHQKVVKGNQKRLESLRELAGKENLEYPSVTLPPQPHTKEGVDAYNEVIARVRMWVNLNLWQKLKLSRDDAKPLLRLKGFPSFPLVERQANEVDWWDMVCNVKKLINEKKEDGKVFWQNLAGYKRQEALRPYLSSEEDRKKGKKFARYQLGDLLLHLEKKHGEDWGKVYDEAWERIDKKVEGLSKHIKLEEERRSEDAQSKAALTDWLRAKASFVIEGLKEADKDEFCRCELKLQKWYGDLRGKPFAIEAENSILDISGFSKQYNCAFIWQKDGVKKLNLYLIINYFKGGKLRFKKIKPEAFEANRFYTVINKKSGEIVPMEVNFNFDDPNLIILPLAFGKRQGREFIWNDLLSLETGSLKLANGRVIEKTLYNRRTRQDEPALFVALTFERREVLDSSNIKPMNLIGVDRGENIPAVIALTDPEGCPLSRFKDSLGNPTHILRIGESYKEKQRTIQAKKEVEQRRAGGYSRKYASKAKNLADDMVRNTARDLLYYAVTQDAMLIFENLSRGFGRQGKRTFMAERQYTRMEDWLTAKLAYEGLPSKTYLSKTLAQYTSKTCSNCGFTITSADYDRVLEKLKKTATGWMTTINGKELKVEGQITYYNRYKRQNVVKDLSVELDRLSEESVNNDISSWTKGRSGEALSLLKKRFSHRPVQEKFVCLNCGFETHADEQAALNIARSWLFLRSQEYKKYQTNKTTGNTDKRAFVETWQSFYRKKLKEVWKPAV

SEQ ID NO: 34223 - protein, 978 aa, synthetic construct
  REGION 1..978: note = engineered CasX variant
QEIKRINKIRRRLVKDSNTKKAGKTGPMKTLLVRVMTPDLRERLENLRKKPENIPQPISNTSQANLNKLLTDYTEMKKAILHVYWEEFQVDPVGLMSRVAQPASKKIDQNKLKPEMDEKGNLTTAGFACSQCGQPLFVYKLEQVSEKGKAYTNYFGRCNVAEHEKLILLAQLKPEKDSDEAVTYSLGKFGQRALDFYSIHVTKESTHPVKPLAQIAGNRYASAPVGKALSDACMGTIASFLSKYQDIIIEHQKVVKGNQKRLESLRELAGKENLEYPSVTLPPQPHTKEGVDAYNEVIARVRMWVNLNLWQKLKLSRDDAKPLLRLKGFPSFPLVERQANEVDWWDMVCNVKKLINEKKEDGKVFWQNLAGYKRQEALRPYLSSEEDRKKGKKFARYQLGDLLLHLEKKHGEDWGKVYDEAWERIDKKVEGLSKHIKLEEERRSEDAQSKAALTDWLRAKASFVIEGLKEADKDEFCRCELKLQKWYGDLRGKPFAIEAENSILDISGFSKQYNCAFIWQKDGVKKLNLYLIINYFKGGKLRFKKIKPEAFEANRFYTVINKKSGEIVPMEVNFNFDDPNLIILPLAFGKRQGREFIWNDLLSLETGSLKLANGRVIEKTLYNRRTRQDEPALFVALTFERREVLDSSNIKPMNLIGVDRGENIPAVIALTDPEGCPLSRFKDSLGNPTHILRIGESYKEKQRTIQAKKEVEQRRAGGYSRKYASKAKNLADDMVRNTARDLLYYAVTQDAMLIFENLSRGFGRQGKRTFMAERQYTRMEDWLTAKLAYEGLPSKTYLSKTLAQYTSKTCSNCGFTITSADYDRVLEKLKKTATGWMTTINGKELKVEGQITYYNRYKRQNVVKDLSVELDRLSEESVNNDISSWTKGRSGEALSLLKKRFSHRPVQEKFVCLNCGFETHADEQAALNIARSWLFLRSQEYKKYQTNKTTGNTDKRAFVETWQSFYRKKLKEVWKPAV

SEQ ID NO: 34224 - protein, 978 aa, synthetic construct
  REGION 1..978: note = engineered CasX variant
QEIKRINKIRRRLVKDSNTKKAGKTGPMKTLLVRVMTPDLRERLENLRKKPENIPQPISNTSQANLNKLLTDYTEMKKAILHVYWEEFQVDPVGLMSRVAQPASKKIDQNKLKPEMDEKGNLTTAGFACSQCGQPLFVYKLEQVSEKGKAYTNYFGRCNVAEHEKLILLAQLKPEKDSDEAVTYSLGKFGQRALDFYSIHVTKESTHPVKPLAQIAGNRYASVPVGKALSDACMGTIASFLSKYQDIIIEHQKVVKGNQKRLESLRELAGKENLEYPSVTLPPQPHTKEGVDAYNEVIARVRMWVNLNLWQKLKLSRDDAKPLLRLKGFPSFPLVERQANEVDWWDMVCNVKKLINEKKEDGKVFWQNLAGYKRQEALRPYLSSEEDRKKGKKFARYQLGDLLLHLEKKHGEDWGKVYDEAWERIDKKVEGLSKHIKLEEERRSEDAQSKAALTDWLRAKASFVIEGLKEADKDEFCRCELKLQKWYGDLRGKPFAIEAENSILDISGFSKQYNCAFIWQKDGVKKLNLYLIINYFKGGKLRFKKIKPEAFEANRFYTVINKKSGEIVPMEVNFNFDDPNLIILPLAFGKRQGREFIWNDLLSLETGSLKLANGRVIEKTLYNRRTRQDEPALFVALTFERREVLDSSNIKPMNLIGVDRGENIPAVIALTDPEGCPLSRFKDSLGNPTHILRIGESYKEKQRTIQAKKEVEQRRAGGYSRKYASKAKNLADDMVRNTARDLLYYAVTQDAMLIFENLSRGFGRQGKRTFMAERQYTRMEDWLTAKLAYEGLPSKTYLSKTLAQYTSKTCSNCGFTITSADYDRVLEKLKKTATGWMTTINGKELKVEGQITYYNRYKRQNVVKDLSVELDRLSEESVNNDISSWTKGRSGEALSLLKKRFSHRPVQEKFVCLNCGFETHADEQAALNIARSWLFLRSQEYKKYQTNKTTGNTDKRAFVETWQSFYRKKLKEVWKPAV

SEQ ID NO: 34225 - protein, 978 aa, synthetic construct
  REGION 1..978: note = engineered CasX variant
QEIKRINKIRRRLVKDSNTKKAGKTGPMKTLLVRVMTPDLRERLENLRKKPENIPQPISNTSQANLNKLLTDYTEMKKAILHVYWEEFQVDPVGLMSRVAQPASKKIDQNKLKPEMDEKGNLTTAGFACSQCGQPLFVYKLEQVSEKGKAYTNYFGRCNVAEHEKLIKLAQLKPEKDSDEAVTYSLGKFGQRALDFYSIHVTKESTHPVKPLAQIAGNRYASGPVGKALSDACMGTIASFLSKYQDIIIEHQKVVKGNQKRLESLRELAGKENLEYPSVTLPPQPHTKEGVDAYNEVIARVRMWVNLNLWQKLKLSRDDAKPLLRLKGFPSFPLVERQANEVDWWDMVCNVKKLINEKKEDGKVFWQNLAGYKRQEALRPYLSSEEDRKKGKKFARYQLGDLLLHLEKKHGEDWGKVYDEAWERIDKKVEGLSKHIKLEEERRSEDAQSKAALTDWLRAKASFVIEGLKEADKDEFCRCELKLQKWYGDLRGKPFAIEAENSILDISGFSKQYNCAFIWQKDGVKKLNLYLIINYFKGGKLRFKKIKPEAFEANRFYTVINKKSGEIVPMEVNFNFDDPNLIILPLAFGKRQGREFIWNDLLSLETGSLKLANGRVIEKTLYNRRTRQDEPALFVALTFERREVLDSSNIKPMNLIGVDRGENIPAVIALTDPEGCPLSRFKDSLGNPTHILRIGESYKEKQRTIQAKKEVEQRRAGGYSRKYASKAKNLADDMVRNTARDLLYYAVTQDAMLIFENLSRGFGRQGKRTFMAERQYTRMEDWLTAKLAYEGLPSKTYLSKTLAQYTSKTCSNCGFTITSADYDRVLEKLKKTATGWMTTINGKELKVEGQITYYNRYKRQNVVKDLSVELDRLSEESVNNDISSWTKGRSGEALSLLKKRFSHRPVQEKFVCLNCGFETHADEQAALNIARSWLFLRSQEYKKYQTNKTTGNTDKRAFVETWQSFYRKKLKEVWKPAV

SEQ ID NO: 34226 - protein, 977 aa, synthetic construct
  REGION 1..977: note = engineered CasX variant
QEIKRINKIRRRLVKDSNTKKAGKTGPMKTLLVRVMTPDLRERLENLRKKPENIPQPISNTSQANLNKLLTDYTEMKKAILHVYWEEFQVDPVGLMSRVAQPASKKIDQNKLKPEMDEKGNLTTAGFACSQCGQPLFVYKLEQVSEKGKAYTNYFGRCNVAEHEKLILLAQLKPEKDSDEAVTYSLGKFGQRALDFYSIHVTKESTHPVKPLAQIAGNRYASPVGKALSDACMGTIASFLSKYQDIIIEHQKVVKGNQKRLESLRELAGKENLEYPSVTLPPQPHTKEGVDAYNEVIARVRMWVNLNLWQKLKLSRDDAKPLLRLKGFPSFPLVERQANEVDWWDMVCNVKKLINEKKEDGKVFWQNLAGYKRQEALRPYLSSEEDRKKGKKFARYQLGDLLLHLEKKHGEDWGKVYDEAWERIDKKVEGLSKHIKLEEERRSEDAQSKAALTDWLRAKASFVIEGLKEADKDEFCRCELKLQKWYGDLRGKPFAIEAENSILDISGFSKQYNCAFIWQKDGVKKLNLYLIINYFKGGKLRFKKIKPEAFEANRFYTVINKKSGEIVPMEVNFNFDDPNLIILPLAFGKRQGREFIWNDLLSLETGSLKLANGRVIEKTLYNRRTRQDEPALFVALTFERREVLDSSNIKPMNLIGVDRGENIPAVIALTDPEGCPLSRFKDSLGNPTHILRIGESYKEKQRTIQAKKEVEQRRAGGYSRKYASKAKNLADDMVRNTARDLLYYAVTQDAMLIFENLSRGFGRQGKRTFMAERQYTRMEDWLTAKLAYEGLPSKTYLSKTLAQYTSKTCSNCGFTITSADYDRVLEKLKKTATGWMTTINGKELKVEGQITYYNRYKRQNVVKDLSVELDRLSEESVNNDISSWTKGRSGEALSLLKKRFSHRPVQEKFVCLNCGFETHADEQAALNIARSWLFLRSQEYKKYQTNKTTGNTDKRAFVETWQSFYRKKLKEVWKPAV

SEQ ID NO: 34227 - protein, 978 aa, synthetic construct
  REGION 1..978: note = engineered CasX variant
QEIKRLNKIRRRLVKDSNTKKAGKTGPMKTLLVRVMTPDLRERLENLRKKPENIPQPISNTSQANLNKLLTDYTEMKKAILHVYWEEFQKDPVGLMSRVAQPASKKIDQNKLKPEMDEKGNLTTAGFACSQCGQPLFVYKLEQVSEKGKAYTNYFGRCNVAEHEKLILLAQLKPEKDSDEAVTYSLGKFGQRALDFYSIHVTKESTHPVKPLAQIAGNRYASYPVGKALSDACMGTIASFLSKYQDIIIEHQKVVKGNQKRLESLRELAGKENLEYPSVTLPPQPHTKEGVDAYNEVIARVRMWVNLNLWQKLKLSRDDAKPLLRLKGFPSFPLVERQANEVDWWDMVCNVKKLINEKKEDGKVFWQNLAGYKRQEALRPYLSSEEDRKKGKKFARYQLGDLLLHLEKKHGEDWGKVYDEAWERIDKKVEGLSKHIKLEEERRSEDAQSKAALTDWLRAKASFVIEGLKEADKDEFCRCELKLQKWYGDLRGKPFAIEAENSILDISGFSKQYNCAFIWQKDGVKKLNLYLIINYFKGGKLRFKKIKPEAFEANRFYTVINKKSGEIVPMEVNFNFDDPNLIILPLAFGKRQGREFIWNDLLSLETGSLKLANGRVIEKTLYNRRTRQDEPALFVALTFERREVLDSSNIKPMNLIGVDRGENIPAVIALTDPEGCPLSRFKDSLGNPTHILRIGESYKEKQRTIQAKKEVEQRRAGGYSRKYASKAKNLADDMVRNTARDLLYYAVTQDAMLIFENLSRGFGRQGKRTFMAERQYTRMEDWLTAKLAYEGLPSKTYLSKTLAQYTSKTCSNCGFTITSADYDRVLEKLKKTATGWMTTINGKELKVEGQITYYNRYKRQNVVKDLSVELDRLSEESVNNDISSWTKGRSGEALSLLKKRFSHRPVQEKFVCLNCGFETHADEQAALNIARSWLFLRSQEYKKYQTNKTTGNTDKRAFVETWQSFYRKKLKEVWKPAV

SEQ ID NO: 34228 - protein, 978 aa, synthetic construct
  REGION 1..978: note = engineered CasX variant
QEIKRLNKIRRRLVKDSNTKKAGKTGPMKTLLVRVMTPDLRERLENLRKKPENIPQPISNTSQANLNKLLTDYTEMKKAILHVYWEEFQKDPVGLMSRVAQPASKKIDQNKLKPEMDEKGNLTTAGFACSQCGQPLFVYKLEQVSEKGKAYTNYFGRCNVAEHEKLILLAQLKPEKDSDEAVTYSLGKFGQRALDFYSIHVTKESTHPVKPLAQIAGNRYASHPVGKALSDACMGTIASFLSKYQDIIIEHQKVVKGNQKRLESLRELAGKENLEYPSVTLPPQPHTKEGVDAYNEVIARVRMWVNLNLWQKLKLSRDDAKPLLRLKGFPSFPLVERQANEVDWWDMVCNVKKLINEKKEDGKVFWQNLAGYKRQEALRPYLSSEEDRKKGKKFARYQLGDLLLHLEKKHGEDWGKVYDEAWERIDKKVEGLSKHIKLEEERRSEDAQSKAALTDWLRAKASFVIEGLKEADKDEFCRCELKLQKWYGDLRGKPFAIEAENSILDISGFSKQYNCAFIWQKDGVKKLNLYLIINYFKGGKLRFKKIKPEAFEANRFYTVINKKSGEIVPMEVNFNFDDPNLIILPLAFGKRQGREFIWNDLLSLETGSLKLANGRVIEKTLYNRRTRQDEPALFVALTFERREVLDSSNIKPMNLIGVDRGENIPAVIALTDPEGCPLSRFKDSLGNPTHILRIGESYKEKQRTIQAKKEVEQRRAGGYSRKYASKAKNLADDMVRNTARDLLYYAVTQDAMLIFENLSRGFGRQGKRTFMAERQYTRMEDWLTAKLAYEGLPSKTYLSKTLAQYTSKTCSNCGFTITSADYDRVLEKLKKTATGWMTTINGKELKVEGQITYYNRYKRQNVVKDLSVELDRLSEESVNNDISSWTKGRSGEALSLLKKRFSHRPVQEKFVCLNCGFETHADEQAALNIARSWLFLRSQEYKKYQTNKTTGNTDKRAFVETWQSFYRKKLKEVWKPAV

SEQ ID NO: 34229 - protein, 978 aa, synthetic construct
  REGION 1..978: note = engineered CasX variant
QEIKRLNKIRRRLVKDSNTKKAGKTGPMKTLLVRVMTPDLRERLENLRKKPENIPQPISNTSQANLNKLLTDYTEMKKAILHVYWEEFQKDPVGLMSRVAQPASKKIDQNKLKPEMDEKGNLTTAGFACSQCGQPLFVYKLEQVSEKGKAYTNYFGRCNVAEHEKLILLAQLKPEKDSDEAVTYSLGKFGQRALDFYSIHVTKESTHPVKPLAQIAGNRYASSPVGKALSDACMGTIASFLSKYQDIIIEHQKVVKGNQKRLESLRELAGKENLEYPSVTLPPQPHTKEGVDAYNEVIARVRMWVNLNLWQKLKLSRDDAKPLLRLKGFPSFPLVERQANEVDWWDMVCNVKKLINEKKEDGKVFWQNLAGYKRQEALRPYLSSEEDRKKGKKFARYQLGDLLLHLEKKHGEDWGKVYDEAWERIDKKVEGLSKHIKLEEERRSEDAQSKAALTDWLRAKASFVIEGLKEADKDEFCRCELKLQKWYGDLRGKPFAIEAENSILDISGFSKQYNCAFIWQKDGVKKLNLYLIINYFKGGKLRFKKIKPEAFEANRFYTVINKKSGEIVPMEVNFNFDDPNLIILPLAFGKRQGREFIWNDLLSLETGSLKLANGRVIEKTLYNRRTRQDEPALFVALTFERREVLDSSNIKPMNLIGVDRGENIPAVIALTDPEGCPLSRFKDSLGNPTHILRIGESYKEKQRTIQAKKEVEQRRAGGYSRKYASKAKNLADDMVRNTARDLLYYAVTQDAMLIFENLSRGFGRQGKRTFMAERQYTRMEDWLTAKLAYEGLPSKTYLSKTLAQYTSKTCSNCGFTITSADYDRVLEKLKKTATGWMTTINGKELKVEGQITYYNRYKRQNVVKDLSVELDRLSEESVNNDISSWTKGRSGEALSLLKKRFSHRPVQEKFVCLNCGFETHADEQAALNIARSWLFLRSQEYKKYQTNKTTGNTDKRAFVETWQSFYRKKLKEVWKPAV

SEQ ID NO: 34230 - protein, 978 aa, synthetic construct
  REGION 1..978: note = engineered CasX variant
QEIKRLNKIRRRLVKDSNTKKAGKTGPMKTLLVRVMTPDLRERLENLRKKPENIPQPISNTSQANLNKLLTDYTEMKKAILHVYWEEFQKDPVGLMSRVAQPASKKIDQNKLKPEMDEKGNLTTAGFACSQCGQPLFVYKLEQVSEKGKAYTNYFGRCNVAEHEKLILLAQLKPEKDSDEAVTYSLGKFGQRALDFYSIHVTKESTHPVKPLAQIAGNRYASTPVGKALSDACMGTIASFLSKYQDIIIEHQKVVKGNQKRLESLRELAGKENLEYPSVTLPPQPHTKEGVDAYNEVIARVRMWVNLNLWQKLKLSRDDAKPLLRLKGFPSFPLVERQANEVDWWDMVCNVKKLINEKKEDGKVFWQNLAGYKRQEALRPYLSSEEDRKKGKKFARYQLGDLLLHLEKKHGEDWGKVYDEAWERIDKKVEGLSKHIKLEEERRSEDAQSKAALTDWLRAKASFVIEGLKEADKDEFCRCELKLQKWYGDLRGKPFAIEAENSILDISGFSKQYNCAFIWQKDGVKKLNLYLIINYFKGGKLRFKKIKPEAFEANRFYTVINKKSGEIVPMEVNFNFDDPNLIILPLAFGKRQGREFIWNDLLSLETGSLKLANGRVIEKTLYNRRTRQDEPALFVALTFERREVLDSSNIKPMNLIGVDRGENIPAVIALTDPEGCPLSRFKDSLGNPTHILRIGESYKEKQRTIQAKKEVEQRRAGGYSRKYASKAKNLADDMVRNTARDLLYYAVTQDAMLIFENLSRGFGRQGKRTFMAERQYTRMEDWLTAKLAYEGLPSKTYLSKTLAQYTSKTCSNCGFTITSADYDRVLEKLKKTATGWMTTINGKELKVEGQITYYNRYKRQNVVKDLSVELDRLSEESVNNDISSWTKGRSGEALSLLKKRFSHRPVQEKFVCLNCGFETHADEQAALNIARSWLFLRSQEYKKYQTNKTTGNTDKRAFVETWQSFYRKKLKEVWKPAV

SEQ ID NO: 34231 - protein, 978 aa, synthetic construct
  REGION 1..978: note = engineered CasX variant
QEIKRLNKIRRRLVKDSNTKKAGKTGPMKTLLVRVMTPDLRERLENLRKKPENIPQPISNTSQANLNKLLTDYTEMKKAILHVYWEEFQKDPVGLMSRVAQPASKKIDQNKLKPEMDEKGNLTTAGFACSQCGQPLFVYKLEQVSEKGKAYTNYFGRCNVAEHEKLILLAQLKPEKDSDEAVTYSLGKFGQRALDFYSIHVTKESTHPVKPLAQIAGNRYASAPVGKALSDACMGTIASFLSKYQDIIIEHQKVVKGNQKRLESLRELAGKENLEYPSVTLPPQPHTKEGVDAYNEVIARVRMWVNLNLWQKLKLSRDDAKPLLRLKGFPSFPLVERQANEVDWWDMVCNVKKLINEKKEDGKVFWQNLAGYKRQEALRPYLSSEEDRKKGKKFARYQLGDLLLHLEKKHGEDWGKVYDEAWERIDKKVEGLSKHIKLEEERRSEDAQSKAALTDWLRAKASFVIEGLKEADKDEFCRCELKLQKWYGDLRGKPFAIEAENSILDISGFSKQYNCAFIWQKDGVKKLNLYLIINYFKGGKLRFKKIKPEAFEANRFYTVINKKSGEIVPMEVNFNFDDPNLIILPLAFGKRQGREFIWNDLLSLETGSLKLANGRVIEKTLYNRRTRQDEPALFVALTFERREVLDSSNIKPMNLIGVDRGENIPAVIALTDPEGCPLSRFKDSLGNPTHILRIGESYKEKQRTIQAKKEVEQRRAGGYSRKYASKAKNLADDMVRNTARDLLYYAVTQDAMLIFENLSRGFGRQGKRTFMAERQYTRMEDWLTAKLAYEGLPSKTYLSKTLAQYTSKTCSNCGFTITSADYDRVLEKLKKTATGWMTTINGKELKVEGQITYYNRYKRQNVVKDLSVELDRLSEESVNNDISSWTKGRSGEALSLLKKRFSHRPVQEKFVCLNCGFETHADEQAALNIARSWLFLRSQEYKKYQTNKTTGNTDKRAFVETWQSFYRKKLKEVWKPAV

SEQ ID NO: 34232 - protein, 978 aa, synthetic construct
  REGION 1..978: note = engineered CasX variant
QEIKRLNKIRRRLVKDSNTKKAGKTGPMKTLLVRVMTPDLRERLENLRKKPENIPQPISNTSQANLNKLLTDYTEMKKAILHVYWEEFQKDPVGLMSRVAQPASKKIDQNKLKPEMDEKGNLTTAGFACSQCGQPLFVYKLEQVSEKGKAYTNYFGRCNVAEHEKLILLAQLKPEKDSDEAVTYSLGKFGQRALDFYSIHVTKESTHPVKPLAQIAGNRYASVPVGKALSDACMGTIASFLSKYQDIIIEHQKVVKGNQKRLESLRELAGKENLEYPSVTLPPQPHTKEGVDAYNEVIARVRMWVNLNLWQKLKLSRDDAKPLLRLKGFPSFPLVERQANEVDWWDMVCNVKKLINEKKEDGKVFWQNLAGYKRQEALRPYLSSEEDRKKGKKFARYQLGDLLLHLEKKHGEDWGKVYDEAWERIDKKVEGLSKHIKLEEERRSEDAQSKAALTDWLRAKASFVIEGLKEADKDEFCRCELKLQKWYGDLRGKPFAIEAENSILDISGFSKQYNCAFIWQKDGVKKLNLYLIINYFKGGKLRFKKIKPEAFEANRFYTVINKKSGEIVPMEVNFNFDDPNLIILPLAFGKRQGREFIWNDLLSLETGSLKLANGRVIEKTLYNRRTRQDEPALFVALTFERREVLDSSNIKPMNLIGVDRGENIPAVIALTDPEGCPLSRFKDSLGNPTHILRIGESYKEKQRTIQAKKEVEQRRAGGYSRKYASKAKNLADDMVRNTARDLLYYAVTQDAMLIFENLSRGFGRQGKRTFMAERQYTRMEDWLTAKLAYEGLPSKTYLSKTLAQYTSKTCSNCGFTITSADYDRVLEKLKKTATGWMTTINGKELKVEGQITYYNRYKRQNVVKDLSVELDRLSEESVNNDISSWTKGRSGEALSLLKKRFSHRPVQEKFVCLNCGFETHADEQAALNIARSWLFLRSQEYKKYQTNKTTGNTDKRAFVETWQSFYRKKLKEVWKPAV

SEQ ID NO: 34233 - protein, 978 aa, synthetic construct
  REGION 1..978: note = engineered CasX variant
QEIKRLNKIRRRLVKDSNTKKAGKTGPMKTLLVRVMTPDLRERLENLRKKPENIPQPISNTSQANLNKLLTDYTEMKKAILHVYWEEFQKDPVGLMSRVAQPASKKIDQNKLKPEMDEKGNLTTAGFACSQCGQPLFVYKLEQVSEKGKAYTNYFGRCNVAEHEKLIKLAQLKPEKDSDEAVTYSLGKFGQRALDFYSIHVTKESTHPVKPLAQIAGNRYASGPVGKALSDACMGTIASFLSKYQDIIIEHQKVVKGNQKRLESLRELAGKENLEYPSVTLPPQPHTKEGVDAYNEVIARVRMWVNLNLWQKLKLSRDDAKPLLRLKGFPSFPLVERQANEVDWWDMVCNVKKLINEKKEDGKVFWQNLAGYKRQEALRPYLSSEEDRKKGKKFARYQLGDLLLHLEKKHGEDWGKVYDEAWERIDKKVEGLSKHIKLEEERRSEDAQSKAALTDWLRAKASFVIEGLKEADKDEFCRCELKLQKWYGDLRGKPFAIEAENSILDISGFSKQYNCAFIWQKDGVKKLNLYLIINYFKGGKLRFKKIKPEAFEANRFYTVINKKSGEIVPMEVNFNFDDPNLIILPLAFGKRQGREFIWNDLLSLETGSLKLANGRVIEKTLYNRRTRQDEPALFVALTFERREVLDSSNIKPMNLIGVDRGENIPAVIALTDPEGCPLSRFKDSLGNPTHILRIGESYKEKQRTIQAKKEVEQRRAGGYSRKYASKAKNLADDMVRNTARDLLYYAVTQDAMLIFENLSRGFGRQGKRTFMAERQYTRMEDWLTAKLAYEGLPSKTYLSKTLAQYTSKTCSNCGFTITSADYDRVLEKLKKTATGWMTTINGKELKVEGQITYYNRYKRQNVVKDLSVELDRLSEESVNNDISSWTKGRSGEALSLLKKRFSHRPVQEKFVCLNCGFETHADEQAALNIARSWLFLRSQEYKKYQTNKTTGNTDKRAFVETWQSFYRKKLKEVWKPAV

SEQ ID NO: 34234 - protein, 977 aa, synthetic construct
  REGION 1..977: note = engineered CasX variant
QEIKRLNKIRRRLVKDSNTKKAGKTGPMKTLLVRVMTPDLRERLENLRKKPENIPQPISNTSQANLNKLLTDYTEMKKAILHVYWEEFQKDPVGLMSRVAQPASKKIDQNKLKPEMDEKGNLTTAGFACSQCGQPLFVYKLEQVSEKGKAYTNYFGRCNVAEHEKLILLAQLKPEKDSDEAVTYSLGKFGQRALDFYSIHVTKESTHPVKPLAQIAGNRYASPVGKALSDACMGTIASFLSKYQDIIIEHQKVVKGNQKRLESLRELAGKENLEYPSVTLPPQPHTKEGVDAYNEVIARVRMWVNLNLWQKLKLSRDDAKPLLRLKGFPSFPLVERQANEVDWWDMVCNVKKLINEKKEDGKVFWQNLAGYKRQEALRPYLSSEEDRKKGKKFARYQLGDLLLHLEKKHGEDWGKVYDEAWERIDKKVEGLSKHIKLEEERRSEDAQSKAALTDWLRAKASFVIEGLKEADKDEFCRCELKLQKWYGDLRGKPFAIEAENSILDISGFSKQYNCAFIWQKDGVKKLNLYLIINYFKGGKLRFKKIKPEAFEANRFYTVINKKSGEIVPMEVNFNFDDPNLIILPLAFGKRQGREFIWNDLLSLETGSLKLANGRVIEKTLYNRRTRQDEPALFVALTFERREVLDSSNIKPMNLIGVDRGENIPAVIALTDPEGCPLSRFKDSLGNPTHILRIGESYKEKQRTIQAKKEVEQRRAGGYSRKYASKAKNLADDMVRNTARDLLYYAVTQDAMLIFENLSRGFGRQGKRTFMAERQYTRMEDWLTAKLAYEGLPSKTYLSKTLAQYTSKTCSNCGFTITSADYDRVLEKLKKTATGWMTTINGKELKVEGQITYYNRYKRQNVVKDLSVELDRLSEESVNNDISSWTKGRSGEALSLLKKRFSHRPVQEKFVCLNCGFETHADEQAALNIARSWLFLRSQEYKKYQTNKTTGNTDKRAFVETWQSFYRKKLKEVWKPAV

SEQ ID NO: 34235 - protein, 978 aa, synthetic construct
  REGION 1..978: note = engineered CasX variant
QEIKRINKIRRRLVKDSNTKKAGKTGPMKTLLVRVMTPDLRERLENLRKKPENIPQPISNTSQANLNKLLTDYTEMKKAILHVYWEEFQKDPVGLMSRVAQPASKKIDQNKLKPEMDEKGNLTTAGFACSQCGQPLFVYKLEQVSEKGKAYTNYVGRCNVAEHEKLILLAQLKPEKDSDEAVTYSLGKFGQRALDFYSIHVTKESTHPVKPLAQIAGNRYASYPVGKALSDACMGTIASFLSKYQDIIIEHQKVVKGNQKRLESLRELAGKENLEYPSVTLPPQPHTKEGVDAYNEVIARVRMWVNLNLWQKLKLSRDDAKPLLRLKGFPSFPLVERQANEVDWWDMVCNVKKLINEKKEDGKVFWQNLAGYKRQEALRPYLSSEEDRKKGKKFARYQLGDLLLHLEKKHGEDWGKVYDEAWERIDKKVEGLSKHIKLEEERRSEDAQSKAALTDWLRAKASFVIEGLKEADKDEFCRCELKLQKWYGDLRGKPFAIEAENSILDISGFSKQYNCAFIWQKDGVKKLNLYLIINYFKGGKLRFKKIKPEAFEANRFYTVINKKSGEIVPMEVNFNFDDPNLIILPLAFGKRQGREFIWNDLLSLETGSLKLANGRVIEKTLYNRRTRQDEPALFVALTFERREVLDSSNIKPMNLIGVDRGENIPAVIALTDPEGCPLSRFKDSLGNPTHILRIGESYKEKQRTIQAKKEVEQRRAGGYSRKYASKAKNLADDMVRNTARDLLYYAVTQDAMLIFENLSRGFGRQGKRTFMAERQYTRMEDWLTAKLAYEGLPSKTYLSKTLAQYTSKTCSNCGFTITSADYDRVLEKLKKTATGWMTTINGKELKVEGQITYYNRYKRQNVVKDLSVELDRLSEESVNNDISSWTKGRSGEALSLLKKRFSHRPVQEKFVCLNCGFETHADEQAALNIARSWLFLRSQEYKKYQTNKTTGNTDKRAFVETWQSFYRKKLKEVWKPAV

SEQ ID NO: 34236 - protein, 978 aa, synthetic construct
  REGION 1..978: note = engineered CasX variant
QEIKRINKIRRRLVKDSNTKKAGKTGPMKTLLVRVMTPDLRERLENLRKKPENIPQPISNTSQANLNKLLTDYTEMKKAILHVYWEEFQKDPVGLMSRVAQPASKKIDQNKLKPEMDEKGNLTTAGFACSQCGQPLFVYKLEQVSEKGKAYTNYVGRCNVAEHEKLILLAQLKPEKDSDEAVTYSLGKFGQRALDFYSIHVTKESTHPVKPLAQIAGNRYASHPVGKALSDACMGTIASFLSKYQDIIIEHQKVVKGNQKRLESLRELAGKENLEYPSVTLPPQPHTKEGVDAYNEVIARVRMWVNLNLWQKLKLSRDDAKPLLRLKGFPSFPLVERQANEVDWWDMVCNVKKLINEKKEDGKVFWQNLAGYKRQEALRPYLSSEEDRKKGKKFARYQLGDLLLHLEKKHGEDWGKVYDEAWERIDKKVEGLSKHIKLEEERRSEDAQSKAALTDWLRAKASFVIEGLKEADKDEFCRCELKLQKWYGDLRGKPFAIEAENSILDISGFSKQYNCAFIWQKDGVKKLNLYLIINYFKGGKLRFKKIKPEAFEANRFYTVINKKSGEIVPMEVNFNFDDPNLIILPLAFGKRQGREFIWNDLLSLETGSLKLANGRVIEKTLYNRRTRQDEPALFVALTFERREVLDSSNIKPMNLIGVDRGENIPAVIALTDPEGCPLSRFKDSLGNPTHILRIGESYKEKQRTIQAKKEVEQRRAGGYSRKYASKAKNLADDMVRNTARDLLYYAVTQDAMLIFENLSRGFGRQGKRTFMAERQYTRMEDWLTAKLAYEGLPSKTYLSKTLAQYTSKTCSNCGFTITSADYDRVLEKLKKTATGWMTTINGKELKVEGQITYYNRYKRQNVVKDLSVELDRLSEESVNNDISSWTKGRSGEALSLLKKRFSHRPVQEKFVCLNCGFETHADEQAALNIARSWLFLRSQEYKKYQTNKTTGNTDKRAFVETWQSFYRKKLKEVWKPAV

SEQ ID NO: 34237 - protein, 978 aa, synthetic construct
  REGION 1..978: note = engineered CasX variant
QEIKRINKIRRRLVKDSNTKKAGKTGPMKTLLVRVMTPDLRERLENLRKKPENIPQPISNTSQANLNKLLTDYTEMKKAILHVYWEEFQKDPVGLMSRVAQPASKKIDQNKLKPEMDEKGNLTTAGFACSQCGQPLFVYKLEQVSEKGKAYTNYVGRCNVAEHEKLILLAQLKPEKDSDEAVTYSLGKFGQRALDFYSIHVTKESTHPVKPLAQIAGNRYASSPVGKALSDACMGTIASFLSKYQDIIIEHQKVVKGNQKRLESLRELAGKENLEYPSVTLPPQPHTKEGVDAYNEVIARVRMWVNLNLWQKLKLSRDDAKPLLRLKGFPSFPLVERQANEVDWWDMVCNVKKLINEKKEDGKVFWQNLAGYKRQEALRPYLSSEEDRKKGKKFARYQLGDLLLHLEKKHGEDWGKVYDEAWERIDKKVEGLSKHIKLEEERRSEDAQSKAALTDWLRAKASFVIEGLKEADKDEFCRCELKLQKWYGDLRGKPFAIEAENSILDISGFSKQYNCAFIWQKDGVKKLNLYLIINYFKGGKLRFKKIKPEAFEANRFYTVINKKSGEIVPMEVNFNFDDPNLIILPLAFGKRQGREFIWNDLLSLETGSLKLANGRVIEKTLYNRRTRQDEPALFVALTFERREVLDSSNIKPMNLIGVDRGENIPAVIALTDPEGCPLSRFKDSLGNPTHILRIGESYKEKQRTIQAKKEVEQRRAGGYSRKYASKAKNLADDMVRNTARDLLYYAVTQDAMLIFENLSRGFGRQGKRTFMAERQYTRMEDWLTAKLAYEGLPSKTYLSKTLAQYTSKTCSNCGFTITSADYDRVLEKLKKTATGWMTTINGKELKVEGQITYYNRYKRQNVVKDLSVELDRLSEESVNNDISSWTKGRSGEALSLLKKRFSHRPVQEKFVCLNCGFETHADEQAALNIARSWLFLRSQEYKKYQTNKTTGNTDKRAFVETWQSFYRKKLKEVWKPAV

SEQ ID NO: 34238 - protein, 978 aa, synthetic construct
  REGION 1..978: note = engineered CasX variant
QEIKRINKIRRRLVKDSNTKKAGKTGPMKTLLVRVMTPDLRERLENLRKKPENIPQPISNTSQANLNKLLTDYTEMKKAILHVYWEEFQKDPVGLMSRVAQPASKKIDQNKLKPEMDEKGNLTTAGFACSQCGQPLFVYKLEQVSEKGKAYTNYVGRCNVAEHEKLILLAQLKPEKDSDEAVTYSLGKFGQRALDFYSIHVTKESTHPVKPLAQIAGNRYASTPVGKALSDACMGTIASFLSKYQDIIIEHQKVVKGNQKRLESLRELAGKENLEYPSVTLPPQPHTKEGVDAYNEVIARVRMWVNLNLWQKLKLSRDDAKPLLRLKGFPSFPLVERQANEVDWWDMVCNVKKLINEKKEDGKVFWQNLAGYKRQEALRPYLSSEEDRKKGKKFARYQLGDLLLHLEKKHGEDWGKVYDEAWERIDKKVEGLSKHIKLEEERRSEDAQSKAALTDWLRAKASFVIEGLKEADKDEFCRCELKLQKWYGDLRGKPFAIEAENSILDISGFSKQYNCAFIWQKDGVKKLNLYLIINYFKGGKLRFKKIKPEAFEANRFYTVINKKSGEIVPMEVNFNFDDPNLIILPLAFGKRQGREFIWNDLLSLETGSLKLANGRVIEKTLYNRRTRQDEPALFVALTFERREVLDSSNIKPMNLIGVDRGENIPAVIALTDPEGCPLSRFKDSLGNPTHILRIGESYKEKQRTIQAKKEVEQRRAGGYSRKYASKAKNLADDMVRNTARDLLYYAVTQDAMLIFENLSRGFGRQGKRTFMAERQYTRMEDWLTAKLAYEGLPSKTYLSKTLAQYTSKTCSNCGFTITSADYDRVLEKLKKTATGWMTTINGKELKVEGQITYYNRYKRQNVVKDLSVELDRLSEESVNNDISSWTKGRSGEALSLLKKRFSHRPVQEKFVCLNCGFETHADEQAALNIARSWLFLRSQEYKKYQTNKTTGNTDKRAFVETWQSFYRKKLKEVWKPAV

SEQ ID NO: 34239 - protein, 978 aa, synthetic construct
  REGION 1..978: note = engineered CasX variant
QEIKRINKIRRRLVKDSNTKKAGKTGPMKTLLVRVMTPDLRERLENLRKKPENIPQPISNTSQANLNKLLTDYTEMKKAILHVYWEEFQKDPVGLMSRVAQPASKKIDQNKLKPEMDEKGNLTTAGFACSQCGQPLFVYKLEQVSEKGKAYTNYVGRCNVAEHEKLILLAQLKPEKDSDEAVTYSLGKFGQRALDFYSIHVTKESTHPVKPLAQIAGNRYASAPVGKALSDACMGTIASFLSKYQDIIIEHQKVVKGNQKRLESLRELAGKENLEYPSVTLPPQPHTKEGVDAYNEVIARVRMWVNLNLWQKLKLSRDDAKPLLRLKGFPSFPLVERQANEVDWWDMVCNVKKLINEKKEDGKVFWQNLAGYKRQEALRPYLSSEEDRKKGKKFARYQLGDLLLHLEKKHGEDWGKVYDEAWERIDKKVEGLSKHIKLEEERRSEDAQSKAALTDWLRAKASFVIEGLKEADKDEFCRCELKLQKWYGDLRGKPFAIEAENSILDISGFSKQYNCAFIWQKDGVKKLNLYLIINYFKGGKLRFKKIKPEAFEANRFYTVINKKSGEIVPMEVNFNFDDPNLIILPLAFGKRQGREFIWNDLLSLETGSLKLANGRVIEKTLYNRRTRQDEPALFVALTFERREVLDSSNIKPMNLIGVDRGENIPAVIALTDPEGCPLSRFKDSLGNPTHILRIGESYKEKQRTIQAKKEVEQRRAGGYSRKYASKAKNLADDMVRNTARDLLYYAVTQDAMLIFENLSRGFGRQGKRTFMAERQYTRMEDWLTAKLAYEGLPSKTYLSKTLAQYTSKTCSNCGFTITSADYDRVLEKLKKTATGWMTTINGKELKVEGQITYYNRYKRQNVVKDLSVELDRLSEESVNNDISSWTKGRSGEALSLLKKRFSHRPVQEKFVCLNCGFETHADEQAALNIARSWLFLRSQEYKKYQTNKTTGNTDKRAFVETWQSFYRKKLKEVWKPAV

SEQ ID NO: 34240 - protein, 978 aa, synthetic construct
  REGION 1..978: note = engineered CasX variant
QEIKRINKIRRRLVKDSNTKKAGKTGPMKTLLVRVMTPDLRERLENLRKKPENIPQPISNTSQANLNKLLTDYTEMKKAILHVYWEEFQKDPVGLMSRVAQPASKKIDQNKLKPEMDEKGNLTTAGFACSQCGQPLFVYKLEQVSEKGKAYTNYVGRCNVAEHEKLILLAQLKPEKDSDEAVTYSLGKFGQRALDFYSIHVTKESTHPVKPLAQIAGNRYASVPVGKALSDACMGTIASFLSKYQDIIIEHQKVVKGNQKRLESLRELAGKENLEYPSVTLPPQPHTKEGVDAYNEVIARVRMWVNLNLWQKLKLSRDDAKPLLRLKGFPSFPLVERQANEVDWWDMVCNVKKLINEKKEDGKVFWQNLAGYKRQEALRPYLSSEEDRKKGKKFARYQLGDLLLHLEKKHGEDWGKVYDEAWERIDKKVEGLSKHIKLEEERRSEDAQSKAALTDWLRAKASFVIEGLKEADKDEFCRCELKLQKWYGDLRGKPFAIEAENSILDISGFSKQYNCAFIWQKDGVKKLNLYLIINYFKGGKLRFKKIKPEAFEANRFYTVINKKSGEIVPMEVNFNFDDPNLIILPLAFGKRQGREFIWNDLLSLETGSLKLANGRVIEKTLYNRRTRQDEPALFVALTFERREVLDSSNIKPMNLIGVDRGENIPAVIALTDPEGCPLSRFKDSLGNPTHILRIGESYKEKQRTIQAKKEVEQRRAGGYSRKYASKAKNLADDMVRNTARDLLYYAVTQDAMLIFENLSRGFGRQGKRTFMAERQYTRMEDWLTAKLAYEGLPSKTYLSKTLAQYTSKTCSNCGFTITSADYDRVLEKLKKTATGWMTTINGKELKVEGQITYYNRYKRQNVVKDLSVELDRLSEESVNNDISSWTKGRSGEALSLLKKRFSHRPVQEKFVCLNCGFETHADEQAALNIARSWLFLRSQEYKKYQTNKTTGNTDKRAFVETWQSFYRKKLKEVWKPAV

SEQ ID NO: 34241 - protein, 978 aa, synthetic construct
  REGION 1..978: note = engineered CasX variant
QEIKRINKIRRRLVKDSNTKKAGKTGPMKTLLVRVMTPDLRERLENLRKKPENIPQPISNTSQANLNKLLTDYTEMKKAILHVYWEEFQKDPVGLMSRVAQPASKKIDQNKLKPEMDEKGNLTTAGFACSQCGQPLFVYKLEQVSEKGKAYTNYVGRCNVAEHEKLIKLAQLKPEKDSDEAVTYSLGKFGQRALDFYSIHVTKESTHPVKPLAQIAGNRYASGPVGKALSDACMGTIASFLSKYQDIIIEHQKVVKGNQKRLESLRELAGKENLEYPSVTLPPQPHTKEGVDAYNEVIARVRMWVNLNLWQKLKLSRDDAKPLLRLKGFPSFPLVERQANEVDWWDMVCNVKKLINEKKEDGKVFWQNLAGYKRQEALRPYLSSEEDRKKGKKFARYQLGDLLLHLEKKHGEDWGKVYDEAWERIDKKVEGLSKHIKLEEERRSEDAQSKAALTDWLRAKASFVIEGLKEADKDEFCRCELKLQKWYGDLRGKPFAIEAENSILDISGFSKQYNCAFIWQKDGVKKLNLYLIINYFKGGKLRFKKIKPEAFEANRFYTVINKKSGEIVPMEVNFNFDDPNLIILPLAFGKRQGREFIWNDLLSLETGSLKLANGRVIEKTLYNRRTRQDEPALFVALTFERREVLDSSNIKPMNLIGVDRGENIPAVIALTDPEGCPLSRFKDSLGNPTHILRIGESYKEKQRTIQAKKEVEQRRAGGYSRKYASKAKNLADDMVRNTARDLLYYAVTQDAMLIFENLSRGFGRQGKRTFMAERQYTRMEDWLTAKLAYEGLPSKTYLSKTLAQYTSKTCSNCGFTITSADYDRVLEKLKKTATGWMTTINGKELKVEGQITYYNRYKRQNVVKDLSVELDRLSEESVNNDISSWTKGRSGEALSLLKKRFSHRPVQEKFVCLNCGFETHADEQAALNIARSWLFLRSQEYKKYQTNKTTGNTDKRAFVETWQSFYRKKLKEVWKPAV

SEQ ID NO: 34242 - protein, 977 aa, synthetic construct
  REGION 1..977: note = engineered CasX variant
QEIKRINKIRRRLVKDSNTKKAGKTGPMKTLLVRVMTPDLRERLENLRKKPENIPQPISNTSQANLNKLLTDYTEMKKAILHVYWEEFQKDPVGLMSRVAQPASKKIDQNKLKPEMDEKGNLTTAGFACSQCGQPLFVYKLEQVSEKGKAYTNYVGRCNVAEHEKLILLAQLKPEKDSDEAVTYSLGKFGQRALDFYSIHVTKESTHPVKPLAQIAGNRYASPVGKALSDACMGTIASFLSKYQDIIIEHQKVVKGNQKRLESLRELAGKENLEYPSVTLPPQPHTKEGVDAYNEVIARVRMWVNLNLWQKLKLSRDDAKPLLRLKGFPSFPLVERQANEVDWWDMVCNVKKLINEKKEDGKVFWQNLAGYKRQEALRPYLSSEEDRKKGKKFARYQLGDLLLHLEKKHGEDWGKVYDEAWERIDKKVEGLSKHIKLEEERRSEDAQSKAALTDWLRAKASFVIEGLKEADKDEFCRCELKLQKWYGDLRGKPFAIEAENSILDISGFSKQYNCAFIWQKDGVKKLNLYLIINYFKGGKLRFKKIKPEAFEANRFYTVINKKSGEIVPMEVNFNFDDPNLIILPLAFGKRQGREFIWNDLLSLETGSLKLANGRVIEKTLYNRRTRQDEPALFVALTFERREVLDSSNIKPMNLIGVDRGENIPAVIALTDPEGCPLSRFKDSLGNPTHILRIGESYKEKQRTIQAKKEVEQRRAGGYSRKYASKAKNLADDMVRNTARDLLYYAVTQDAMLIFENLSRGFGRQGKRTFMAERQYTRMEDWLTAKLAYEGLPSKTYLSKTLAQYTSKTCSNCGFTITSADYDRVLEKLKKTATGWMTTINGKELKVEGQITYYNRYKRQNVVKDLSVELDRLSEESVNNDISSWTKGRSGEALSLLKKRFSHRPVQEKFVCLNCGFETHADEQAALNIARSWLFLRSQEYKKYQTNKTTGNTDKRAFVETWQSFYRKKLKEVWKPAV

SEQ ID NO: 34243 - protein, 978 aa, synthetic construct
  REGION 1..978: note = engineered CasX variant
QEIKRINKIRRRLVKDSNTKKAGKTGPMKTLLVRVMTPDLRERLENLRKKPENIPQPISNTSQANLNKLLTDYTEMKKAILHVYWEEFQKDPVGLMSRVAQPASKKIDQNKLKPEMDEKGNLTTAGFACSQCGQPLFVYKLEQVSEKGKAYTNYFGRCNVAEHEKLILLAQLKPEKDSDEAVTYSLGKFGQRALDFYSIHVTKESTHPVKPLAQIAGNRYASYPVGKALSDACMGTIASFLSKYQDIIIEHQKVVKGNQKRLESLRELAGKENLEYPSVTLPPQPHTKEGVDAYNEVIARVRMWVNLNLWQKLKLSRDDAKPLLRLKGFPSFPLVERQANEVDWWDMVCNVKKLINEKKEDGKVFWQNLAGYKRQEALRPYLSSEEDRKKGKKFARYQLGDLLLHLEKKHGEDWGKVYDEAWERIDKKVEGLSKHIKLEEERRSEDAQSKAALTDWLRAKASFVIEGLKEADKDEFCRCELKLQKWYGDLRGKPFAIEAENSILDISGFSKQYNCAFIWQKDGVKKLNLYLIINYFKGGKLRFKKIKPEAFEANRFYTVINKKSGEIVPMEVNFNFDDPNLIILPLAFGKRQGREFIWNDLLSLETGSLKLANGRVIEKTLYNRRTRQDEPALFVALTFERREVLDSSNIKPMNLIGVDRGENIPAVIALTDPEGCPLSRFKDSLGNPTHILRIGESYKEKQRTIQAKKEVEQRRAGGYSRKYASKAKNLADDMVRNTARDLLYYAVTQDAMLIFENLSRGFGRQGKRTFMAERQYTRMEDWLTAKLAYEGLASKTYLSKTLAQYTSKTCSNCGFTITSADYDRVLEKLKKTATGWMTTINGKELKVEGQITYYNRYKRQNVVKDLSVELDRLSEESVNNDISSWTKGRSGEALSLLKKRFSHRPVQEKFVCLNCGFETHADEQAALNIARSWLFLRSQEYKKYQTNKTTGNTDKRAFVETWQSFYRKKLKEVWKPAV

SEQ ID NO: 34244 - protein, 978 aa, synthetic construct
  REGION 1..978: note = engineered CasX variant
QEIKRINKIRRRLVKDSNTKKAGKTGPMKTLLVRVMTPDLRERLENLRKKPENIPQPISNTSQANLNKLLTDYTEMKKAILHVYWEEFQKDPVGLMSRVAQPASKKIDQNKLKPEMDEKGNLTTAGFACSQCGQPLFVYKLEQVSEKGKAYTNYFGRCNVAEHEKLILLAQLKPEKDSDEAVTYSLGKFGQRALDFYSIHVTKESTHPVKPLAQIAGNRYASHPVGKALSDACMGTIASFLSKYQDIIIEHQKVVKGNQKRLESLRELAGKENLEYPSVTLPPQPHTKEGVDAYNEVIARVRMWVNLNLWQKLKLSRDDAKPLLRLKGFPSFPLVERQANEVDWWDMVCNVKKLINEKKEDGKVFWQNLAGYKRQEALRPYLSSEEDRKKGKKFARYQLGDLLLHLEKKHGEDWGKVYDEAWERIDKKVEGLSKHIKLEEERRSEDAQSKAALTDWLRAKASFVIEGLKEADKDEFCRCELKLQKWYGDLRGKPFAIEAENSILDISGFSKQYNCAFIWQKDGVKKLNLYLIINYFKGGKLRFKKIKPEAFEANRFYTVINKKSGEIVPMEVNFNFDDPNLIILPLAFGKRQGREFIWNDLLSLETGSLKLANGRVIEKTLYNRRTRQDEPALFVALTFERREVLDSSNIKPMNLIGVDRGENIPAVIALTDPEGCPLSRFKDSLGNPTHILRIGESYKEKQRTIQAKKEVEQRRAGGYSRKYASKAKNLADDMVRNTARDLLYYAVTQDAMLIFENLSRGFGRQGKRTFMAERQYTRMEDWLTAKLAYEGLASKTYLSKTLAQYTSKTCSNCGFTITSADYDRVLEKLKKTATGWMTTINGKELKVEGQITYYNRYKRQNVVKDLSVELDRLSEESVNNDISSWTKGRSGEALSLLKKRFSHRPVQEKFVCLNCGFETHADEQAALNIARSWLFLRSQEYKKYQTNKTTGNTDKRAFVETWQSFYRKKLKEVWKPAV

SEQ ID NO: 34245 - protein, 978 aa, synthetic construct
  REGION 1..978: note = engineered CasX variant
QEIKRINKIRRRLVKDSNTKKAGKTGPMKTLLVRVMTPDLRERLENLRKKPENIPQPISNTSQANLNKLLTDYTEMKKAILHVYWEEFQKDPVGLMSRVAQPASKKIDQNKLKPEMDEKGNLTTAGFACSQCGQPLFVYKLEQVSEKGKAYTNYFGRCNVAEHEKLILLAQLKPEKDSDEAVTYSLGKFGQRALDFYSIHVTKESTHPVKPLAQIAGNRYASSPVGKALSDACMGTIASFLSKYQDIIIEHQKVVKGNQKRLESLRELAGKENLEYPSVTLPPQPHTKEGVDAYNEVIARVRMWVNLNLWQKLKLSRDDAKPLLRLKGFPSFPLVERQANEVDWWDMVCNVKKLINEKKEDGKVFWQNLAGYKRQEALRPYLSSEEDRKKGKKFARYQLGDLLLHLEKKHGEDWGKVYDEAWERIDKKVEGLSKHIKLEEERRSEDAQSKAALTDWLRAKASFVIEGLKEADKDEFCRCELKLQKWYGDLRGKPFAIEAENSILDISGFSKQYNCAFIWQKDGVKKLNLYLIINYFKGGKLRFKKIKPEAFEANRFYTVINKKSGEIVPMEVNFNFDDPNLIILPLAFGKRQGREFIWNDLLSLETGSLKLANGRVIEKTLYNRRTRQDEPALFVALTFERREVLDSSNIKPMNLIGVDRGENIPAVIALTDPEGCPLSRFKDSLGNPTHILRIGESYKEKQRTIQAKKEVEQRRAGGYSRKYASKAKNLADDMVRNTARDLLYYAVTQDAMLIFENLSRGFGRQGKRTFMAERQYTRMEDWLTAKLAYEGLASKTYLSKTLAQYTSKTCSNCGFTITSADYDRVLEKLKKTATGWMTTINGKELKVEGQITYYNRYKRQNVVKDLSVELDRLSEESVNNDISSWTKGRSGEALSLLKKRFSHRPVQEKFVCLNCGFETHADEQAALNIARSWLFLRSQEYKKYQTNKTTGNTDKRAFVETWQSFYRKKLKEVWKPAV

SEQ ID NO: 34246 - protein, 978 aa, synthetic construct
  REGION 1..978: note = engineered CasX variant
QEIKRINKIRRRLVKDSNTKKAGKTGPMKTLLVRVMTPDLRERLENLRKKPENIPQPISNTSQANLNKLLTDYTEMKKAILHVYWEEFQKDPVGLMSRVAQPASKKIDQNKLKPEMDEKGNLTTAGFACSQCGQPLFVYKLEQVSEKGKAYTNYFGRCNVAEHEKLILLAQLKPEKDSDEAVTYSLGKFGQRALDFYSIHVTKESTHPVKPLAQIAGNRYASTPVGKALSDACMGTIASFLSKYQDIIIEHQKVVKGNQKRLESLRELAGKENLEYPSVTLPPQPHTKEGVDAYNEVIARVRMWVNLNLWQKLKLSRDDAKPLLRLKGFPSFPLVERQANEVDWWDMVCNVKKLINEKKEDGKVFWQNLAGYKRQEALRPYLSSEEDRKKGKKFARYQLGDLLLHLEKKHGEDWGKVYDEAWERIDKKVEGLSKHIKLEEERRSEDAQSKAALTDWLRAKASFVIEGLKEADKDEFCRCELKLQKWYGDLRGKPFAIEAENSILDISGFSKQYNCAFIWQKDGVKKLNLYLIINYFKGGKLRFKKIKPEAFEANRFYTVINKKSGEIVPMEVNFNFDDPNLIILPLAFGKRQGREFIWNDLLSLETGSLKLANGRVIEKTLYNRRTRQDEPALFVALTFERREVLDSSNIKPMNLIGVDRGENIPAVIALTDPEGCPLSRFKDSLGNPTHILRIGESYKEKQRTIQAKKEVEQRRAGGYSRKYASKAKNLADDMVRNTARDLLYYAVTQDAMLIFENLSRGFGRQGKRTFMAERQYTRMEDWLTAKLAYEGLASKTYLSKTLAQYTSKTCSNCGFTITSADYDRVLEKLKKTATGWMTTINGKELKVEGQITYYNRYKRQNVVKDLSVELDRLSEESVNNDISSWTKGRSGEALSLLKKRFSHRPVQEKFVCLNCGFETHADEQAALNIARSWLFLRSQEYKKYQTNKTTGNTDKRAFVETWQSFYRKKLKEVWKPAV

SEQ ID NO: 34247 - protein, 978 aa, synthetic construct
  REGION 1..978: note = engineered CasX variant
QEIKRINKIRRRLVKDSNTKKAGKTGPMKTLLVRVMTPDLRERLENLRKKPENIPQPISNTSQANLNKLLTDYTEMKKAILHVYWEEFQKDPVGLMSRVAQPASKKIDQNKLKPEMDEKGNLTTAGFACSQCGQPLFVYKLEQVSEKGKAYTNYFGRCNVAEHEKLILLAQLKPEKDSDEAVTYSLGKFGQRALDFYSIHVTKESTHPVKPLAQIAGNRYASAPVGKALSDACMGTIASFLSKYQDIIIEHQKVVKGNQKRLESLRELAGKENLEYPSVTLPPQPHTKEGVDAYNEVIARVRMWVNLNLWQKLKLSRDDAKPLLRLKGFPSFPLVERQANEVDWWDMVCNVKKLINEKKEDGKVFWQNLAGYKRQEALRPYLSSEEDRKKGKKFARYQLGDLLLHLEKKHGEDWGKVYDEAWERIDKKVEGLSKHIKLEEERRSEDAQSKAALTDWLRAKASFVIEGLKEADKDEFCRCELKLQKWYGDLRGKPFAIEAENSILDISGFSKQYNCAFIWQKDGVKKLNLYLIINYFKGGKLRFKKIKPEAFEANRFYTVINKKSGEIVPMEVNFNFDDPNLIILPLAFGKRQGREFIWNDLLSLETGSLKLANGRVIEKTLYNRRTRQDEPALFVALTFERREVLDSSNIKPMNLIGVDRGENIPAVIALTDPEGCPLSRFKDSLGNPTHILRIGESYKEKQRTIQAKKEVEQRRAGGYSRKYASKAKNLADDMVRNTARDLLYYAVTQDAMLIFENLSRGFGRQGKRTFMAERQYTRMEDWLTAKLAYEGLASKTYLSKTLAQYTSKTCSNCGFTITSADYDRVLEKLKKTATGWMTTINGKELKVEGQITYYNRYKRQNVVKDLSVELDRLSEESVNNDISSWTKGRSGEALSLLKKRFSHRPVQEKFVCLNCGFETHADEQAALNIARSWLFLRSQEYKKYQTNKTTGNTDKRAFVETWQSFYRKKLKEVWKPAV

SEQ ID NO: 34248 - protein, 978 aa, synthetic construct
  REGION 1..978: note = engineered CasX variant
QEIKRINKIRRRLVKDSNTKKAGKTGPMKTLLVRVMTPDLRERLENLRKKPENIPQPISNTSQANLNKLLTDYTEMKKAILHVYWEEFQKDPVGLMSRVAQPASKKIDQNKLKPEMDEKGNLTTAGFACSQCGQPLFVYKLEQVSEKGKAYTNYFGRCNVAEHEKLILLAQLKPEKDSDEAVTYSLGKFGQRALDFYSIHVTKESTHPVKPLAQIAGNRYASVPVGKALSDACMGTIASFLSKYQDIIIEHQKVVKGNQKRLESLRELAGKENLEYPSVTLPPQPHTKEGVDAYNEVIARVRMWVNLNLWQKLKLSRDDAKPLLRLKGFPSFPLVERQANEVDWWDMVCNVKKLINEKKEDGKVFWQNLAGYKRQEALRPYLSSEEDRKKGKKFARYQLGDLLLHLEKKHGEDWGKVYDEAWERIDKKVEGLSKHIKLEEERRSEDAQSKAALTDWLRAKASFVIEGLKEADKDEFCRCELKLQKWYGDLRGKPFAIEAENSILDISGFSKQYNCAFIWQKDGVKKLNLYLIINYFKGGKLRFKKIKPEAFEANRFYTVINKKSGEIVPMEVNFNFDDPNLIILPLAFGKRQGREFIWNDLLSLETGSLKLANGRVIEKTLYNRRTRQDEPALFVALTFERREVLDSSNIKPMNLIGVDRGENIPAVIALTDPEGCPLSRFKDSLGNPTHILRIGESYKEKQRTIQAKKEVEQRRAGGYSRKYASKAKNLADDMVRNTARDLLYYAVTQDAMLIFENLSRGFGRQGKRTFMAERQYTRMEDWLTAKLAYEGLASKTYLSKTLAQYTSKTCSNCGFTITSADYDRVLEKLKKTATGWMTTINGKELKVEGQITYYNRYKRQNVVKDLSVELDRLSEESVNNDISSWTKGRSGEALSLLKKRFSHRPVQEKFVCLNCGFETHADEQAALNIARSWLFLRSQEYKKYQTNKTTGNTDKRAFVETWQSFYRKKLKEVWKPAV

SEQ ID NO: 34249 - protein, 978 aa, synthetic construct
  REGION 1..978: note = engineered CasX variant
QEIKRINKIRRRLVKDSNTKKAGKTGPMKTLLVRVMTPDLRERLENLRKKPENIPQPISNTSQANLNKLLTDYTEMKKAILHVYWEEFQKDPVGLMSRVAQPASKKIDQNKLKPEMDEKGNLTTAGFACSQCGQPLFVYKLEQVSEKGKAYTNYFGRCNVAEHEKLIKLAQLKPEKDSDEAVTYSLGKFGQRALDFYSIHVTKESTHPVKPLAQIAGNRYASGPVGKALSDACMGTIASFLSKYQDIIIEHQKVVKGNQKRLESLRELAGKENLEYPSVTLPPQPHTKEGVDAYNEVIARVRMWVNLNLWQKLKLSRDDAKPLLRLKGFPSFPLVERQANEVDWWDMVCNVKKLINEKKEDGKVFWQNLAGYKRQEALRPYLSSEEDRKKGKKFARYQLGDLLLHLEKKHGEDWGKVYDEAWERIDKKVEGLSKHIKLEEERRSEDAQSKAALTDWLRAKASFVIEGLKEADKDEFCRCELKLQKWYGDLRGKPFAIEAENSILDISGFSKQYNCAFIWQKDGVKKLNLYLIINYFKGGKLRFKKIKPEAFEANRFYTVINKKSGEIVPMEVNFNFDDPNLIILPLAFGKRQGREFIWNDLLSLETGSLKLANGRVIEKTLYNRRTRQDEPALFVALTFERREVLDSSNIKPMNLIGVDRGENIPAVIALTDPEGCPLSRFKDSLGNPTHILRIGESYKEKQRTIQAKKEVEQRRAGGYSRKYASKAKNLADDMVRNTARDLLYYAVTQDAMLIFENLSRGFGRQGKRTFMAERQYTRMEDWLTAKLAYEGLASKTYLSKTLAQYTSKTCSNCGFTITSADYDRVLEKLKKTATGWMTTINGKELKVEGQITYYNRYKRQNVVKDLSVELDRLSEESVNNDISSWTKGRSGEALSLLKKRFSHRPVQEKFVCLNCGFETHADEQAALNIARSWLFLRSQEYKKYQTNKTTGNTDKRAFVETWQSFYRKKLKEVWKPAV

SEQ ID NO: 34250 - protein, 977 aa, synthetic construct
  REGION 1..977: note = engineered CasX variant
QEIKRINKIRRRLVKDSNTKKAGKTGPMKTLLVRVMTPDLRERLENLRKKPENIPQPISNTSQANLNKLLTDYTEMKKAILHVYWEEFQKDPVGLMSRVAQPASKKIDQNKLKPEMDEKGNLTTAGFACSQCGQPLFVYKLEQVSEKGKAYTNYFGRCNVAEHEKLILLAQLKPEKDSDEAVTYSLGKFGQRALDFYSIHVTKESTHPVKPLAQIAGNRYASPVGKALSDACMGTIASFLSKYQDIIIEHQKVVKGNQKRLESLRELAGKENLEYPSVTLPPQPHTKEGVDAYNEVIARVRMWVNLNLWQKLKLSRDDAKPLLRLKGFPSFPLVERQANEVDWWDMVCNVKKLINEKKEDGKVFWQNLAGYKRQEALRPYLSSEEDRKKGKKFARYQLGDLLLHLEKKHGEDWGKVYDEAWERIDKKVEGLSKHIKLEEERRSEDAQSKAALTDWLRAKASFVIEGLKEADKDEFCRCELKLQKWYGDLRGKPFAIEAENSILDISGFSKQYNCAFIWQKDGVKKLNLYLIINYFKGGKLRFKKIKPEAFEANRFYTVINKKSGEIVPMEVNFNFDDPNLIILPLAFGKRQGREFIWNDLLSLETGSLKLANGRVIEKTLYNRRTRQDEPALFVALTFERREVLDSSNIKPMNLIGVDRGENIPAVIALTDPEGCPLSRFKDSLGNPTHILRIGESYKEKQRTIQAKKEVEQRRAGGYSRKYASKAKNLADDMVRNTARDLLYYAVTQDAMLIFENLSRGFGRQGKRTFMAERQYTRMEDWLTAKLAYEGLASKTYLSKTLAQYTSKTCSNCGFTITSADYDRVLEKLKKTATGWMTTINGKELKVEGQITYYNRYKRQNVVKDLSVELDRLSEESVNNDISSWTKGRSGEALSLLKKRFSHRPVQEKFVCLNCGFETHADEQAALNIARSWLFLRSQEYKKYQTNKTTGNTDKRAFVETWQSFYRKKLKEVWKPAV

SEQ ID NO: 34251 - protein, 978 aa, synthetic construct
  REGION 1..978: note = engineered CasX variant
QEIKRINKIRRRLVKDSNTKKAGKTGPMKTLLVRVMTPDLRERLENLRKKPENIPQPISNTSQANLNKLLTDYTEMKKAILHVYWEEFQKDPVGLMSRVAQPASKKIDQNKLKPEMDEKGNLTTAGFACSQCGQPLFVYKLEQVSEKGKAYTNYFGRCNVAEHEKLILLAQLKPEKDSDEAVTYSLGKFGQRALDFYSIHVTKESTHPVKPLAQIAGNRYASYPVGKALSDACMGTIASFLSKYQDIIIEHQKVVKGNQKRLESLRELAGKENLEYPSVTLPPQPHTKEGVDAYNEVIARVRMWVNLNLWQKLKLSRDDAKPLLRLKGFPSFPLVERQANEVDWWDMVCNVKKLINEKKEDGKVFWQNLAGYKRQEALRPYLSSEEDRKKGKKFARYQLGDLLLHLEKKHGEDWGKVYDEAWERIDKKVEGLSKHIKLEEERRSEDAQSKAALTDWLRAKASFVIEGLKEADKDEFCRCELKLQKWYGDLRGKPFAIEAENSILDISGFSKQYNCAFIWQKDGVKKLNLYLIINYFKGGKLRFKKIKPEAFEANRFYTVINKKSGEIVPMEVNFNFDDPNLIILPLAFGKRQGREFIWNDLLSLETGSLKLANGRVIEKTLYNRRTRQDEPALFVALTFERREVLDSSNIKPMNLIGVDRGENIPAVIALTDPEGCPLSRFKDSLGNPTHILRIGESYKEKQRTIQAKKEVEQRRAGGYSRKYASKAKNLADDMVRNTARDLLYYAVTQDAMLIFENLSRGFGRQGKRTFMAERQYTRMEDWLTAKLAYEGLPSKVYLSKTLAQYTSKTCSNCGFTITSADYDRVLEKLKKTATGWMTTINGKELKVEGQITYYNRYKRQNVVKDLSVELDRLSEESVNNDISSWTKGRSGEALSLLKKRFSHRPVQEKFVCLNCGFETHADEQAALNIARSWLFLRSQEYKKYQTNKTTGNTDKRAFVETWQSFYRKKLKEVWKPAV

SEQ ID NO: 34252 - protein, 978 aa, synthetic construct
  REGION 1..978: note = engineered CasX variant
QEIKRINKIRRRLVKDSNTKKAGKTGPMKTLLVRVMTPDLRERLENLRKKPENIPQPISNTSQANLNKLLTDYTEMKKAILHVYWEEFQKDPVGLMSRVAQPASKKIDQNKLKPEMDEKGNLTTAGFACSQCGQPLFVYKLEQVSEKGKAYTNYFGRCNVAEHEKLILLAQLKPEKDSDEAVTYSLGKFGQRALDFYSIHVTKESTHPVKPLAQIAGNRYASHPVGKALSDACMGTIASFLSKYQDIIIEHQKVVKGNQKRLESLRELAGKENLEYPSVTLPPQPHTKEGVDAYNEVIARVRMWVNLNLWQKLKLSRDDAKPLLRLKGFPSFPLVERQANEVDWWDMVCNVKKLINEKKEDGKVFWQNLAGYKRQEALRPYLSSEEDRKKGKKFARYQLGDLLLHLEKKHGEDWGKVYDEAWERIDKKVEGLSKHIKLEEERRSEDAQSKAALTDWLRAKASFVIEGLKEADKDEFCRCELKLQKWYGDLRGKPFAIEAENSILDISGFSKQYNCAFIWQKDGVKKLNLYLIINYFKGGKLRFKKIKPEAFEANRFYTVINKKSGEIVPMEVNFNFDDPNLIILPLAFGKRQGREFIWNDLLSLETGSLKLANGRVIEKTLYNRRTRQDEPALFVALTFERREVLDSSNIKPMNLIGVDRGENIPAVIALTDPEGCPLSRFKDSLGNPTHILRIGESYKEKQRTIQAKKEVEQRRAGGYSRKYASKAKNLADDMVRNTARDLLYYAVTQDAMLIFENLSRGFGRQGKRTFMAERQYTRMEDWLTAKLAYEGLPSKVYLSKTLAQYTSKTCSNCGFTITSADYDRVLEKLKKTATGWMTTINGKELKVEGQITYYNRYKRQNVVKDLSVELDRLSEESVNNDISSWTKGRSGEALSLLKKRFSHRPVQEKFVCLNCGFETHADEQAALNIARSWLFLRSQEYKKYQTNKTTGNTDKRAFVETWQSFYRKKLKEVWKPAV

SEQ ID NO: 34253 - protein, 978 aa, synthetic construct
  REGION 1..978: note = engineered CasX variant
QEIKRINKIRRRLVKDSNTKKAGKTGPMKTLLVRVMTPDLRERLENLRKKPENIPQPISNTSQANLNKLLTDYTEMKKAILHVYWEEFQKDPVGLMSRVAQPASKKIDQNKLKPEMDEKGNLTTAGFACSQCGQPLFVYKLEQVSEKGKAYTNYFGRCNVAEHEKLILLAQLKPEKDSDEAVTYSLGKFGQRALDFYSIHVTKESTHPVKPLAQIAGNRYASSPVGKALSDACMGTIASFLSKYQDIIIEHQKVVKGNQKRLESLRELAGKENLEYPSVTLPPQPHTKEGVDAYNEVIARVRMWVNLNLWQKLKLSRDDAKPLLRLKGFPSFPLVERQANEVDWWDMVCNVKKLINEKKEDGKVFWQNLAGYKRQEALRPYLSSEEDRKKGKKFARYQLGDLLLHLEKKHGEDWGKVYDEAWERIDKKVEGLSKHIKLEEERRSEDAQSKAALTDWLRAKASFVIEGLKEADKDEFCRCELKLQKWYGDLRGKPFAIEAENSILDISGFSKQYNCAFIWQKDGVKKLNLYLIINYFKGGKLRFKKIKPEAFEANRFYTVINKKSGEIVPMEVNFNFDDPNLIILPLAFGKRQGREFIWNDLLSLETGSLKLANGRVIEKTLYNRRTRQDEPALFVALTFERREVLDSSNIKPMNLIGVDRGENIPAVIALTDPEGCPLSRFKDSLGNPTHILRIGESYKEKQRTIQAKKEVEQRRAGGYSRKYASKAKNLADDMVRNTARDLLYYAVTQDAMLIFENLSRGFGRQGKRTFMAERQYTRMEDWLTAKLAYEGLPSKVYLSKTLAQYTSKTCSNCGFTITSADYDRVLEKLKKTATGWMTTINGKELKVEGQITYYNRYKRQNVVKDLSVELDRLSEESVNNDISSWTKGRSGEALSLLKKRFSHRPVQEKFVCLNCGFETHADEQAALNIARSWLFLRSQEYKKYQTNKTTGNTDKRAFVETWQSFYRKKLKEVWKPAV

SEQ ID NO: 34254 - protein, 978 aa, synthetic construct
  REGION 1..978: note = engineered CasX variant
QEIKRINKIRRRLVKDSNTKKAGKTGPMKTLLVRVMTPDLRERLENLRKKPENIPQPISNTSQANLNKLLTDYTEMKKAILHVYWEEFQKDPVGLMSRVAQPASKKIDQNKLKPEMDEKGNLTTAGFACSQCGQPLFVYKLEQVSEKGKAYTNYFGRCNVAEHEKLILLAQLKPEKDSDEAVTYSLGKFGQRALDFYSIHVTKESTHPVKPLAQIAGNRYASTPVGKALSDACMGTIASFLSKYQDIIIEHQKVVKGNQKRLESLRELAGKENLEYPSVTLPPQPHTKEGVDAYNEVIARVRMWVNLNLWQKLKLSRDDAKPLLRLKGFPSFPLVERQANEVDWWDMVCNVKKLINEKKEDGKVFWQNLAGYKRQEALRPYLSSEEDRKKGKKFARYQLGDLLLHLEKKHGEDWGKVYDEAWERIDKKVEGLSKHIKLEEERRSEDAQSKAALTDWLRAKASFVIEGLKEADKDEFCRCELKLQKWYGDLRGKPFAIEAENSILDISGFSKQYNCAFIWQKDGVKKLNLYLIINYFKGGKLRFKKIKPEAFEANRFYTVINKKSGEIVPMEVNFNFDDPNLIILPLAFGKRQGREFIWNDLLSLETGSLKLANGRVIEKTLYNRRTRQDEPALFVALTFERREVLDSSNIKPMNLIGVDRGENIPAVIALTDPEGCPLSRFKDSLGNPTHILRIGESYKEKQRTIQAKKEVEQRRAGGYSRKYASKAKNLADDMVRNTARDLLYYAVTQDAMLIFENLSRGFGRQGKRTFMAERQYTRMEDWLTAKLAYEGLPSKVYLSKTLAQYTSKTCSNCGFTITSADYDRVLEKLKKTATGWMTTINGKELKVEGQITYYNRYKRQNVVKDLSVELDRLSEESVNNDISSWTKGRSGEALSLLKKRFSHRPVQEKFVCLNCGFETHADEQAALNIARSWLFLRSQEYKKYQTNKTTGNTDKRAFVETWQSFYRKKLKEVWKPAV

SEQ ID NO: 34255 - protein, 978 aa, synthetic construct
  REGION 1..978: note = engineered CasX variant
QEIKRINKIRRRLVKDSNTKKAGKTGPMKTLLVRVMTPDLRERLENLRKKPENIPQPISNTSQANLNKLLTDYTEMKKAILHVYWEEFQKDPVGLMSRVAQPASKKIDQNKLKPEMDEKGNLTTAGFACSQCGQPLFVYKLEQVSEKGKAYTNYFGRCNVAEHEKLILLAQLKPEKDSDEAVTYSLGKFGQRALDFYSIHVTKESTHPVKPLAQIAGNRYASAPVGKALSDACMGTIASFLSKYQDIIIEHQKVVKGNQKRLESLRELAGKENLEYPSVTLPPQPHTKEGVDAYNEVIARVRMWVNLNLWQKLKLSRDDAKPLLRLKGFPSFPLVERQANEVDWWDMVCNVKKLINEKKEDGKVFWQNLAGYKRQEALRPYLSSEEDRKKGKKFARYQLGDLLLHLEKKHGEDWGKVYDEAWERIDKKVEGLSKHIKLEEERRSEDAQSKAALTDWLRAKASFVIEGLKEADKDEFCRCELKLQKWYGDLRGKPFAIEAENSILDISGFSKQYNCAFIWQKDGVKKLNLYLIINYFKGGKLRFKKIKPEAFEANRFYTVINKKSGEIVPMEVNFNFDDPNLIILPLAFGKRQGREFIWNDLLSLETGSLKLANGRVIEKTLYNRRTRQDEPALFVALTFERREVLDSSNIKPMNLIGVDRGENIPAVIALTDPEGCPLSRFKDSLGNPTHILRIGESYKEKQRTIQAKKEVEQRRAGGYSRKYASKAKNLADDMVRNTARDLLYYAVTQDAMLIFENLSRGFGRQGKRTFMAERQYTRMEDWLTAKLAYEGLPSKVYLSKTLAQYTSKTCSNCGFTITSADYDRVLEKLKKTATGWMTTINGKELKVEGQITYYNRYKRQNVVKDLSVELDRLSEESVNNDISSWTKGRSGEALSLLKKRFSHRPVQEKFVCLNCGFETHADEQAALNIARSWLFLRSQEYKKYQTNKTTGNTDKRAFVETWQSFYRKKLKEVWKPAV

SEQ ID NO: 34256 - protein, 978 aa, synthetic construct
  REGION 1..978: note = engineered CasX variant
QEIKRINKIRRRLVKDSNTKKAGKTGPMKTLLVRVMTPDLRERLENLRKKPENIPQPISNTSQANLNKLLTDYTEMKKAILHVYWEEFQKDPVGLMSRVAQPASKKIDQNKLKPEMDEKGNLTTAGFACSQCGQPLFVYKLEQVSEKGKAYTNYFGRCNVAEHEKLILLAQLKPEKDSDEAVTYSLGKFGQRALDFYSIHVTKESTHPVKPLAQIAGNRYASVPVGKALSDACMGTIASFLSKYQDIIIEHQKVVKGNQKRLESLRELAGKENLEYPSVTLPPQPHTKEGVDAYNEVIARVRMWVNLNLWQKLKLSRDDAKPLLRLKGFPSFPLVERQANEVDWWDMVCNVKKLINEKKEDGKVFWQNLAGYKRQEALRPYLSSEEDRKKGKKFARYQLGDLLLHLEKKHGEDWGKVYDEAWERIDKKVEGLSKHIKLEEERRSEDAQSKAALTDWLRAKASFVIEGLKEADKDEFCRCELKLQKWYGDLRGKPFAIEAENSILDISGFSKQYNCAFIWQKDGVKKLNLYLIINYFKGGKLRFKKIKPEAFEANRFYTVINKKSGEIVPMEVNFNFDDPNLIILPLAFGKRQGREFIWNDLLSLETGSLKLANGRVIEKTLYNRRTRQDEPALFVALTFERREVLDSSNIKPMNLIGVDRGENIPAVIALTDPEGCPLSRFKDSLGNPTHILRIGESYKEKQRTIQAKKEVEQRRAGGYSRKYASKAKNLADDMVRNTARDLLYYAVTQDAMLIFENLSRGFGRQGKRTFMAERQYTRMEDWLTAKLAYEGLPSKVYLSKTLAQYTSKTCSNCGFTITSADYDRVLEKLKKTATGWMTTINGKELKVEGQITYYNRYKRQNVVKDLSVELDRLSEESVNNDISSWTKGRSGEALSLLKKRFSHRPVQEKFVCLNCGFETHADEQAALNIARSWLFLRSQEYKKYQTNKTTGNTDKRAFVETWQSFYRKKLKEVWKPAV

SEQ ID NO: 34257 - protein, 978 aa, synthetic construct
  REGION 1..978: note = engineered CasX variant
QEIKRINKIRRRLVKDSNTKKAGKTGPMKTLLVRVMTPDLRERLENLRKKPENIPQPISNTSQANLNKLLTDYTEMKKAILHVYWEEFQKDPVGLMSRVAQPASKKIDQNKLKPEMDEKGNLTTAGFACSQCGQPLFVYKLEQVSEKGKAYTNYFGRCNVAEHEKLIKLAQLKPEKDSDEAVTYSLGKFGQRALDFYSIHVTKESTHPVKPLAQIAGNRYASGPVGKALSDACMGTIASFLSKYQDIIIEHQKVVKGNQKRLESLRELAGKENLEYPSVTLPPQPHTKEGVDAYNEVIARVRMWVNLNLWQKLKLSRDDAKPLLRLKGFPSFPLVERQANEVDWWDMVCNVKKLINEKKEDGKVFWQNLAGYKRQEALRPYLSSEEDRKKGKKFARYQLGDLLLHLEKKHGEDWGKVYDEAWERIDKKVEGLSKHIKLEEERRSEDAQSKAALTDWLRAKASFVIEGLKEADKDEFCRCELKLQKWYGDLRGKPFAIEAENSILDISGFSKQYNCAFIWQKDGVKKLNLYLIINYFKGGKLRFKKIKPEAFEANRFYTVINKKSGEIVPMEVNFNFDDPNLIILPLAFGKRQGREFIWNDLLSLETGSLKLANGRVIEKTLYNRRTRQDEPALFVALTFERREVLDSSNIKPMNLIGVDRGENIPAVIALTDPEGCPLSRFKDSLGNPTHILRIGESYKEKQRTIQAKKEVEQRRAGGYSRKYASKAKNLADDMVRNTARDLLYYAVTQDAMLIFENLSRGFGRQGKRTFMAERQYTRMEDWLTAKLAYEGLPSKVYLSKTLAQYTSKTCSNCGFTITSADYDRVLEKLKKTATGWMTTINGKELKVEGQITYYNRYKRQNVVKDLSVELDRLSEESVNNDISSWTKGRSGEALSLLKKRFSHRPVQEKFVCLNCGFETHADEQAALNIARSWLFLRSQEYKKYQTNKTTGNTDKRAFVETWQSFYRKKLKEVWKPAV

SEQ ID NO: 34258 - protein, 977 aa, synthetic construct
  REGION 1..977: note = engineered CasX variant
QEIKRINKIRRRLVKDSNTKKAGKTGPMKTLLVRVMTPDLRERLENLRKKPENIPQPISNTSQANLNKLLTDYTEMKKAILHVYWEEFQKDPVGLMSRVAQPASKKIDQNKLKPEMDEKGNLTTAGFACSQCGQPLFVYKLEQVSEKGKAYTNYFGRCNVAEHEKLILLAQLKPEKDSDEAVTYSLGKFGQRALDFYSIHVTKESTHPVKPLAQIAGNRYASPVGKALSDACMGTIASFLSKYQDIIIEHQKVVKGNQKRLESLRELAGKENLEYPSVTLPPQPHTKEGVDAYNEVIARVRMWVNLNLWQKLKLSRDDAKPLLRLKGFPSFPLVERQANEVDWWDMVCNVKKLINEKKEDGKVFWQNLAGYKRQEALRPYLSSEEDRKKGKKFARYQLGDLLLHLEKKHGEDWGKVYDEAWERIDKKVEGLSKHIKLEEERRSEDAQSKAALTDWLRAKASFVIEGLKEADKDEFCRCELKLQKWYGDLRGKPFAIEAENSILDISGFSKQYNCAFIWQKDGVKKLNLYLIINYFKGGKLRFKKIKPEAFEANRFYTVINKKSGEIVPMEVNFNFDDPNLIILPLAFGKRQGREFIWNDLLSLETGSLKLANGRVIEKTLYNRRTRQDEPALFVALTFERREVLDSSNIKPMNLIGVDRGENIPAVIALTDPEGCPLSRFKDSLGNPTHILRIGESYKEKQRTIQAKKEVEQRRAGGYSRKYASKAKNLADDMVRNTARDLLYYAVTQDAMLIFENLSRGFGRQGKRTFMAERQYTRMEDWLTAKLAYEGLPSKVYLSKTLAQYTSKTCSNCGFTITSADYDRVLEKLKKTATGWMTTINGKELKVEGQITYYNRYKRQNVVKDLSVELDRLSEESVNNDISSWTKGRSGEALSLLKKRFSHRPVQEKFVCLNCGFETHADEQAALNIARSWLFLRSQEYKKYQTNKTTGNTDKRAFVETWQSFYRKKLKEVWKPAV

SEQ ID NO: 34259 - protein, 979 aa, synthetic construct
  REGION 1..979: note = engineered CasX variant
QEIKRINKIRRRLVKDSNTKKAGKTGPMKTLLVRVMTPDLRERLENLRKKPENIPQPISNTSQANLNKLLTDYTEMKKAILHVYWEEFQKDPVGLMSRVAQPASKKIDQNKLKPEMDEKGNLTTAGFACSQCGQPLFVYKLEQVSEKGKAYTNYFGRCNVAEHEKLILLAQLKPEKDSDEAVTYSLGKFGQRALDFYSIHVTKESTHPVKPLAQIAGNRYASYPVGKALSDACMGTIASFLSKYQDIIIEHQKVVKGNQKRLESLRELAGKENLEYPSVTLPPQPHTKEGVDAYNEVIARVRMWVNLNLWQKLKLSRDDAKPLLRLKGFPSFPLVERQANEVDWWDMVCNVKKLINEKKEDGKVFWQNLAGYKRQEALRPYLSSEEDRKKGKKFARYQLGDLLLHLEKKHGEDWGKVYDEAWERIDKKVEGLSKHIKLEEERRSEDAQSKAALTDWLRAKASFVIEGLKEADKDEFCRCELKLQKWYGDLRGKPFAIEAENSILDISGFSKQYNCAFIWQKDGVKKLNLYLIINYFKGGKLRFKKIKPEAFEANRFYTVINKKSGEIVPMEVNFNFDDPNLIILPLAFGKRQGREFIWNDLLSLETGSLKLANGRVIEKTLYNRRTRQDEPALFVALTFERREVLDSSNIKPMNLIGVDRGENIPAVIALTDPEGCPLSRFKDSLGNPTHILRIGESYKEKQRTIQAKKEVEQRRAGGYSRKYASKAKNLADDMVRNTARDLLYYAVTQDAMLIFENLSRGFGRQGKRTFMAERQYTRMEDWLTAKLAYEGPLPSKTYLSKTLAQYTSKTCSNCGFTITSADYDRVLEKLKKTATGWMTTINGKELKVEGQITYYNRYKRQNVVKDLSVELDRLSEESVNNDISSWTKGRSGEALSLLKKRFSHRPVQEKFVCLNCGFETHADEQAALNIARSWLFLRSQEYKKYQTNKTTGNTDKRAFVETWQSFYRKKLKEVWKPAV

SEQ ID NO: 34260 - protein, 979 aa, synthetic construct
  REGION 1..979: note = engineered CasX variant
QEIKRINKIRRRLVKDSNTKKAGKTGPMKTLLVRVMTPDLRERLENLRKKPENIPQPISNTSQANLNKLLTDYTEMKKAILHVYWEEFQKDPVGLMSRVAQPASKKIDQNKLKPEMDEKGNLTTAGFACSQCGQPLFVYKLEQVSEKGKAYTNYFGRCNVAEHEKLILLAQLKPEKDSDEAVTYSLGKFGQRALDFYSIHVTKESTHPVKPLAQIAGNRYASHPVGKALSDACMGTIASFLSKYQDIIIEHQKVVKGNQKRLESLRELAGKENLEYPSVTLPPQPHTKEGVDAYNEVIARVRMWVNLNLWQKLKLSRDDAKPLLRLKGFPSFPLVERQANEVDWWDMVCNVKKLINEKKEDGKVFWQNLAGYKRQEALRPYLSSEEDRKKGKKFARYQLGDLLLHLEKKHGEDWGKVYDEAWERIDKKVEGLSKHIKLEEERRSEDAQSKAALTDWLRAKASFVIEGLKEADKDEFCRCELKLQKWYGDLRGKPFAIEAENSILDISGFSKQYNCAFIWQKDGVKKLNLYLIINYFKGGKLRFKKIKPEAFEANRFYTVINKKSGEIVPMEVNFNFDDPNLIILPLAFGKRQGREFIWNDLLSLETGSLKLANGRVIEKTLYNRRTRQDEPALFVALTFERREVLDSSNIKPMNLIGVDRGENIPAVIALTDPEGCPLSRFKDSLGNPTHILRIGESYKEKQRTIQAKKEVEQRRAGGYSRKYASKAKNLADDMVRNTARDLLYYAVTQDAMLIFENLSRGFGRQGKRTFMAERQYTRMEDWLTAKLAYEGPLPSKTYLSKTLAQYTSKTCSNCGFTITSADYDRVLEKLKKTATGWMTTINGKELKVEGQITYYNRYKRQNVVKDLSVELDRLSEESVNNDISSWTKGRSGEALSLLKKRFSHRPVQEKFVCLNCGFETHADEQAALNIARSWLFLRSQEYKKYQTNKTTGNTDKRAFVETWQSFYRKKLKEVWKPAV

SEQ ID NO: 34261 - protein, 979 aa, synthetic construct
  REGION 1..979: note = engineered CasX variant
QEIKRINKIRRRLVKDSNTKKAGKTGPMKTLLVRVMTPDLRERLENLRKKPENIPQPISNTSQANLNKLLTDYTEMKKAILHVYWEEFQKDPVGLMSRVAQPASKKIDQNKLKPEMDEKGNLTTAGFACSQCGQPLFVYKLEQVSEKGKAYTNYFGRCNVAEHEKLILLAQLKPEKDSDEAVTYSLGKFGQRALDFYSIHVTKESTHPVKPLAQIAGNRYASSPVGKALSDACMGTIASFLSKYQDIIIEHQKVVKGNQKRLESLRELAGKENLEYPSVTLPPQPHTKEGVDAYNEVIARVRMWVNLNLWQKLKLSRDDAKPLLRLKGFPSFPLVERQANEVDWWDMVCNVKKLINEKKEDGKVFWQNLAGYKRQEALRPYLSSEEDRKKGKKFARYQLGDLLLHLEKKHGEDWGKVYDEAWERIDKKVEGLSKHIKLEEERRSEDAQSKAALTDWLRAKASFVIEGLKEADKDEFCRCELKLQKWYGDLRGKPFAIEAENSILDISGFSKQYNCAFIWQKDGVKKLNLYLIINYFKGGKLRFKKIKPEAFEANRFYTVINKKSGEIVPMEVNFNFDDPNLIILPLAFGKRQGREFIWNDLLSLETGSLKLANGRVIEKTLYNRRTRQDEPALFVALTFERREVLDSSNIKPMNLIGVDRGENIPAVIALTDPEGCPLSRFKDSLGNPTHILRIGESYKEKQRTIQAKKEVEQRRAGGYSRKYASKAKNLADDMVRNTARDLLYYAVTQDAMLIFENLSRGFGRQGKRTFMAERQYTRMEDWLTAKLAYEGPLPSKTYLSKTLAQYTSKTCSNCGFTITSADYDRVLEKLKKTATGWMTTINGKELKVEGQITYYNRYKRQNVVKDLSVELDRLSEESVNNDISSWTKGRSGEALSLLKKRFSHRPVQEKFVCLNCGFETHADEQAALNIARSWLFLRSQEYKKYQTNKTTGNTDKRAFVETWQSFYRKKLKEVWKPAV

SEQ ID NO: 34262 - protein, 979 aa, synthetic construct
  REGION 1..979: note = engineered CasX variant
QEIKRINKIRRRLVKDSNTKKAGKTGPMKTLLVRVMTPDLRERLENLRKKPENIPQPISNTSQANLNKLLTDYTEMKKAILHVYWEEFQKDPVGLMSRVAQPASKKIDQNKLKPEMDEKGNLTTAGFACSQCGQPLFVYKLEQVSEKGKAYTNYFGRCNVAEHEKLILLAQLKPEKDSDEAVTYSLGKFGQRALDFYSIHVTKESTHPVKPLAQIAGNRYASTPVGKALSDACMGTIASFLSKYQDIIIEHQKVVKGNQKRLESLRELAGKENLEYPSVTLPPQPHTKEGVDAYNEVIARVRMWVNLNLWQKLKLSRDDAKPLLRLKGFPSFPLVERQANEVDWWDMVCNVKKLINEKKEDGKVFWQNLAGYKRQEALRPYLSSEEDRKKGKKFARYQLGDLLLHLEKKHGEDWGKVYDEAWERIDKKVEGLSKHIKLEEERRSEDAQSKAALTDWLRAKASFVIEGLKEADKDEFCRCELKLQKWYGDLRGKPFAIEAENSILDISGFSKQYNCAFIWQKDGVKKLNLYLIINYFKGGKLRFKKIKPEAFEANRFYTVINKKSGEIVPMEVNFNFDDPNLIILPLAFGKRQGREFIWNDLLSLETGSLKLANGRVIEKTLYNRRTRQDEPALFVALTFERREVLDSSNIKPMNLIGVDRGENIPAVIALTDPEGCPLSRFKDSLGNPTHILRIGESYKEKQRTIQAKKEVEQRRAGGYSRKYASKAKNLADDMVRNTARDLLYYAVTQDAMLIFENLSRGFGRQGKRTFMAERQYTRMEDWLTAKLAYEGPLPSKTYLSKTLAQYTSKTCSNCGFTITSADYDRVLEKLKKTATGWMTTINGKELKVEGQITYYNRYKRQNVVKDLSVELDRLSEESVNNDISSWTKGRSGEALSLLKKRFSHRPVQEKFVCLNCGFETHADEQAALNIARSWLFLRSQEYKKYQTNKTTGNTDKRAFVETWQSFYRKKLKEVWKPAV

SEQ ID NO: 34263 - protein, 979 aa, synthetic construct
  REGION 1..979: note = engineered CasX variant
QEIKRINKIRRRLVKDSNTKKAGKTGPMKTLLVRVMTPDLRERLENLRKKPENIPQPISNTSQANLNKLLTDYTEMKKAILHVYWEEFQKDPVGLMSRVAQPASKKIDQNKLKPEMDEKGNLTTAGFACSQCGQPLFVYKLEQVSEKGKAYTNYFGRCNVAEHEKLILLAQLKPEKDSDEAVTYSLGKFGQRALDFYSIHVTKESTHPVKPLAQIAGNRYASAPVGKALSDACMGTIASFLSKYQDIIIEHQKVVKGNQKRLESLRELAGKENLEYPSVTLPPQPHTKEGVDAYNEVIARVRMWVNLNLWQKLKLSRDDAKPLLRLKGFPSFPLVERQANEVDWWDMVCNVKKLINEKKEDGKVFWQNLAGYKRQEALRPYLSSEEDRKKGKKFARYQLGDLLLHLEKKHGEDWGKVYDEAWERIDKKVEGLSKHIKLEEERRSEDAQSKAALTDWLRAKASFVIEGLKEADKDEFCRCELKLQKWYGDLRGKPFAIEAENSILDISGFSKQYNCAFIWQKDGVKKLNLYLIINYFKGGKLRFKKIKPEAFEANRFYTVINKKSGEIVPMEVNFNFDDPNLIILPLAFGKRQGREFIWNDLLSLETGSLKLANGRVIEKTLYNRRTRQDEPALFVALTFERREVLDSSNIKPMNLIGVDRGENIPAVIALTDPEGCPLSRFKDSLGNPTHILRIGESYKEKQRTIQAKKEVEQRRAGGYSRKYASKAKNLADDMVRNTARDLLYYAVTQDAMLIFENLSRGFGRQGKRTFMAERQYTRMEDWLTAKLAYEGPLPSKTYLSKTLAQYTSKTCSNCGFTITSADYDRVLEKLKKTATGWMTTINGKELKVEGQITYYNRYKRQNVVKDLSVELDRLSEESVNNDISSWTKGRSGEALSLLKKRFSHRPVQEKFVCLNCGFETHADEQAALNIARSWLFLRSQEYKKYQTNKTTGNTDKRAFVETWQSFYRKKLKEVWKPAV

SEQ ID NO: 34264 - protein, 979 aa, synthetic construct
  REGION 1..979: note = engineered CasX variant
QEIKRINKIRRRLVKDSNTKKAGKTGPMKTLLVRVMTPDLRERLENLRKKPENIPQPISNTSQANLNKLLTDYTEMKKAILHVYWEEFQKDPVGLMSRVAQPASKKIDQNKLKPEMDEKGNLTTAGFACSQCGQPLFVYKLEQVSEKGKAYTNYFGRCNVAEHEKLILLAQLKPEKDSDEAVTYSLGKFGQRALDFYSIHVTKESTHPVKPLAQIAGNRYASVPVGKALSDACMGTIASFLSKYQDIIIEHQKVVKGNQKRLESLRELAGKENLEYPSVTLPPQPHTKEGVDAYNEVIARVRMWVNLNLWQKLKLSRDDAKPLLRLKGFPSFPLVERQANEVDWWDMVCNVKKLINEKKEDGKVFWQNLAGYKRQEALRPYLSSEEDRKKGKKFARYQLGDLLLHLEKKHGEDWGKVYDEAWERIDKKVEGLSKHIKLEEERRSEDAQSKAALTDWLRAKASFVIEGLKEADKDEFCRCELKLQKWYGDLRGKPFAIEAENSILDISGFSKQYNCAFIWQKDGVKKLNLYLIINYFKGGKLRFKKIKPEAFEANRFYTVINKKSGEIVPMEVNFNFDDPNLIILPLAFGKRQGREFIWNDLLSLETGSLKLANGRVIEKTLYNRRTRQDEPALFVALTFERREVLDSSNIKPMNLIGVDRGENIPAVIALTDPEGCPLSRFKDSLGNPTHILRIGESYKEKQRTIQAKKEVEQRRAGGYSRKYASKAKNLADDMVRNTARDLLYYAVTQDAMLIFENLSRGFGRQGKRTFMAERQYTRMEDWLTAKLAYEGPLPSKTYLSKTLAQYTSKTCSNCGFTITSADYDRVLEKLKKTATGWMTTINGKELKVEGQITYYNRYKRQNVVKDLSVELDRLSEESVNNDISSWTKGRSGEALSLLKKRFSHRPVQEKFVCLNCGFETHADEQAALNIARSWLFLRSQEYKKYQTNKTTGNTDKRAFVETWQSFYRKKLKEVWKPAV

SEQ ID NO: 34265 - protein, 979 aa, synthetic construct
  REGION 1..979: note = engineered CasX variant
QEIKRINKIRRRLVKDSNTKKAGKTGPMKTLLVRVMTPDLRERLENLRKKPENIPQPISNTSQANLNKLLTDYTEMKKAILHVYWEEFQKDPVGLMSRVAQPASKKIDQNKLKPEMDEKGNLTTAGFACSQCGQPLFVYKLEQVSEKGKAYTNYFGRCNVAEHEKLIKLAQLKPEKDSDEAVTYSLGKFGQRALDFYSIHVTKESTHPVKPLAQIAGNRYASGPVGKALSDACMGTIASFLSKYQDIIIEHQKVVKGNQKRLESLRELAGKENLEYPSVTLPPQPHTKEGVDAYNEVIARVRMWVNLNLWQKLKLSRDDAKPLLRLKGFPSFPLVERQANEVDWWDMVCNVKKLINEKKEDGKVFWQNLAGYKRQEALRPYLSSEEDRKKGKKFARYQLGDLLLHLEKKHGEDWGKVYDEAWERIDKKVEGLSKHIKLEEERRSEDAQSKAALTDWLRAKASFVIEGLKEADKDEFCRCELKLQKWYGDLRGKPFAIEAENSILDISGFSKQYNCAFIWQKDGVKKLNLYLIINYFKGGKLRFKKIKPEAFEANRFYTVINKKSGEIVPMEVNFNFDDPNLIILPLAFGKRQGREFIWNDLLSLETGSLKLANGRVIEKTLYNRRTRQDEPALFVALTFERREVLDSSNIKPMNLIGVDRGENIPAVIALTDPEGCPLSRFKDSLGNPTHILRIGESYKEKQRTIQAKKEVEQRRAGGYSRKYASKAKNLADDMVRNTARDLLYYAVTQDAMLIFENLSRGFGRQGKRTFMAERQYTRMEDWLTAKLAYEGPLPSKTYLSKTLAQYTSKTCSNCGFTITSADYDRVLEKLKKTATGWMTTINGKELKVEGQITYYNRYKRQNVVKDLSVELDRLSEESVNNDISSWTKGRSGEALSLLKKRFSHRPVQEKFVCLNCGFETHADEQAALNIARSWLFLRSQEYKKYQTNKTTGNTDKRAFVETWQSFYRKKLKEVWKPAV

SEQ ID NO: 34266 - protein, 978 aa, synthetic construct
  REGION 1..978: note = engineered CasX variant
QEIKRINKIRRRLVKDSNTKKAGKTGPMKTLLVRVMTPDLRERLENLRKKPENIPQPISNTSQANLNKLLTDYTEMKKAILHVYWEEFQKDPVGLMSRVAQPASKKIDQNKLKPEMDEKGNLTTAGFACSQCGQPLFVYKLEQVSEKGKAYTNYFGRCNVAEHEKLILLAQLKPEKDSDEAVTYSLGKFGQRALDFYSIHVTKESTHPVKPLAQIAGNRYASPVGKALSDACMGTIASFLSKYQDIIIEHQKVVKGNQKRLESLRELAGKENLEYPSVTLPPQPHTKEGVDAYNEVIARVRMWVNLNLWQKLKLSRDDAKPLLRLKGFPSFPLVERQANEVDWWDMVCNVKKLINEKKEDGKVFWQNLAGYKRQEALRPYLSSEEDRKKGKKFARYQLGDLLLHLEKKHGEDWGKVYDEAWERIDKKVEGLSKHIKLEEERRSEDAQSKAALTDWLRAKASFVIEGLKEADKDEFCRCELKLQKWYGDLRGKPFAIEAENSILDISGFSKQYNCAFIWQKDGVKKLNLYLIINYFKGGKLRFKKIKPEAFEANRFYTVINKKSGEIVPMEVNFNFDDPNLIILPLAFGKRQGREFIWNDLLSLETGSLKLANGRVIEKTLYNRRTRQDEPALFVALTFERREVLDSSNIKPMNLIGVDRGENIPAVIALTDPEGCPLSRFKDSLGNPTHILRIGESYKEKQRTIQAKKEVEQRRAGGYSRKYASKAKNLADDMVRNTARDLLYYAVTQDAMLIFENLSRGFGRQGKRTFMAERQYTRMEDWLTAKLAYEGPLPSKTYLSKTLAQYTSKTCSNCGFTITSADYDRVLEKLKKTATGWMTTINGKELKVEGQITYYNRYKRQNVVKDLSVELDRLSEESVNNDISSWTKGRSGEALSLLKKRFSHRPVQEKFVCLNCGFETHADEQAALNIARSWLFLRSQEYKKYQTNKTTGNTDKRAFVETWQSFYRKKLKEVWKPAV

SEQ ID NO: 34267 - protein, 979 aa, synthetic construct
  REGION 1..979: note = engineered CasX variant
QEIKRINKIRRRLVKDSNTKKAGKTGPMKTLLVRVMTPDLRERLENLRKKPENIPQPISNTSQANLNKLLTDYTEMKKAILHVYWEEFQKDPVGLMSRVAQPASKKIDQNKLKPEMDEKGNLTTAGFACSQCGQPLFVYKLEQVSEKGKAYTNYFGRCNVAEHEKLILLAQLKPEKDSDEAVTYSLGKFGQRALDFYSIHVTKESTHPVKPLAQIAGNRYASYPVGKALSDACMGTIASFLSKYQDIIIEHQKVVKGNQKRLESLRELAGKENLEYPSVTLPPQPHTKEGVDAYNEVIARVRMWVNLNLWQKLKLSRDDAKPLLRLKGFPSFPLVERQANEVDWWDMVCNVKKLINEKKEDGKVFWQNLAGYKRQEALRPYLSSEEDVRKKGKKFARYQLGDLLLHLEKKHGEDWGKVYDEAWERIDKKVEGLSKHIKLEEERRSEDAQSKAALTDWLRAKASFVIEGLKEADKDEFCRCELKLQKWYGDLRGKPFAIEAENSILDISGFSKQYNCAFIWQKDGVKKLNLYLIINYFKGGKLRFKKIKPEAFEANRFYTVINKKSGEIVPMEVNFNFDDPNLIILPLAFGKRQGREFIWNDLLSLETGSLKLANGRVIEKTLYNRRTRQDEPALFVALTFERREVLDSSNIKPMNLIGVDRGENIPAVIALTDPEGCPLSRFKDSLGNPTHILRIGESYKEKQRTIQAKKEVEQRRAGGYSRKYASKAKNLADDMVRNTARDLLYYAVTQDAMLIFENLSRGFGRQGKRTFMAERQYTRMEDWLTAKLAYEGLPSKTYLSKTLAQYTSKTCSNCGFTITSADYDRVLEKLKKTATGWMTTINGKELKVEGQITYYNRYKRQNVVKDLSVELDRLSEESVNNDISSWTKGRSGEALSLLKKRFSHRPVQEKFVCLNCGFETHADEQAALNIARSWLFLRSQEYKKYQTNKTTGNTDKRAFVETWQSFYRKKLKEVWKPAV

SEQ ID NO: 34268 - protein, 979 aa, synthetic construct
  REGION 1..979: note = engineered CasX variant
QEIKRINKIRRRLVKDSNTKKAGKTGPMKTLLVRVMTPDLRERLENLRKKPENIPQPISNTSQANLNKLLTDYTEMKKAILHVYWEEFQKDPVGLMSRVAQPASKKIDQNKLKPEMDEKGNLTTAGFACSQCGQPLFVYKLEQVSEKGKAYTNYFGRCNVAEHEKLILLAQLKPEKDSDEAVTYSLGKFGQRALDFYSIHVTKESTHPVKPLAQIAGNRYASHPVGKALSDACMGTIASFLSKYQDIIIEHQKVVKGNQKRLESLRELAGKENLEYPSVTLPPQPHTKEGVDAYNEVIARVRMWVNLNLWQKLKLSRDDAKPLLRLKGFPSFPLVERQANEVDWWDMVCNVKKLINEKKEDGKVFWQNLAGYKRQEALRPYLSSEEDVRKKGKKFARYQLGDLLLHLEKKHGEDWGKVYDEAWERIDKKVEGLSKHIKLEEERRSEDAQSKAALTDWLRAKASFVIEGLKEADKDEFCRCELKLQKWYGDLRGKPFAIEAENSILDISGFSKQYNCAFIWQKDGVKKLNLYLIINYFKGGKLRFKKIKPEAFEANRFYTVINKKSGEIVPMEVNFNFDDPNLIILPLAFGKRQGREFIWNDLLSLETGSLKLANGRVIEKTLYNRRTRQDEPALFVALTFERREVLDSSNIKPMNLIGVDRGENIPAVIALTDPEGCPLSRFKDSLGNPTHILRIGESYKEKQRTIQAKKEVEQRRAGGYSRKYASKAKNLADDMVRNTARDLLYYAVTQDAMLIFENLSRGFGRQGKRTFMAERQYTRMEDWLTAKLAYEGLPSKTYLSKTLAQYTSKTCSNCGFTITSADYDRVLEKLKKTATGWMTTINGKELKVEGQITYYNRYKRQNVVKDLSVELDRLSEESVNNDISSWTKGRSGEALSLLKKRFSHRPVQEKFVCLNCGFETHADEQAALNIARSWLFLRSQEYKKYQTNKTTGNTDKRAFVETWQSFYRKKLKEVWKPAV

SEQ ID NO: 34269 - protein, 979 aa, synthetic construct
  REGION 1..979: note = engineered CasX variant
QEIKRINKIRRRLVKDSNTKKAGKTGPMKTLLVRVMTPDLRERLENLRKKPENIPQPISNTSQANLNKLLTDYTEMKKAILHVYWEEFQKDPVGLMSRVAQPASKKIDQNKLKPEMDEKGNLTTAGFACSQCGQPLFVYKLEQVSEKGKAYTNYFGRCNVAEHEKLILLAQLKPEKDSDEAVTYSLGKFGQRALDFYSIHVTKESTHPVKPLAQIAGNRYASSPVGKALSDACMGTIASFLSKYQDIIIEHQKVVKGNQKRLESLRELAGKENLEYPSVTLPPQPHTKEGVDAYNEVIARVRMWVNLNLWQKLKLSRDDAKPLLRLKGFPSFPLVERQANEVDWWDMVCNVKKLINEKKEDGKVFWQNLAGYKRQEALRPYLSSEEDVRKKGKKFARYQLGDLLLHLEKKHGEDWGKVYDEAWERIDKKVEGLSKHIKLEEERRSEDAQSKAALTDWLRAKASFVIEGLKEADKDEFCRCELKLQKWYGDLRGKPFAIEAENSILDISGFSKQYNCAFIWQKDGVKKLNLYLIINYFKGGKLRFKKIKPEAFEANRFYTVINKKSGEIVPMEVNFNFDDPNLIILPLAFGKRQGREFIWNDLLSLETGSLKLANGRVIEKTLYNRRTRQDEPALFVALTFERREVLDSSNIKPMNLIGVDRGENIPAVIALTDPEGCPLSRFKDSLGNPTHILRIGESYKEKQRTIQAKKEVEQRRAGGYSRKYASKAKNLADDMVRNTARDLLYYAVTQDAMLIFENLSRGFGRQGKRTFMAERQYTRMEDWLTAKLAYEGLPSKTYLSKTLAQYTSKTCSNCGFTITSADYDRVLEKLKKTATGWMTTINGKELKVEGQITYYNRYKRQNVVKDLSVELDRLSEESVNNDISSWTKGRSGEALSLLKKRFSHRPVQEKFVCLNCGFETHADEQAALNIARSWLFLRSQEYKKYQTNKTTGNTDKRAFVETWQSFYRKKLKEVWKPAV

SEQ ID NO: 34270 - protein, 979 aa, synthetic construct
  REGION 1..979: note = engineered CasX variant
QEIKRINKIRRRLVKDSNTKKAGKTGPMKTLLVRVMTPDLRERLENLRKKPENIPQPISNTSQANLNKLLTDYTEMKKAILHVYWEEFQKDPVGLMSRVAQPASKKIDQNKLKPEMDEKGNLTTAGFACSQCGQPLFVYKLEQVSEKGKAYTNYFGRCNVAEHEKLILLAQLKPEKDSDEAVTYSLGKFGQRALDFYSIHVTKESTHPVKPLAQIAGNRYASTPVGKALSDACMGTIASFLSKYQDIIIEHQKVVKGNQKRLESLRELAGKENLEYPSVTLPPQPHTKEGVDAYNEVIARVRMWVNLNLWQKLKLSRDDAKPLLRLKGFPSFPLVERQANEVDWWDMVCNVKKLINEKKEDGKVFWQNLAGYKRQEALRPYLSSEEDVRKKGKKFARYQLGDLLLHLEKKHGEDWGKVYDEAWERIDKKVEGLSKHIKLEEERRSEDAQSKAALTDWLRAKASFVIEGLKEADKDEFCRCELKLQKWYGDLRGKPFAIEAENSILDISGFSKQYNCAFIWQKDGVKKLNLYLIINYFKGGKLRFKKIKPEAFEANRFYTVINKKSGEIVPMEVNFNFDDPNLIILPLAFGKRQGREFIWNDLLSLETGSLKLANGRVIEKTLYNRRTRQDEPALFVALTFERREVLDSSNIKPMNLIGVDRGENIPAVIALTDPEGCPLSRFKDSLGNPTHILRIGESYKEKQRTIQAKKEVEQRRAGGYSRKYASKAKNLADDMVRNTARDLLYYAVTQDAMLIFENLSRGFGRQGKRTFMAERQYTRMEDWLTAKLAYEGLPSKTYLSKTLAQYTSKTCSNCGFTITSADYDRVLEKLKKTATGWMTTINGKELKVEGQITYYNRYKRQNVVKDLSVELDRLSEESVNNDISSWTKGRSGEALSLLKKRFSHRPVQEKFVCLNCGFETHADEQAALNIARSWLFLRSQEYKKYQTNKTTGNTDKRAFVETWQSFYRKKLKEVWKPAV

SEQ ID NO: 34271 - protein, 979 aa, synthetic construct
  REGION 1..979: note = engineered CasX variant
QEIKRINKIRRRLVKDSNTKKAGKTGPMKTLLVRVMTPDLRERLENLRKKPENIPQPISNTSQANLNKLLTDYTEMKKAILHVYWEEFQKDPVGLMSRVAQPASKKIDQNKLKPEMDEKGNLTTAGFACSQCGQPLFVYKLEQVSEKGKAYTNYFGRCNVAEHEKLILLAQLKPEKDSDEAVTYSLGKFGQRALDFYSIHVTKESTHPVKPLAQIAGNRYASAPVGKALSDACMGTIASFLSKYQDIIIEHQKVVKGNQKRLESLRELAGKENLEYPSVTLPPQPHTKEGVDAYNEVIARVRMWVNLNLWQKLKLSRDDAKPLLRLKGFPSFPLVERQANEVDWWDMVCNVKKLINEKKEDGKVFWQNLAGYKRQEALRPYLSSEEDVRKKGKKFARYQLGDLLLHLEKKHGEDWGKVYDEAWERIDKKVEGLSKHIKLEEERRSEDAQSKAALTDWLRAKASFVIEGLKEADKDEFCRCELKLQKWYGDLRGKPFAIEAENSILDISGFSKQYNCAFIWQKDGVKKLNLYLIINYFKGGKLRFKKIKPEAFEANRFYTVINKKSGEIVPMEVNFNFDDPNLIILPLAFGKRQGREFIWNDLLSLETGSLKLANGRVIEKTLYNRRTRQDEPALFVALTFERREVLDSSNIKPMNLIGVDRGENIPAVIALTDPEGCPLSRFKDSLGNPTHILRIGESYKEKQRTIQAKKEVEQRRAGGYSRKYASKAKNLADDMVRNTARDLLYYAVTQDAMLIFENLSRGFGRQGKRTFMAERQYTRMEDWLTAKLAYEGLPSKTYLSKTLAQYTSKTCSNCGFTITSADYDRVLEKLKKTATGWMTTINGKELKVEGQITYYNRYKRQNVVKDLSVELDRLSEESVNNDISSWTKGRSGEALSLLKKRFSHRPVQEKFVCLNCGFETHADEQAALNIARSWLFLRSQEYKKYQTNKTTGNTDKRAFVETWQSFYRKKLKEVWKPAV

SEQ ID NO: 34272 - protein, 979 aa, synthetic construct
  REGION 1..979: note = engineered CasX variant
QEIKRINKIRRRLVKDSNTKKAGKTGPMKTLLVRVMTPDLRERLENLRKKPENIPQPISNTSQANLNKLLTDYTEMKKAILHVYWEEFQKDPVGLMSRVAQPASKKIDQNKLKPEMDEKGNLTTAGFACSQCGQPLFVYKLEQVSEKGKAYTNYFGRCNVAEHEKLILLAQLKPEKDSDEAVTYSLGKFGQRALDFYSIHVTKESTHPVKPLAQIAGNRYASVPVGKALSDACMGTIASFLSKYQDIIIEHQKVVKGNQKRLESLRELAGKENLEYPSVTLPPQPHTKEGVDAYNEVIARVRMWVNLNLWQKLKLSRDDAKPLLRLKGFPSFPLVERQANEVDWWDMVCNVKKLINEKKEDGKVFWQNLAGYKRQEALRPYLSSEEDVRKKGKKFARYQLGDLLLHLEKKHGEDWGKVYDEAWERIDKKVEGLSKHIKLEEERRSEDAQSKAALTDWLRAKASFVIEGLKEADKDEFCRCELKLQKWYGDLRGKPFAIEAENSILDISGFSKQYNCAFIWQKDGVKKLNLYLIINYFKGGKLRFKKIKPEAFEANRFYTVINKKSGEIVPMEVNFNFDDPNLIILPLAFGKRQGREFIWNDLLSLETGSLKLANGRVIEKTLYNRRTRQDEPALFVALTFERREVLDSSNIKPMNLIGVDRGENIPAVIALTDPEGCPLSRFKDSLGNPTHILRIGESYKEKQRTIQAKKEVEQRRAGGYSRKYASKAKNLADDMVRNTARDLLYYAVTQDAMLIFENLSRGFGRQGKRTFMAERQYTRMEDWLTAKLAYEGLPSKTYLSKTLAQYTSKTCSNCGFTITSADYDRVLEKLKKTATGWMTTINGKELKVEGQITYYNRYKRQNVVKDLSVELDRLSEESVNNDISSWTKGRSGEALSLLKKRFSHRPVQEKFVCLNCGFETHADEQAALNIARSWLFLRSQEYKKYQTNKTTGNTDKRAFVETWQSFYRKKLKEVWKPAV

SEQ ID NO: 34273 - protein, 979 aa, synthetic construct
  REGION 1..979: note = engineered CasX variant
QEIKRINKIRRRLVKDSNTKKAGKTGPMKTLLVRVMTPDLRERLENLRKKPENIPQPISNTSQANLNKLLTDYTEMKKAILHVYWEEFQKDPVGLMSRVAQPASKKIDQNKLKPEMDEKGNLTTAGFACSQCGQPLFVYKLEQVSEKGKAYTNYFGRCNVAEHEKLIKLAQLKPEKDSDEAVTYSLGKFGQRALDFYSIHVTKESTHPVKPLAQIAGNRYASGPVGKALSDACMGTIASFLSKYQDIIIEHQKVVKGNQKRLESLRELAGKENLEYPSVTLPPQPHTKEGVDAYNEVIARVRMWVNLNLWQKLKLSRDDAKPLLRLKGFPSFPLVERQANEVDWWDMVCNVKKLINEKKEDGKVFWQNLAGYKRQEALRPYLSSEEDVRKKGKKFARYQLGDLLLHLEKKHGEDWGKVYDEAWERIDKKVEGLSKHIKLEEERRSEDAQSKAALTDWLRAKASFVIEGLKEADKDEFCRCELKLQKWYGDLRGKPFAIEAENSILDISGFSKQYNCAFIWQKDGVKKLNLYLIINYFKGGKLRFKKIKPEAFEANRFYTVINKKSGEIVPMEVNFNFDDPNLIILPLAFGKRQGREFIWNDLLSLETGSLKLANGRVIEKTLYNRRTRQDEPALFVALTFERREVLDSSNIKPMNLIGVDRGENIPAVIALTDPEGCPLSRFKDSLGNPTHILRIGESYKEKQRTIQAKKEVEQRRAGGYSRKYASKAKNLADDMVRNTARDLLYYAVTQDAMLIFENLSRGFGRQGKRTFMAERQYTRMEDWLTAKLAYEGLPSKTYLSKTLAQYTSKTCSNCGFTITSADYDRVLEKLKKTATGWMTTINGKELKVEGQITYYNRYKRQNVVKDLSVELDRLSEESVNNDISSWTKGRSGEALSLLKKRFSHRPVQEKFVCLNCGFETHADEQAALNIARSWLFLRSQEYKKYQTNKTTGNTDKRAFVETWQSFYRKKLKEVWKPAV

SEQ ID NO: 34274 - protein, 978 aa, synthetic construct
  REGION 1..978: note = engineered CasX variant
QEIKRINKIRRRLVKDSNTKKAGKTGPMKTLLVRVMTPDLRERLENLRKKPENIPQPISNTSQANLNKLLTDYTEMKKAILHVYWEEFQKDPVGLMSRVAQPASKKIDQNKLKPEMDEKGNLTTAGFACSQCGQPLFVYKLEQVSEKGKAYTNYFGRCNVAEHEKLILLAQLKPEKDSDEAVTYSLGKFGQRALDFYSIHVTKESTHPVKPLAQIAGNRYASPVGKALSDACMGTIASFLSKYQDIIIEHQKVVKGNQKRLESLRELAGKENLEYPSVTLPPQPHTKEGVDAYNEVIARVRMWVNLNLWQKLKLSRDDAKPLLRLKGFPSFPLVERQANEVDWWDMVCNVKKLINEKKEDGKVFWQNLAGYKRQEALRPYLSSEEDVRKKGKKFARYQLGDLLLHLEKKHGEDWGKVYDEAWERIDKKVEGLSKHIKLEEERRSEDAQSKAALTDWLRAKASFVIEGLKEADKDEFCRCELKLQKWYGDLRGKPFAIEAENSILDISGFSKQYNCAFIWQKDGVKKLNLYLIINYFKGGKLRFKKIKPEAFEANRFYTVINKKSGEIVPMEVNFNFDDPNLIILPLAFGKRQGREFIWNDLLSLETGSLKLANGRVIEKTLYNRRTRQDEPALFVALTFERREVLDSSNIKPMNLIGVDRGENIPAVIALTDPEGCPLSRFKDSLGNPTHILRIGESYKEKQRTIQAKKEVEQRRAGGYSRKYASKAKNLADDMVRNTARDLLYYAVTQDAMLIFENLSRGFGRQGKRTFMAERQYTRMEDWLTAKLAYEGLPSKTYLSKTLAQYTSKTCSNCGFTITSADYDRVLEKLKKTATGWMTTINGKELKVEGQITYYNRYKRQNVVKDLSVELDRLSEESVNNDISSWTKGRSGEALSLLKKRFSHRPVQEKFVCLNCGFETHADEQAALNIARSWLFLRSQEYKKYQTNKTTGNTDKRAFVETWQSFYRKKLKEVWKPAV

SEQ ID NO: 34275 - protein, 978 aa, synthetic construct
  REGION 1..978: note = engineered CasX variant
QEIKRINKIRRRLVKDSNTKKAGKTGPMKTLLVRVMTPDLRERLENLRKKPENIPQPISNTSQANLNKLLTDYTEMKKAILHVYWEEFQKDPVGLMSRVAQPASKKIDQNKLKPEMDEKGNLTTAGFACSQCGQPLFVYKLEQVSEKGKAYTNYFGRCNVAEHEKLILLAQLKPEKDSDEAVTYSLGKFGQRALDFYSIHVTKESTHPVKPLAQIAGNRYASYPVGKALSDACMGTIASFLSKYQDIIIEHQKVVKGNQKRLESLRELAGKENLEYPSVTLPPQPHTKEGVDAYNEVIARVRMWVNLNLWQKLKLSRDDAKPLLRLKGFPSFPLVERQANEVDWWDMVCNVKKLINEKKEDGKVFWQNLAGYKRQEALRPYLSSEEDRKKGKKFARYQLGDLLLHLEKKHGEDWGKVYDEAWERIDKKVEGLSKHIKLEEERRSEDAQSKAALTDWLRAKASFVIEGLKEADKDEFCRCELKLQKWYGDLRGKPFAIEAENSILDISGFSKQYNCAFIWQKDGVKKLNLYLIINYFKGGKLRFKKIKPEAFEANRFYTVINKKSGEIVPMEVNFNFDDPNLIILPLAFGKRQGREFIWNDLLSLETGSLKLANGRVIEKTLYNRRTRQDEPALFVALTFERREVLDSSNIKPMNLIGVDRGENIPAVIALTDPEGCPLSRFKDSLGNPTHILRIGESYKEKQRTIQAKKEVEQRRAGGYSRKYASKAKNLADDMVRNTARDLLYYAVTQDAMLIFENLSRGFGRQGKRTFMAERQYTRMEDWLTAKLAYEGLPSKTYLSKTLAQYTSKTCSNCGFTITSADYDRMLEKLKKTATGWMTTINGKELKVEGQITYYNRYKRQNVVKDLSVELDRLSEESVNNDISSWTKGRSGEALSLLKKRFSHRPVQEKFVCLNCGFETHADEQAALNIARSWLFLRSQEYKKYQTNKTTGNTDKRAFVETWQSFYRKKLKEVWKPAV

SEQ ID NO: 34276 - protein, 978 aa, synthetic construct
  REGION 1..978: note = engineered CasX variant
QEIKRINKIRRRLVKDSNTKKAGKTGPMKTLLVRVMTPDLRERLENLRKKPENIPQPISNTSQANLNKLLTDYTEMKKAILHVYWEEFQKDPVGLMSRVAQPASKKIDQNKLKPEMDEKGNLTTAGFACSQCGQPLFVYKLEQVSEKGKAYTNYFGRCNVAEHEKLILLAQLKPEKDSDEAVTYSLGKFGQRALDFYSIHVTKESTHPVKPLAQIAGNRYASHPVGKALSDACMGTIASFLSKYQDIIIEHQKVVKGNQKRLESLRELAGKENLEYPSVTLPPQPHTKEGVDAYNEVIARVRMWVNLNLWQKLKLSRDDAKPLLRLKGFPSFPLVERQANEVDWWDMVCNVKKLINEKKEDGKVFWQNLAGYKRQEALRPYLSSEEDRKKGKKFARYQLGDLLLHLEKKHGEDWGKVYDEAWERIDKKVEGLSKHIKLEEERRSEDAQSKAALTDWLRAKASFVIEGLKEADKDEFCRCELKLQKWYGDLRGKPFAIEAENSILDISGFSKQYNCAFIWQKDGVKKLNLYLIINYFKGGKLRFKKIKPEAFEANRFYTVINKKSGEIVPMEVNFNFDDPNLIILPLAFGKRQGREFIWNDLLSLETGSLKLANGRVIEKTLYNRRTRQDEPALFVALTFERREVLDSSNIKPMNLIGVDRGENIPAVIALTDPEGCPLSRFKDSLGNPTHILRIGESYKEKQRTIQAKKEVEQRRAGGYSRKYASKAKNLADDMVRNTARDLLYYAVTQDAMLIFENLSRGFGRQGKRTFMAERQYTRMEDWLTAKLAYEGLPSKTYLSKTLAQYTSKTCSNCGFTITSADYDRMLEKLKKTATGWMTTINGKELKVEGQITYYNRYKRQNVVKDLSVELDRLSEESVNNDISSWTKGRSGEALSLLKKRFSHRPVQEKFVCLNCGFETHADEQAALNIARSWLFLRSQEYKKYQTNKTTGNTDKRAFVETWQSFYRKKLKEVWKPAV

SEQ ID NO: 34277 - protein, 978 aa, synthetic construct
  REGION 1..978: note = engineered CasX variant
QEIKRINKIRRRLVKDSNTKKAGKTGPMKTLLVRVMTPDLRERLENLRKKPENIPQPISNTSQANLNKLLTDYTEMKKAILHVYWEEFQKDPVGLMSRVAQPASKKIDQNKLKPEMDEKGNLTTAGFACSQCGQPLFVYKLEQVSEKGKAYTNYFGRCNVAEHEKLILLAQLKPEKDSDEAVTYSLGKFGQRALDFYSIHVTKESTHPVKPLAQIAGNRYASSPVGKALSDACMGTIASFLSKYQDIIIEHQKVVKGNQKRLESLRELAGKENLEYPSVTLPPQPHTKEGVDAYNEVIARVRMWVNLNLWQKLKLSRDDAKPLLRLKGFPSFPLVERQANEVDWWDMVCNVKKLINEKKEDGKVFWQNLAGYKRQEALRPYLSSEEDRKKGKKFARYQLGDLLLHLEKKHGEDWGKVYDEAWERIDKKVEGLSKHIKLEEERRSEDAQSKAALTDWLRAKASFVIEGLKEADKDEFCRCELKLQKWYGDLRGKPFAIEAENSILDISGFSKQYNCAFIWQKDGVKKLNLYLIINYFKGGKLRFKKIKPEAFEANRFYTVINKKSGEIVPMEVNFNFDDPNLIILPLAFGKRQGREFIWNDLLSLETGSLKLANGRVIEKTLYNRRTRQDEPALFVALTFERREVLDSSNIKPMNLIGVDRGENIPAVIALTDPEGCPLSRFKDSLGNPTHILRIGESYKEKQRTIQAKKEVEQRRAGGYSRKYASKAKNLADDMVRNTARDLLYYAVTQDAMLIFENLSRGFGRQGKRTFMAERQYTRMEDWLTAKLAYEGLPSKTYLSKTLAQYTSKTCSNCGFTITSADYDRMLEKLKKTATGWMTTINGKELKVEGQITYYNRYKRQNVVKDLSVELDRLSEESVNNDISSWTKGRSGEALSLLKKRFSHRPVQEKFVCLNCGFETHADEQAALNIARSWLFLRSQEYKKYQTNKTTGNTDKRAFVETWQSFYRKKLKEVWKPAV

SEQ ID NO: 34278 - protein, 978 aa, synthetic construct
  REGION 1..978: note = engineered CasX variant
QEIKRINKIRRRLVKDSNTKKAGKTGPMKTLLVRVMTPDLRERLENLRKKPENIPQPISNTSQANLNKLLTDYTEMKKAILHVYWEEFQKDPVGLMSRVAQPASKKIDQNKLKPEMDEKGNLTTAGFACSQCGQPLFVYKLEQVSEKGKAYTNYFGRCNVAEHEKLILLAQLKPEKDSDEAVTYSLGKFGQRALDFYSIHVTKESTHPVKPLAQIAGNRYASTPVGKALSDACMGTIASFLSKYQDIIIEHQKVVKGNQKRLESLRELAGKENLEYPSVTLPPQPHTKEGVDAYNEVIARVRMWVNLNLWQKLKLSRDDAKPLLRLKGFPSFPLVERQANEVDWWDMVCNVKKLINEKKEDGKVFWQNLAGYKRQEALRPYLSSEEDRKKGKKFARYQLGDLLLHLEKKHGEDWGKVYDEAWERIDKKVEGLSKHIKLEEERRSEDAQSKAALTDWLRAKASFVIEGLKEADKDEFCRCELKLQKWYGDLRGKPFAIEAENSILDISGFSKQYNCAFIWQKDGVKKLNLYLIINYFKGGKLRFKKIKPEAFEANRFYTVINKKSGEIVPMEVNFNFDDPNLIILPLAFGKRQGREFIWNDLLSLETGSLKLANGRVIEKTLYNRRTRQDEPALFVALTFERREVLDSSNIKPMNLIGVDRGENIPAVIALTDPEGCPLSRFKDSLGNPTHILRIGESYKEKQRTIQAKKEVEQRRAGGYSRKYASKAKNLADDMVRNTARDLLYYAVTQDAMLIFENLSRGFGRQGKRTFMAERQYTRMEDWLTAKLAYEGLPSKTYLSKTLAQYTSKTCSNCGFTITSADYDRMLEKLKKTATGWMTTINGKELKVEGQITYYNRYKRQNVVKDLSVELDRLSEESVNNDISSWTKGRSGEALSLLKKRFSHRPVQEKFVCLNCGFETHADEQAALNIARSWLFLRSQEYKKYQTNKTTGNTDKRAFVETWQSFYRKKLKEVWKPAV

SEQ ID NO: 34279 - protein, 978 aa, synthetic construct
  REGION 1..978: note = engineered CasX variant
QEIKRINKIRRRLVKDSNTKKAGKTGPMKTLLVRVMTPDLRERLENLRKKPENIPQPISNTSQANLNKLLTDYTEMKKAILHVYWEEFQKDPVGLMSRVAQPASKKIDQNKLKPEMDEKGNLTTAGFACSQCGQPLFVYKLEQVSEKGKAYTNYFGRCNVAEHEKLILLAQLKPEKDSDEAVTYSLGKFGQRALDFYSIHVTKESTHPVKPLAQIAGNRYASAPVGKALSDACMGTIASFLSKYQDIIIEHQKVVKGNQKRLESLRELAGKENLEYPSVTLPPQPHTKEGVDAYNEVIARVRMWVNLNLWQKLKLSRDDAKPLLRLKGFPSFPLVERQANEVDWWDMVCNVKKLINEKKEDGKVFWQNLAGYKRQEALRPYLSSEEDRKKGKKFARYQLGDLLLHLEKKHGEDWGKVYDEAWERIDKKVEGLSKHIKLEEERRSEDAQSKAALTDWLRAKASFVIEGLKEADKDEFCRCELKLQKWYGDLRGKPFAIEAENSILDISGFSKQYNCAFIWQKDGVKKLNLYLIINYFKGGKLRFKKIKPEAFEANRFYTVINKKSGEIVPMEVNFNFDDPNLIILPLAFGKRQGREFIWNDLLSLETGSLKLANGRVIEKTLYNRRTRQDEPALFVALTFERREVLDSSNIKPMNLIGVDRGENIPAVIALTDPEGCPLSRFKDSLGNPTHILRIGESYKEKQRTIQAKKEVEQRRAGGYSRKYASKAKNLADDMVRNTARDLLYYAVTQDAMLIFENLSRGFGRQGKRTFMAERQYTRMEDWLTAKLAYEGLPSKTYLSKTLAQYTSKTCSNCGFTITSADYDRMLEKLKKTATGWMTTINGKELKVEGQITYYNRYKRQNVVKDLSVELDRLSEESVNNDISSWTKGRSGEALSLLKKRFSHRPVQEKFVCLNCGFETHADEQAALNIARSWLFLRSQEYKKYQTNKTTGNTDKRAFVETWQSFYRKKLKEVWKPAV

SEQ ID NO: 34280 - protein, 978 aa, synthetic construct
  REGION 1..978: note = engineered CasX variant
QEIKRINKIRRRLVKDSNTKKAGKTGPMKTLLVRVMTPDLRERLENLRKKPENIPQPISNTSQANLNKLLTDYTEMKKAILHVYWEEFQKDPVGLMSRVAQPASKKIDQNKLKPEMDEKGNLTTAGFACSQCGQPLFVYKLEQVSEKGKAYTNYFGRCNVAEHEKLILLAQLKPEKDSDEAVTYSLGKFGQRALDFYSIHVTKESTHPVKPLAQIAGNRYASVPVGKALSDACMGTIASFLSKYQDIIIEHQKVVKGNQKRLESLRELAGKENLEYPSVTLPPQPHTKEGVDAYNEVIARVRMWVNLNLWQKLKLSRDDAKPLLRLKGFPSFPLVERQANEVDWWDMVCNVKKLINEKKEDGKVFWQNLAGYKRQEALRPYLSSEEDRKKGKKFARYQLGDLLLHLEKKHGEDWGKVYDEAWERIDKKVEGLSKHIKLEEERRSEDAQSKAALTDWLRAKASFVIEGLKEADKDEFCRCELKLQKWYGDLRGKPFAIEAENSILDISGFSKQYNCAFIWQKDGVKKLNLYLIINYFKGGKLRFKKIKPEAFEANRFYTVINKKSGEIVPMEVNFNFDDPNLIILPLAFGKRQGREFIWNDLLSLETGSLKLANGRVIEKTLYNRRTRQDEPALFVALTFERREVLDSSNIKPMNLIGVDRGENIPAVIALTDPEGCPLSRFKDSLGNPTHILRIGESYKEKQRTIQAKKEVEQRRAGGYSRKYASKAKNLADDMVRNTARDLLYYAVTQDAMLIFENLSRGFGRQGKRTFMAERQYTRMEDWLTAKLAYEGLPSKTYLSKTLAQYTSKTCSNCGFTITSADYDRMLEKLKKTATGWMTTINGKELKVEGQITYYNRYKRQNVVKDLSVELDRLSEESVNNDISSWTKGRSGEALSLLKKRFSHRPVQEKFVCLNCGFETHADEQAALNIARSWLFLRSQEYKKYQTNKTTGNTDKRAFVETWQSFYRKKLKEVWKPAV

SEQ ID NO: 34281 - protein, 978 aa, synthetic construct
  REGION 1..978: note = engineered CasX variant
QEIKRINKIRRRLVKDSNTKKAGKTGPMKTLLVRVMTPDLRERLENLRKKPENIPQPISNTSQANLNKLLTDYTEMKKAILHVYWEEFQKDPVGLMSRVAQPASKKIDQNKLKPEMDEKGNLTTAGFACSQCGQPLFVYKLEQVSEKGKAYTNYFGRCNVAEHEKLIKLAQLKPEKDSDEAVTYSLGKFGQRALDFYSIHVTKESTHPVKPLAQIAGNRYASGPVGKALSDACMGTIASFLSKYQDIIIEHQKVVKGNQKRLESLRELAGKENLEYPSVTLPPQPHTKEGVDAYNEVIARVRMWVNLNLWQKLKLSRDDAKPLLRLKGFPSFPLVERQANEVDWWDMVCNVKKLINEKKEDGKVFWQNLAGYKRQEALRPYLSSEEDRKKGKKFARYQLGDLLLHLEKKHGEDWGKVYDEAWERIDKKVEGLSKHIKLEEERRSEDAQSKAALTDWLRAKASFVIEGLKEADKDEFCRCELKLQKWYGDLRGKPFAIEAENSILDISGFSKQYNCAFIWQKDGVKKLNLYLIINYFKGGKLRFKKIKPEAFEANRFYTVINKKSGEIVPMEVNFNFDDPNLIILPLAFGKRQGREFIWNDLLSLETGSLKLANGRVIEKTLYNRRTRQDEPALFVALTFERREVLDSSNIKPMNLIGVDRGENIPAVIALTDPEGCPLSRFKDSLGNPTHILRIGESYKEKQRTIQAKKEVEQRRAGGYSRKYASKAKNLADDMVRNTARDLLYYAVTQDAMLIFENLSRGFGRQGKRTFMAERQYTRMEDWLTAKLAYEGLPSKTYLSKTLAQYTSKTCSNCGFTITSADYDRMLEKLKKTATGWMTTINGKELKVEGQITYYNRYKRQNVVKDLSVELDRLSEESVNNDISSWTKGRSGEALSLLKKRFSHRPVQEKFVCLNCGFETHADEQAALNIARSWLFLRSQEYKKYQTNKTTGNTDKRAFVETWQSFYRKKLKEVWKPAV

SEQ ID NO: 34282 - protein, 977 aa, synthetic construct
  REGION 1..977: note = engineered CasX variant
QEIKRINKIRRRLVKDSNTKKAGKTGPMKTLLVRVMTPDLRERLENLRKKPENIPQPISNTSQANLNKLLTDYTEMKKAILHVYWEEFQKDPVGLMSRVAQPASKKIDQNKLKPEMDEKGNLTTAGFACSQCGQPLFVYKLEQVSEKGKAYTNYFGRCNVAEHEKLILLAQLKPEKDSDEAVTYSLGKFGQRALDFYSIHVTKESTHPVKPLAQIAGNRYASPVGKALSDACMGTIASFLSKYQDIIIEHQKVVKGNQKRLESLRELAGKENLEYPSVTLPPQPHTKEGVDAYNEVIARVRMWVNLNLWQKLKLSRDDAKPLLRLKGFPSFPLVERQANEVDWWDMVCNVKKLINEKKEDGKVFWQNLAGYKRQEALRPYLSSEEDRKKGKKFARYQLGDLLLHLEKKHGEDWGKVYDEAWERIDKKVEGLSKHIKLEEERRSEDAQSKAALTDWLRAKASFVIEGLKEADKDEFCRCELKLQKWYGDLRGKPFAIEAENSILDISGFSKQYNCAFIWQKDGVKKLNLYLIINYFKGGKLRFKKIKPEAFEANRFYTVINKKSGEIVPMEVNFNFDDPNLIILPLAFGKRQGREFIWNDLLSLETGSLKLANGRVIEKTLYNRRTRQDEPALFVALTFERREVLDSSNIKPMNLIGVDRGENIPAVIALTDPEGCPLSRFKDSLGNPTHILRIGESYKEKQRTIQAKKEVEQRRAGGYSRKYASKAKNLADDMVRNTARDLLYYAVTQDAMLIFENLSRGFGRQGKRTFMAERQYTRMEDWLTAKLAYEGLPSKTYLSKTLAQYTSKTCSNCGFTITSADYDRMLEKLKKTATGWMTTINGKELKVEGQITYYNRYKRQNVVKDLSVELDRLSEESVNNDISSWTKGRSGEALSLLKKRFSHRPVQEKFVCLNCGFETHADEQAALNIARSWLFLRSQEYKKYQTNKTTGNTDKRAFVETWQSFYRKKLKEVWKPAV

SEQ ID NO: 34283 - protein, 978 aa, synthetic construct
  REGION 1..978: note = engineered CasX variant
QEIKRINKIRRRLVKDSNTKKAGKTGPMKTLLVRVMTPDLRERLENLRKKPENIPQPISNTSQANLNKLLTDYTEMKKAILHVYWEEFQKDPVGLMSRVAQPASKKIDQNKLKPEMDEKGNLTTAGFACSQCGQPLFVYKLEQVSEKGKAYTNYFGRCNVAEHEKLILLAQLKPEKDSDEAVTYSLGKFGQRALDFYSIHVTKESTHPVKPLAQIAGNRYASYPVGKALSDACMGTIASFLSKYQDIIIEHQKVVKGNQKRLESLRELAGKENLEYPSVTLPPQPHTKEGVDAYNEVIARVRMWVNLNLWQKLKLSRDDAKPLLRLKGFPSFPLVERQANEVDWWDMVCNVKKLINEKKEDGKVFWQNLAGYKRQEALRPYLSSEEDRKKGKKFARYQLGDLLLHLEKKHGEDWGKVYDEAWERIDKKVEGLSKHIKLEEERRSEDAQSKAALTDWLRAKASFVIEGLKEADKDEFCRCELKLQKWYGDLRGKPFAIEAENSILDISGFSKQYNCAFIWQKDGVKKLNLYLIINYFKGGKLRFKKIKPEAFEANRFYTVINKKSGEIVPMEVNFNFDDPNLIILPLAFGKRQGREFIWNDLLSLETGSLKLANGRVIEKTLYNRRTRQDEPALFVALTFERREVLDSSNIKPMNLIGVDRGENIPAVIALTDPEGCPLSRFKDSLGNPTHILRIGESYKEKQRTIQAKKEVEQRRAGGYSRKYASKAKNLADDMVRNTARDLLYYAVTQDAMLIFENLSRGFGRQGKRTFMAERQYTRMEDWLTAKLAYEGLPSKTYLSKTLAQYTSKTCSNCGFTITSADYDRVLEKLKKTATGWMTTINGKELKVEGQITYYNRYKRQNVVKDLSVELDRLSEESVNNDISSWTKGRQGEALSLLKKRFSHRPVQEKFVCLNCGFETHADEQAALNIARSWLFLRSQEYKKYQTNKTTGNTDKRAFVETWQSFYRKKLKEVWKPAV

SEQ ID NO: 34284 - protein, 978 aa, synthetic construct
  REGION 1..978: note = engineered CasX variant
QEIKRINKIRRRLVKDSNTKKAGKTGPMKTLLVRVMTPDLRERLENLRKKPENIPQPISNTSQANLNKLLTDYTEMKKAILHVYWEEFQKDPVGLMSRVAQPASKKIDQNKLKPEMDEKGNLTTAGFACSQCGQPLFVYKLEQVSEKGKAYTNYFGRCNVAEHEKLILLAQLKPEKDSDEAVTYSLGKFGQRALDFYSIHVTKESTHPVKPLAQIAGNRYASHPVGKALSDACMGTIASFLSKYQDIIIEHQKVVKGNQKRLESLRELAGKENLEYPSVTLPPQPHTKEGVDAYNEVIARVRMWVNLNLWQKLKLSRDDAKPLLRLKGFPSFPLVERQANEVDWWDMVCNVKKLINEKKEDGKVFWQNLAGYKRQEALRPYLSSEEDRKKGKKFARYQLGDLLLHLEKKHGEDWGKVYDEAWERIDKKVEGLSKHIKLEEERRSEDAQSKAALTDWLRAKASFVIEGLKEADKDEFCRCELKLQKWYGDLRGKPFAIEAENSILDISGFSKQYNCAFIWQKDGVKKLNLYLIINYFKGGKLRFKKIKPEAFEANRFYTVINKKSGEIVPMEVNFNFDDPNLIILPLAFGKRQGREFIWNDLLSLETGSLKLANGRVIEKTLYNRRTRQDEPALFVALTFERREVLDSSNIKPMNLIGVDRGENIPAVIALTDPEGCPLSRFKDSLGNPTHILRIGESYKEKQRTIQAKKEVEQRRAGGYSRKYASKAKNLADDMVRNTARDLLYYAVTQDAMLIFENLSRGFGRQGKRTFMAERQYTRMEDWLTAKLAYEGLPSKTYLSKTLAQYTSKTCSNCGFTITSADYDRVLEKLKKTATGWMTTINGKELKVEGQITYYNRYKRQNVVKDLSVELDRLSEESVNNDISSWTKGRQGEALSLLKKRFSHRPVQEKFVCLNCGFETHADEQAALNIARSWLFLRSQEYKKYQTNKTTGNTDKRAFVETWQSFYRKKLKEVWKPAV

SEQ ID NO: 34285 - protein, 978 aa, synthetic construct
  REGION 1..978: note = engineered CasX variant
QEIKRINKIRRRLVKDSNTKKAGKTGPMKTLLVRVMTPDLRERLENLRKKPENIPQPISNTSQANLNKLLTDYTEMKKAILHVYWEEFQKDPVGLMSRVAQPASKKIDQNKLKPEMDEKGNLTTAGFACSQCGQPLFVYKLEQVSEKGKAYTNYFGRCNVAEHEKLILLAQLKPEKDSDEAVTYSLGKFGQRALDFYSIHVTKESTHPVKPLAQIAGNRYASSPVGKALSDACMGTIASFLSKYQDIIIEHQKVVKGNQKRLESLRELAGKENLEYPSVTLPPQPHTKEGVDAYNEVIARVRMWVNLNLWQKLKLSRDDAKPLLRLKGFPSFPLVERQANEVDWWDMVCNVKKLINEKKEDGKVFWQNLAGYKRQEALRPYLSSEEDRKKGKKFARYQLGDLLLHLEKKHGEDWGKVYDEAWERIDKKVEGLSKHIKLEEERRSEDAQSKAALTDWLRAKASFVIEGLKEADKDEFCRCELKLQKWYGDLRGKPFAIEAENSILDISGFSKQYNCAFIWQKDGVKKLNLYLIINYFKGGKLRFKKIKPEAFEANRFYTVINKKSGEIVPMEVNFNFDDPNLIILPLAFGKRQGREFIWNDLLSLETGSLKLANGRVIEKTLYNRRTRQDEPALFVALTFERREVLDSSNIKPMNLIGVDRGENIPAVIALTDPEGCPLSRFKDSLGNPTHILRIGESYKEKQRTIQAKKEVEQRRAGGYSRKYASKAKNLADDMVRNTARDLLYYAVTQDAMLIFENLSRGFGRQGKRTFMAERQYTRMEDWLTAKLAYEGLPSKTYLSKTLAQYTSKTCSNCGFTITSADYDRVLEKLKKTATGWMTTINGKELKVEGQITYYNRYKRQNVVKDLSVELDRLSEESVNNDISSWTKGRQGEALSLLKKRFSHRPVQEKFVCLNCGFETHADEQAALNIARSWLFLRSQEYKKYQTNKTTGNTDKRAFVETWQSFYRKKLKEVWKPAV

SEQ ID NO: 34286 - protein, 978 aa, synthetic construct
  REGION 1..978: note = engineered CasX variant
QEIKRINKIRRRLVKDSNTKKAGKTGPMKTLLVRVMTPDLRERLENLRKKPENIPQPISNTSQANLNKLLTDYTEMKKAILHVYWEEFQKDPVGLMSRVAQPASKKIDQNKLKPEMDEKGNLTTAGFACSQCGQPLFVYKLEQVSEKGKAYTNYFGRCNVAEHEKLILLAQLKPEKDSDEAVTYSLGKFGQRALDFYSIHVTKESTHPVKPLAQIAGNRYASTPVGKALSDACMGTIASFLSKYQDIIIEHQKVVKGNQKRLESLRELAGKENLEYPSVTLPPQPHTKEGVDAYNEVIARVRMWVNLNLWQKLKLSRDDAKPLLRLKGFPSFPLVERQANEVDWWDMVCNVKKLINEKKEDGKVFWQNLAGYKRQEALRPYLSSEEDRKKGKKFARYQLGDLLLHLEKKHGEDWGKVYDEAWERIDKKVEGLSKHIKLEEERRSEDAQSKAALTDWLRAKASFVIEGLKEADKDEFCRCELKLQKWYGDLRGKPFAIEAENSILDISGFSKQYNCAFIWQKDGVKKLNLYLIINYFKGGKLRFKKIKPEAFEANRFYTVINKKSGEIVPMEVNFNFDDPNLIILPLAFGKRQGREFIWNDLLSLETGSLKLANGRVIEKTLYNRRTRQDEPALFVALTFERREVLDSSNIKPMNLIGVDRGENIPAVIALTDPEGCPLSRFKDSLGNPTHILRIGESYKEKQRTIQAKKEVEQRRAGGYSRKYASKAKNLADDMVRNTARDLLYYAVTQDAMLIFENLSRGFGRQGKRTFMAERQYTRMEDWLTAKLAYEGLPSKTYLSKTLAQYTSKTCSNCGFTITSADYDRVLEKLKKTATGWMTTINGKELKVEGQITYYNRYKRQNVVKDLSVELDRLSEESVNNDISSWTKGRQGEALSLLKKRFSHRPVQEKFVCLNCGFETHADEQAALNIARSWLFLRSQEYKKYQTNKTTGNTDKRAFVETWQSFYRKKLKEVWKPAV

SEQ ID NO: 34287 - protein, 978 aa, synthetic construct
  REGION 1..978: note = engineered CasX variant
QEIKRINKIRRRLVKDSNTKKAGKTGPMKTLLVRVMTPDLRERLENLRKKPENIPQPISNTSQANLNKLLTDYTEMKKAILHVYWEEFQKDPVGLMSRVAQPASKKIDQNKLKPEMDEKGNLTTAGFACSQCGQPLFVYKLEQVSEKGKAYTNYFGRCNVAEHEKLILLAQLKPEKDSDEAVTYSLGKFGQRALDFYSIHVTKESTHPVKPLAQIAGNRYASAPVGKALSDACMGTIASFLSKYQDIIIEHQKVVKGNQKRLESLRELAGKENLEYPSVTLPPQPHTKEGVDAYNEVIARVRMWVNLNLWQKLKLSRDDAKPLLRLKGFPSFPLVERQANEVDWWDMVCNVKKLINEKKEDGKVFWQNLAGYKRQEALRPYLSSEEDRKKGKKFARYQLGDLLLHLEKKHGEDWGKVYDEAWERIDKKVEGLSKHIKLEEERRSEDAQSKAALTDWLRAKASFVIEGLKEADKDEFCRCELKLQKWYGDLRGKPFAIEAENSILDISGFSKQYNCAFIWQKDGVKKLNLYLIINYFKGGKLRFKKIKPEAFEANRFYTVINKKSGEIVPMEVNFNFDDPNLIILPLAFGKRQGREFIWNDLLSLETGSLKLANGRVIEKTLYNRRTRQDEPALFVALTFERREVLDSSNIKPMNLIGVDRGENIPAVIALTDPEGCPLSRFKDSLGNPTHILRIGESYKEKQRTIQAKKEVEQRRAGGYSRKYASKAKNLADDMVRNTARDLLYYAVTQDAMLIFENLSRGFGRQGKRTFMAERQYTRMEDWLTAKLAYEGLPSKTYLSKTLAQYTSKTCSNCGFTITSADYDRVLEKLKKTATGWMTTINGKELKVEGQITYYNRYKRQNVVKDLSVELDRLSEESVNNDISSWTKGRQGEALSLLKKRFSHRPVQEKFVCLNCGFETHADEQAALNIARSWLFLRSQEYKKYQTNKTTGNTDKRAFVETWQSFYRKKLKEVWKPAV

SEQ ID NO: 34288 - protein, 978 aa, synthetic construct
  REGION 1..978: note = engineered CasX variant
QEIKRINKIRRRLVKDSNTKKAGKTGPMKTLLVRVMTPDLRERLENLRKKPENIPQPISNTSQANLNKLLTDYTEMKKAILHVYWEEFQKDPVGLMSRVAQPASKKIDQNKLKPEMDEKGNLTTAGFACSQCGQPLFVYKLEQVSEKGKAYTNYFGRCNVAEHEKLILLAQLKPEKDSDEAVTYSLGKFGQRALDFYSIHVTKESTHPVKPLAQIAGNRYASVPVGKALSDACMGTIASFLSKYQDIIIEHQKVVKGNQKRLESLRELAGKENLEYPSVTLPPQPHTKEGVDAYNEVIARVRMWVNLNLWQKLKLSRDDAKPLLRLKGFPSFPLVERQANEVDWWDMVCNVKKLINEKKEDGKVFWQNLAGYKRQEALRPYLSSEEDRKKGKKFARYQLGDLLLHLEKKHGEDWGKVYDEAWERIDKKVEGLSKHIKLEEERRSEDAQSKAALTDWLRAKASFVIEGLKEADKDEFCRCELKLQKWYGDLRGKPFAIEAENSILDISGFSKQYNCAFIWQKDGVKKLNLYLIINYFKGGKLRFKKIKPEAFEANRFYTVINKKSGEIVPMEVNFNFDDPNLIILPLAFGKRQGREFIWNDLLSLETGSLKLANGRVIEKTLYNRRTRQDEPALFVALTFERREVLDSSNIKPMNLIGVDRGENIPAVIALTDPEGCPLSRFKDSLGNPTHILRIGESYKEKQRTIQAKKEVEQRRAGGYSRKYASKAKNLADDMVRNTARDLLYYAVTQDAMLIFENLSRGFGRQGKRTFMAERQYTRMEDWLTAKLAYEGLPSKTYLSKTLAQYTSKTCSNCGFTITSADYDRVLEKLKKTATGWMTTINGKELKVEGQITYYNRYKRQNVVKDLSVELDRLSEESVNNDISSWTKGRQGEALSLLKKRFSHRPVQEKFVCLNCGFETHADEQAALNIARSWLFLRSQEYKKYQTNKTTGNTDKRAFVETWQSFYRKKLKEVWKPAV

SEQ ID NO: 34289 - protein, 978 aa, synthetic construct
  REGION 1..978: note = engineered CasX variant
QEIKRINKIRRRLVKDSNTKKAGKTGPMKTLLVRVMTPDLRERLENLRKKPENIPQPISNTSQANLNKLLTDYTEMKKAILHVYWEEFQKDPVGLMSRVAQPASKKIDQNKLKPEMDEKGNLTTAGFACSQCGQPLFVYKLEQVSEKGKAYTNYFGRCNVAEHEKLIKLAQLKPEKDSDEAVTYSLGKFGQRALDFYSIHVTKESTHPVKPLAQIAGNRYASGPVGKALSDACMGTIASFLSKYQDIIIEHQKVVKGNQKRLESLRELAGKENLEYPSVTLPPQPHTKEGVDAYNEVIARVRMWVNLNLWQKLKLSRDDAKPLLRLKGFPSFPLVERQANEVDWWDMVCNVKKLINEKKEDGKVFWQNLAGYKRQEALRPYLSSEEDRKKGKKFARYQLGDLLLHLEKKHGEDWGKVYDEAWERIDKKVEGLSKHIKLEEERRSEDAQSKAALTDWLRAKASFVIEGLKEADKDEFCRCELKLQKWYGDLRGKPFAIEAENSILDISGFSKQYNCAFIWQKDGVKKLNLYLIINYFKGGKLRFKKIKPEAFEANRFYTVINKKSGEIVPMEVNFNFDDPNLIILPLAFGKRQGREFIWNDLLSLETGSLKLANGRVIEKTLYNRRTRQDEPALFVALTFERREVLDSSNIKPMNLIGVDRGENIPAVIALTDPEGCPLSRFKDSLGNPTHILRIGESYKEKQRTIQAKKEVEQRRAGGYSRKYASKAKNLADDMVRNTARDLLYYAVTQDAMLIFENLSRGFGRQGKRTFMAERQYTRMEDWLTAKLAYEGLPSKTYLSKTLAQYTSKTCSNCGFTITSADYDRVLEKLKKTATGWMTTINGKELKVEGQITYYNRYKRQNVVKDLSVELDRLSEESVNNDISSWTKGRQGEALSLLKKRFSHRPVQEKFVCLNCGFETHADEQAALNIARSWLFLRSQEYKKYQTNKTTGNTDKRAFVETWQSFYRKKLKEVWKPAV

SEQ ID NO: 34290 - protein, 977 aa, synthetic construct
  REGION 1..977: note = engineered CasX variant
QEIKRINKIRRRLVKDSNTKKAGKTGPMKTLLVRVMTPDLRERLENLRKKPENIPQPISNTSQANLNKLLTDYTEMKKAILHVYWEEFQKDPVGLMSRVAQPASKKIDQNKLKPEMDEKGNLTTAGFACSQCGQPLFVYKLEQVSEKGKAYTNYFGRCNVAEHEKLILLAQLKPEKDSDEAVTYSLGKFGQRALDFYSIHVTKESTHPVKPLAQIAGNRYASPVGKALSDACMGTIASFLSKYQDIIIEHQKVVKGNQKRLESLRELAGKENLEYPSVTLPPQPHTKEGVDAYNEVIARVRMWVNLNLWQKLKLSRDDAKPLLRLKGFPSFPLVERQANEVDWWDMVCNVKKLINEKKEDGKVFWQNLAGYKRQEALRPYLSSEEDRKKGKKFARYQLGDLLLHLEKKHGEDWGKVYDEAWERIDKKVEGLSKHIKLEEERRSEDAQSKAALTDWLRAKASFVIEGLKEADKDEFCRCELKLQKWYGDLRGKPFAIEAENSILDISGFSKQYNCAFIWQKDGVKKLNLYLIINYFKGGKLRFKKIKPEAFEANRFYTVINKKSGEIVPMEVNFNFDDPNLIILPLAFGKRQGREFIWNDLLSLETGSLKLANGRVIEKTLYNRRTRQDEPALFVALTFERREVLDSSNIKPMNLIGVDRGENIPAVIALTDPEGCPLSRFKDSLGNPTHILRIGESYKEKQRTIQAKKEVEQRRAGGYSRKYASKAKNLADDMVRNTARDLLYYAVTQDAMLIFENLSRGFGRQGKRTFMAERQYTRMEDWLTAKLAYEGLPSKTYLSKTLAQYTSKTCSNCGFTITSADYDRVLEKLKKTATGWMTTINGKELKVEGQITYYNRYKRQNVVKDLSVELDRLSEESVNNDISSWTKGRQGEALSLLKKRFSHRPVQEKFVCLNCGFETHADEQAALNIARSWLFLRSQEYKKYQTNKTTGNTDKRAFVETWQSFYRKKLKEVWKPAV

SEQ ID NO: 34291 - protein, 978 aa, synthetic construct
  REGION 1..978: note = engineered CasX variant
QEIKRINKIRRRLVKDSNTKKAGKTGPMKTLLVRVMTPDLRERLENLRKKPENIPQPISNTSQANLNKLLTDYTEMKKAILHVYWEEFQKDPVGLMSRVAQPASKKIDQNKLKPEMDEKGNLTTAGFACSQCGQPLFVYKLEQVSEKGKAYTNYFGRCNVAEHEKLILLAQLKPEKDSDEAVTYSLGKFGQRALDFYSIHVTKESTHPVKPLAQIAGNRYASYPVGKALSDACMGTIASFLSKYQDIIIEHQKVVKGNQKRLESLRELAGKENLEYPSVTLPPQPHTKEGVDAYNEVIARVRMWVNLNLWQKLKLSRDDAKPLLRLKGFPSFPLVERQANEVDWWDMVCNVKKLINEKKEDGKVFWQNLAGYKRQEALRPYLSSEEDRKKGKKFARYQLGDLLLHLEKKHGEDWGKVYDEAWERIDKKVEGLSKHIKLEEERRSEDAQSKAALTDWLRAKASFVIEGLKEADKDEFCRCELKLQKWYGDLRGKPFAIEAENSILDISGFSKQYNCAFIWQKDGVKKLNLYLIINYFKGGKLRFKKIKPEAFEANRFYTVINKKSGEIVPMEVNFNFDDPNLIILPLAFGKRQGREFIWNDLLSLETGSLKLANGRVIEKTLYNRRTRQDEPALFVALTFERREVLDSSNIKPMNLIGVDRGENIPAVIALTDPEGCPLSRFKDSLGNPTHILRIGESYKEKQRTIQAKKEVEQRRAGGYSRKYASKAKNLADDMVRNTARDLLYYAVTQDAMLIFENLSRGFGRQGKRTFMAERQYTRMEDWLTAKLAYEGLPSKTYLSKTLAQYTSKTCSNCGFTITSADYDRVLEKLKKTATGWMTTINGKELKVEGQITYYNRYKRQNVVKDLSVELDRLSEESVNNDISSWTKGRSGEALSLLKKRFSHRPVQEKFVCLNCEFETHADEQAALNIARSWLFLRSQEYKKYQTNKTTGNTDKRAFVETWQSFYRKKLKEVWKPAV

SEQ ID NO: 34292 - protein, 978 aa, synthetic construct
  REGION 1..978: note = engineered CasX variant
QEIKRINKIRRRLVKDSNTKKAGKTGPMKTLLVRVMTPDLRERLENLRKKPENIPQPISNTSQANLNKLLTDYTEMKKAILHVYWEEFQKDPVGLMSRVAQPASKKIDQNKLKPEMDEKGNLTTAGFACSQCGQPLFVYKLEQVSEKGKAYTNYFGRCNVAEHEKLILLAQLKPEKDSDEAVTYSLGKFGQRALDFYSIHVTKESTHPVKPLAQIAGNRYASHPVGKALSDACMGTIASFLSKYQDIIIEHQKVVKGNQKRLESLRELAGKENLEYPSVTLPPQPHTKEGVDAYNEVIARVRMWVNLNLWQKLKLSRDDAKPLLRLKGFPSFPLVERQANEVDWWDMVCNVKKLINEKKEDGKVFWQNLAGYKRQEALRPYLSSEEDRKKGKKFARYQLGDLLLHLEKKHGEDWGKVYDEAWERIDKKVEGLSKHIKLEEERRSEDAQSKAALTDWLRAKASFVIEGLKEADKDEFCRCELKLQKWYGDLRGKPFAIEAENSILDISGFSKQYNCAFIWQKDGVKKLNLYLIINYFKGGKLRFKKIKPEAFEANRFYTVINKKSGEIVPMEVNFNFDDPNLIILPLAFGKRQGREFIWNDLLSLETGSLKLANGRVIEKTLYNRRTRQDEPALFVALTFERREVLDSSNIKPMNLIGVDRGENIPAVIALTDPEGCPLSRFKDSLGNPTHILRIGESYKEKQRTIQAKKEVEQRRAGGYSRKYASKAKNLADDMVRNTARDLLYYAVTQDAMLIFENLSRGFGRQGKRTFMAERQYTRMEDWLTAKLAYEGLPSKTYLSKTLAQYTSKTCSNCGFTITSADYDRVLEKLKKTATGWMTTINGKELKVEGQITYYNRYKRQNVVKDLSVELDRLSEESVNNDISSWTKGRSGEALSLLKKRFSHRPVQEKFVCLNCEFETHADEQAALNIARSWLFLRSQEYKKYQTNKTTGNTDKRAFVETWQSFYRKKLKEVWKPAV

SEQ ID NO: 34293 - protein, 978 aa, synthetic construct
  REGION 1..978: note = engineered CasX variant
QEIKRINKIRRRLVKDSNTKKAGKTGPMKTLLVRVMTPDLRERLENLRKKPENIPQPISNTSQANLNKLLTDYTEMKKAILHVYWEEFQKDPVGLMSRVAQPASKKIDQNKLKPEMDEKGNLTTAGFACSQCGQPLFVYKLEQVSEKGKAYTNYFGRCNVAEHEKLILLAQLKPEKDSDEAVTYSLGKFGQRALDFYSIHVTKESTHPVKPLAQIAGNRYASSPVGKALSDACMGTIASFLSKYQDIIIEHQKVVKGNQKRLESLRELAGKENLEYPSVTLPPQPHTKEGVDAYNEVIARVRMWVNLNLWQKLKLSRDDAKPLLRLKGFPSFPLVERQANEVDWWDMVCNVKKLINEKKEDGKVFWQNLAGYKRQEALRPYLSSEEDRKKGKKFARYQLGDLLLHLEKKHGEDWGKVYDEAWERIDKKVEGLSKHIKLEEERRSEDAQSKAALTDWLRAKASFVIEGLKEADKDEFCRCELKLQKWYGDLRGKPFAIEAENSILDISGFSKQYNCAFIWQKDGVKKLNLYLIINYFKGGKLRFKKIKPEAFEANRFYTVINKKSGEIVPMEVNFNFDDPNLIILPLAFGKRQGREFIWNDLLSLETGSLKLANGRVIEKTLYNRRTRQDEPALFVALTFERREVLDSSNIKPMNLIGVDRGENIPAVIALTDPEGCPLSRFKDSLGNPTHILRIGESYKEKQRTIQAKKEVEQRRAGGYSRKYASKAKNLADDMVRNTARDLLYYAVTQDAMLIFENLSRGFGRQGKRTFMAERQYTRMEDWLTAKLAYEGLPSKTYLSKTLAQYTSKTCSNCGFTITSADYDRVLEKLKKTATGWMTTINGKELKVEGQITYYNRYKRQNVVKDLSVELDRLSEESVNNDISSWTKGRSGEALSLLKKRFSHRPVQEKFVCLNCEFETHADEQAALNIARSWLFLRSQEYKKYQTNKTTGNTDKRAFVETWQSFYRKKLKEVWKPAV

SEQ ID NO: 34294 - protein, 978 aa, synthetic construct
  REGION 1..978: note = engineered CasX variant
QEIKRINKIRRRLVKDSNTKKAGKTGPMKTLLVRVMTPDLRERLENLRKKPENIPQPISNTSQANLNKLLTDYTEMKKAILHVYWEEFQKDPVGLMSRVAQPASKKIDQNKLKPEMDEKGNLTTAGFACSQCGQPLFVYKLEQVSEKGKAYTNYFGRCNVAEHEKLILLAQLKPEKDSDEAVTYSLGKFGQRALDFYSIHVTKESTHPVKPLAQIAGNRYASTPVGKALSDACMGTIASFLSKYQDIIIEHQKVVKGNQKRLESLRELAGKENLEYPSVTLPPQPHTKEGVDAYNEVIARVRMWVNLNLWQKLKLSRDDAKPLLRLKGFPSFPLVERQANEVDWWDMVCNVKKLINEKKEDGKVFWQNLAGYKRQEALRPYLSSEEDRKKGKKFARYQLGDLLLHLEKKHGEDWGKVYDEAWERIDKKVEGLSKHIKLEEERRSEDAQSKAALTDWLRAKASFVIEGLKEADKDEFCRCELKLQKWYGDLRGKPFAIEAENSILDISGFSKQYNCAFIWQKDGVKKLNLYLIINYFKGGKLRFKKIKPEAFEANRFYTVINKKSGEIVPMEVNFNFDDPNLIILPLAFGKRQGREFIWNDLLSLETGSLKLANGRVIEKTLYNRRTRQDEPALFVALTFERREVLDSSNIKPMNLIGVDRGENIPAVIALTDPEGCPLSRFKDSLGNPTHILRIGESYKEKQRTIQAKKEVEQRRAGGYSRKYASKAKNLADDMVRNTARDLLYYAVTQDAMLIFENLSRGFGRQGKRTFMAERQYTRMEDWLTAKLAYEGLPSKTYLSKTLAQYTSKTCSNCGFTITSADYDRVLEKLKKTATGWMTTINGKELKVEGQITYYNRYKRQNVVKDLSVELDRLSEESVNNDISSWTKGRSGEALSLLKKRFSHRPVQEKFVCLNCEFETHADEQAALNIARSWLFLRSQEYKKYQTNKTTGNTDKRAFVETWQSFYRKKLKEVWKPAV

SEQ ID NO: 34295 - protein, 978 aa, synthetic construct
  REGION 1..978: note = engineered CasX variant
QEIKRINKIRRRLVKDSNTKKAGKTGPMKTLLVRVMTPDLRERLENLRKKPENIPQPISNTSQANLNKLLTDYTEMKKAILHVYWEEFQKDPVGLMSRVAQPASKKIDQNKLKPEMDEKGNLTTAGFACSQCGQPLFVYKLEQVSEKGKAYTNYFGRCNVAEHEKLILLAQLKPEKDSDEAVTYSLGKFGQRALDFYSIHVTKESTHPVKPLAQIAGNRYASAPVGKALSDACMGTIASFLSKYQDIIIEHQKVVKGNQKRLESLRELAGKENLEYPSVTLPPQPHTKEGVDAYNEVIARVRMWVNLNLWQKLKLSRDDAKPLLRLKGFPSFPLVERQANEVDWWDMVCNVKKLINEKKEDGKVFWQNLAGYKRQEALRPYLSSEEDRKKGKKFARYQLGDLLLHLEKKHGEDWGKVYDEAWERIDKKVEGLSKHIKLEEERRSEDAQSKAALTDWLRAKASFVIEGLKEADKDEFCRCELKLQKWYGDLRGKPFAIEAENSILDISGFSKQYNCAFIWQKDGVKKLNLYLIINYFKGGKLRFKKIKPEAFEANRFYTVINKKSGEIVPMEVNFNFDDPNLIILPLAFGKRQGREFIWNDLLSLETGSLKLANGRVIEKTLYNRRTRQDEPALFVALTFERREVLDSSNIKPMNLIGVDRGENIPAVIALTDPEGCPLSRFKDSLGNPTHILRIGESYKEKQRTIQAKKEVEQRRAGGYSRKYASKAKNLADDMVRNTARDLLYYAVTQDAMLIFENLSRGFGRQGKRTFMAERQYTRMEDWLTAKLAYEGLPSKTYLSKTLAQYTSKTCSNCGFTITSADYDRVLEKLKKTATGWMTTINGKELKVEGQITYYNRYKRQNVVKDLSVELDRLSEESVNNDISSWTKGRSGEALSLLKKRFSHRPVQEKFVCLNCEFETHADEQAALNIARSWLFLRSQEYKKYQTNKTTGNTDKRAFVETWQSFYRKKLKEVWKPAV

SEQ ID NO: 34296 - protein, 978 aa, synthetic construct
  REGION 1..978: note = engineered CasX variant
QEIKRINKIRRRLVKDSNTKKAGKTGPMKTLLVRVMTPDLRERLENLRKKPENIPQPISNTSQANLNKLLTDYTEMKKAILHVYWEEFQKDPVGLMSRVAQPASKKIDQNKLKPEMDEKGNLTTAGFACSQCGQPLFVYKLEQVSEKGKAYTNYFGRCNVAEHEKLILLAQLKPEKDSDEAVTYSLGKFGQRALDFYSIHVTKESTHPVKPLAQIAGNRYASVPVGKALSDACMGTIASFLSKYQDIIIEHQKVVKGNQKRLESLRELAGKENLEYPSVTLPPQPHTKEGVDAYNEVIARVRMWVNLNLWQKLKLSRDDAKPLLRLKGFPSFPLVERQANEVDWWDMVCNVKKLINEKKEDGKVFWQNLAGYKRQEALRPYLSSEEDRKKGKKFARYQLGDLLLHLEKKHGEDWGKVYDEAWERIDKKVEGLSKHIKLEEERRSEDAQSKAALTDWLRAKASFVIEGLKEADKDEFCRCELKLQKWYGDLRGKPFAIEAENSILDISGFSKQYNCAFIWQKDGVKKLNLYLIINYFKGGKLRFKKIKPEAFEANRFYTVINKKSGEIVPMEVNFNFDDPNLIILPLAFGKRQGREFIWNDLLSLETGSLKLANGRVIEKTLYNRRTRQDEPALFVALTFERREVLDSSNIKPMNLIGVDRGENIPAVIALTDPEGCPLSRFKDSLGNPTHILRIGESYKEKQRTIQAKKEVEQRRAGGYSRKYASKAKNLADDMVRNTARDLLYYAVTQDAMLIFENLSRGFGRQGKRTFMAERQYTRMEDWLTAKLAYEGLPSKTYLSKTLAQYTSKTCSNCGFTITSADYDRVLEKLKKTATGWMTTINGKELKVEGQITYYNRYKRQNVVKDLSVELDRLSEESVNNDISSWTKGRSGEALSLLKKRFSHRPVQEKFVCLNCEFETHADEQAALNIARSWLFLRSQEYKKYQTNKTTGNTDKRAFVETWQSFYRKKLKEVWKPAV

SEQ ID NO: 34297 - protein, 978 aa, synthetic construct
  REGION 1..978: note = engineered CasX variant
QEIKRINKIRRRLVKDSNTKKAGKTGPMKTLLVRVMTPDLRERLENLRKKPENIPQPISNTSQANLNKLLTDYTEMKKAILHVYWEEFQKDPVGLMSRVAQPASKKIDQNKLKPEMDEKGNLTTAGFACSQCGQPLFVYKLEQVSEKGKAYTNYFGRCNVAEHEKLIKLAQLKPEKDSDEAVTYSLGKFGQRALDFYSIHVTKESTHPVKPLAQIAGNRYASGPVGKALSDACMGTIASFLSKYQDIIIEHQKVVKGNQKRLESLRELAGKENLEYPSVTLPPQPHTKEGVDAYNEVIARVRMWVNLNLWQKLKLSRDDAKPLLRLKGFPSFPLVERQANEVDWWDMVCNVKKLINEKKEDGKVFWQNLAGYKRQEALRPYLSSEEDRKKGKKFARYQLGDLLLHLEKKHGEDWGKVYDEAWERIDKKVEGLSKHIKLEEERRSEDAQSKAALTDWLRAKASFVIEGLKEADKDEFCRCELKLQKWYGDLRGKPFAIEAENSILDISGFSKQYNCAFIWQKDGVKKLNLYLIINYFKGGKLRFKKIKPEAFEANRFYTVINKKSGEIVPMEVNFNFDDPNLIILPLAFGKRQGREFIWNDLLSLETGSLKLANGRVIEKTLYNRRTRQDEPALFVALTFERREVLDSSNIKPMNLIGVDRGENIPAVIALTDPEGCPLSRFKDSLGNPTHILRIGESYKEKQRTIQAKKEVEQRRAGGYSRKYASKAKNLADDMVRNTARDLLYYAVTQDAMLIFENLSRGFGRQGKRTFMAERQYTRMEDWLTAKLAYEGLPSKTYLSKTLAQYTSKTCSNCGFTITSADYDRVLEKLKKTATGWMTTINGKELKVEGQITYYNRYKRQNVVKDLSVELDRLSEESVNNDISSWTKGRSGEALSLLKKRFSHRPVQEKFVCLNCEFETHADEQAALNIARSWLFLRSQEYKKYQTNKTTGNTDKRAFVETWQSFYRKKLKEVWKPAV

SEQ ID NO: 34298 - protein, 977 aa, synthetic construct
  REGION 1..977: note = engineered CasX variant
QEIKRINKIRRRLVKDSNTKKAGKTGPMKTLLVRVMTPDLRERLENLRKKPENIPQPISNTSQANLNKLLTDYTEMKKAILHVYWEEFQKDPVGLMSRVAQPASKKIDQNKLKPEMDEKGNLTTAGFACSQCGQPLFVYKLEQVSEKGKAYTNYFGRCNVAEHEKLILLAQLKPEKDSDEAVTYSLGKFGQRALDFYSIHVTKESTHPVKPLAQIAGNRYASPVGKALSDACMGTIASFLSKYQDIIIEHQKVVKGNQKRLESLRELAGKENLEYPSVTLPPQPHTKEGVDAYNEVIARVRMWVNLNLWQKLKLSRDDAKPLLRLKGFPSFPLVERQANEVDWWDMVCNVKKLINEKKEDGKVFWQNLAGYKRQEALRPYLSSEEDRKKGKKFARYQLGDLLLHLEKKHGEDWGKVYDEAWERIDKKVEGLSKHIKLEEERRSEDAQSKAALTDWLRAKASFVIEGLKEADKDEFCRCELKLQKWYGDLRGKPFAIEAENSILDISGFSKQYNCAFIWQKDGVKKLNLYLIINYFKGGKLRFKKIKPEAFEANRFYTVINKKSGEIVPMEVNFNFDDPNLIILPLAFGKRQGREFIWNDLLSLETGSLKLANGRVIEKTLYNRRTRQDEPALFVALTFERREVLDSSNIKPMNLIGVDRGENIPAVIALTDPEGCPLSRFKDSLGNPTHILRIGESYKEKQRTIQAKKEVEQRRAGGYSRKYASKAKNLADDMVRNTARDLLYYAVTQDAMLIFENLSRGFGRQGKRTFMAERQYTRMEDWLTAKLAYEGLPSKTYLSKTLAQYTSKTCSNCGFTITSADYDRVLEKLKKTATGWMTTINGKELKVEGQITYYNRYKRQNVVKDLSVELDRLSEESVNNDISSWTKGRSGEALSLLKKRFSHRPVQEKFVCLNCEFETHADEQAALNIARSWLFLRSQEYKKYQTNKTTGNTDKRAFVETWQSFYRKKLKEVWKPAV

SEQ ID NO: 34299 - protein, 979 aa, synthetic construct
  REGION 1..979: note = engineered CasX variant
QEIKRINKIRRRLVKDSNTKKAGKTGPMKTLLVRVMTPDLRERLENLRKKPENIPQPISNTSQANLNKLLTDYTEMKKAILHVYWEEFQKDPVGLMSRVAQPASKKIDQNKLKPEMDEKGNLTTAGFACSQCGQPLFVYKLEQVSEKGKAYTNYFGRCNVAEHEKLILLAQLKPEKDSDEAVTYSLGKFGQRALDFYSIHVTKESTHPVKPLAQIAGNRYASYPVGKALSDACMGTIASFLSKYQDIIIEHQKVVKGNQKRLESLRELAGKENLEYPSVTLPPQPHTKEGVDAYNEVIARVRMWVNLNLWQKLKLSRDDAKPLLRLKGFPSFPLVERQANEVDWWDMVCNVKKLINEKKEDGKVFWQNLAGYKRQEALRPYLSSEEDRKKGKKFARYQLGDLLLHLEKKHGEDWGKVYDEAWERIDKKVEGLSKHIKLEEERRSEDAQSKAALTDWLRAKASFVIEGLKEADKDEFCRCELKLQKWYGDLRGKPFAIEAENSILDISGFSKQYNCAFIWQKDGVKKLNLYLIINYFKGGKLRFKKIKPEAFEANRFYTVINKKSGEIVPMEVNFNFDDPNLIILPLAFGKRQGREFIWNDLLSLETGSLKLANGRVIEKTLYNRRTRQDEPALFVALTFERREVLDSSNIKPMNLIGVDRGENIPAVIALTDPEGCPLSRFKDSLGNPTHILRIGESYKEKQRTIQAKKEVEQRRAGGYSRKYASKAKNLADDMVRNTARDLLYYAVTQDAMLIFENLSRGFGRQGKRTFMAERQYTRMEDWLTAKLAYEGLPSKTYLSKTLAQYTSKTCSNCGFTITSADYDRVLEKLKKTATGWMTTINGKELKVEGQITYYNRYKRQNVVKDLSVELDRLSEESVNNDISSWTKGRSGEALSLLKKRFSHRPVQEKFVCLNCGFETHADEQAALNIARSWLFLRSQEYKKYQTNKTSTGNTDKRAFVETWQSFYRKKLKEVWKPAV

SEQ ID NO: 34300 - protein, 979 aa, synthetic construct
  REGION 1..979: note = engineered CasX variant
QEIKRINKIRRRLVKDSNTKKAGKTGPMKTLLVRVMTPDLRERLENLRKKPENIPQPISNTSQANLNKLLTDYTEMKKAILHVYWEEFQKDPVGLMSRVAQPASKKIDQNKLKPEMDEKGNLTTAGFACSQCGQPLFVYKLEQVSEKGKAYTNYFGRCNVAEHEKLILLAQLKPEKDSDEAVTYSLGKFGQRALDFYSIHVTKESTHPVKPLAQIAGNRYASHPVGKALSDACMGTIASFLSKYQDIIIEHQKVVKGNQKRLESLRELAGKENLEYPSVTLPPQPHTKEGVDAYNEVIARVRMWVNLNLWQKLKLSRDDAKPLLRLKGFPSFPLVERQANEVDWWDMVCNVKKLINEKKEDGKVFWQNLAGYKRQEALRPYLSSEEDRKKGKKFARYQLGDLLLHLEKKHGEDWGKVYDEAWERIDKKVEGLSKHIKLEEERRSEDAQSKAALTDWLRAKASFVIEGLKEADKDEFCRCELKLQKWYGDLRGKPFAIEAENSILDISGFSKQYNCAFIWQKDGVKKLNLYLIINYFKGGKLRFKKIKPEAFEANRFYTVINKKSGEIVPMEVNFNFDDPNLIILPLAFGKRQGREFIWNDLLSLETGSLKLANGRVIEKTLYNRRTRQDEPALFVALTFERREVLDSSNIKPMNLIGVDRGENIPAVIALTDPEGCPLSRFKDSLGNPTHILRIGESYKEKQRTIQAKKEVEQRRAGGYSRKYASKAKNLADDMVRNTARDLLYYAVTQDAMLIFENLSRGFGRQGKRTFMAERQYTRMEDWLTAKLAYEGLPSKTYLSKTLAQYTSKTCSNCGFTITSADYDRVLEKLKKTATGWMTTINGKELKVEGQITYYNRYKRQNVVKDLSVELDRLSEESVNNDISSWTKGRSGEALSLLKKRFSHRPVQEKFVCLNCGFETHADEQAALNIARSWLFLRSQEYKKYQTNKTSTGNTDKRAFVETWQSFYRKKLKEVWKPAV

SEQ ID NO: 34301 - protein, 979 aa, synthetic construct
  REGION 1..979: note = engineered CasX variant
QEIKRINKIRRRLVKDSNTKKAGKTGPMKTLLVRVMTPDLRERLENLRKKPENIPQPISNTSQANLNKLLTDYTEMKKAILHVYWEEFQKDPVGLMSRVAQPASKKIDQNKLKPEMDEKGNLTTAGFACSQCGQPLFVYKLEQVSEKGKAYTNYFGRCNVAEHEKLILLAQLKPEKDSDEAVTYSLGKFGQRALDFYSIHVTKESTHPVKPLAQIAGNRYASSPVGKALSDACMGTIASFLSKYQDIIIEHQKVVKGNQKRLESLRELAGKENLEYPSVTLPPQPHTKEGVDAYNEVIARVRMWVNLNLWQKLKLSRDDAKPLLRLKGFPSFPLVERQANEVDWWDMVCNVKKLINEKKEDGKVFWQNLAGYKRQEALRPYLSSEEDRKKGKKFARYQLGDLLLHLEKKHGEDWGKVYDEAWERIDKKVEGLSKHIKLEEERRSEDAQSKAALTDWLRAKASFVIEGLKEADKDEFCRCELKLQKWYGDLRGKPFAIEAENSILDISGFSKQYNCAFIWQKDGVKKLNLYLIINYFKGGKLRFKKIKPEAFEANRFYTVINKKSGEIVPMEVNFNFDDPNLIILPLAFGKRQGREFIWNDLLSLETGSLKLANGRVIEKTLYNRRTRQDEPALFVALTFERREVLDSSNIKPMNLIGVDRGENIPAVIALTDPEGCPLSRFKDSLGNPTHILRIGESYKEKQRTIQAKKEVEQRRAGGYSRKYASKAKNLADDMVRNTARDLLYYAVTQDAMLIFENLSRGFGRQGKRTFMAERQYTRMEDWLTAKLAYEGLPSKTYLSKTLAQYTSKTCSNCGFTITSADYDRVLEKLKKTATGWMTTINGKELKVEGQITYYNRYKRQNVVKDLSVELDRLSEESVNNDISSWTKGRSGEALSLLKKRFSHRPVQEKFVCLNCGFETHADEQAALNIARSWLFLRSQEYKKYQTNKTSTGNTDKRAFVETWQSFYRKKLKEVWKPAV

SEQ ID NO: 34302 - protein, 979 aa, synthetic construct
  REGION 1..979: note = engineered CasX variant
QEIKRINKIRRRLVKDSNTKKAGKTGPMKTLLVRVMTPDLRERLENLRKKPENIPQPISNTSQANLNKLLTDYTEMKKAILHVYWEEFQKDPVGLMSRVAQPASKKIDQNKLKPEMDEKGNLTTAGFACSQCGQPLFVYKLEQVSEKGKAYTNYFGRCNVAEHEKLILLAQLKPEKDSDEAVTYSLGKFGQRALDFYSIHVTKESTHPVKPLAQIAGNRYASTPVGKALSDACMGTIASFLSKYQDIIIEHQKVVKGNQKRLESLRELAGKENLEYPSVTLPPQPHTKEGVDAYNEVIARVRMWVNLNLWQKLKLSRDDAKPLLRLKGFPSFPLVERQANEVDWWDMVCNVKKLINEKKEDGKVFWQNLAGYKRQEALRPYLSSEEDRKKGKKFARYQLGDLLLHLEKKHGEDWGKVYDEAWERIDKKVEGLSKHIKLEEERRSEDAQSKAALTDWLRAKASFVIEGLKEADKDEFCRCELKLQKWYGDLRGKPFAIEAENSILDISGFSKQYNCAFIWQKDGVKKLNLYLIINYFKGGKLRFKKIKPEAFEANRFYTVINKKSGEIVPMEVNFNFDDPNLIILPLAFGKRQGREFIWNDLLSLETGSLKLANGRVIEKTLYNRRTRQDEPALFVALTFERREVLDSSNIKPMNLIGVDRGENIPAVIALTDPEGCPLSRFKDSLGNPTHILRIGESYKEKQRTIQAKKEVEQRRAGGYSRKYASKAKNLADDMVRNTARDLLYYAVTQDAMLIFENLSRGFGRQGKRTFMAERQYTRMEDWLTAKLAYEGLPSKTYLSKTLAQYTSKTCSNCGFTITSADYDRVLEKLKKTATGWMTTINGKELKVEGQITYYNRYKRQNVVKDLSVELDRLSEESVNNDISSWTKGRSGEALSLLKKRFSHRPVQEKFVCLNCGFETHADEQAALNIARSWLFLRSQEYKKYQTNKTSTGNTDKRAFVETWQSFYRKKLKEVWKPAV

SEQ ID NO: 34303 - protein, 979 aa, synthetic construct
  REGION 1..979: note = engineered CasX variant
QEIKRINKIRRRLVKDSNTKKAGKTGPMKTLLVRVMTPDLRERLENLRKKPENIPQPISNTSQANLNKLLTDYTEMKKAILHVYWEEFQKDPVGLMSRVAQPASKKIDQNKLKPEMDEKGNLTTAGFACSQCGQPLFVYKLEQVSEKGKAYTNYFGRCNVAEHEKLILLAQLKPEKDSDEAVTYSLGKFGQRALDFYSIHVTKESTHPVKPLAQIAGNRYASAPVGKALSDACMGTIASFLSKYQDIIIEHQKVVKGNQKRLESLRELAGKENLEYPSVTLPPQPHTKEGVDAYNEVIARVRMWVNLNLWQKLKLSRDDAKPLLRLKGFPSFPLVERQANEVDWWDMVCNVKKLINEKKEDGKVFWQNLAGYKRQEALRPYLSSEEDRKKGKKFARYQLGDLLLHLEKKHGEDWGKVYDEAWERIDKKVEGLSKHIKLEEERRSEDAQSKAALTDWLRAKASFVIEGLKEADKDEFCRCELKLQKWYGDLRGKPFAIEAENSILDISGFSKQYNCAFIWQKDGVKKLNLYLIINYFKGGKLRFKKIKPEAFEANRFYTVINKKSGEIVPMEVNFNFDDPNLIILPLAFGKRQGREFIWNDLLSLETGSLKLANGRVIEKTLYNRRTRQDEPALFVALTFERREVLDSSNIKPMNLIGVDRGENIPAVIALTDPEGCPLSRFKDSLGNPTHILRIGESYKEKQRTIQAKKEVEQRRAGGYSRKYASKAKNLADDMVRNTARDLLYYAVTQDAMLIFENLSRGFGRQGKRTFMAERQYTRMEDWLTAKLAYEGLPSKTYLSKTLAQYTSKTCSNCGFTITSADYDRVLEKLKKTATGWMTTINGKELKVEGQITYYNRYKRQNVVKDLSVELDRLSEESVNNDISSWTKGRSGEALSLLKKRFSHRPVQEKFVCLNCGFETHADEQAALNIARSWLFLRSQEYKKYQTNKTSTGNTDKRAFVETWQSFYRKKLKEVWKPAV

SEQ ID NO: 34304 - protein, 979 aa, synthetic construct
  REGION 1..979: note = engineered CasX variant
QEIKRINKIRRRLVKDSNTKKAGKTGPMKTLLVRVMTPDLRERLENLRKKPENIPQPISNTSQANLNKLLTDYTEMKKAILHVYWEEFQKDPVGLMSRVAQPASKKIDQNKLKPEMDEKGNLTTAGFACSQCGQPLFVYKLEQVSEKGKAYTNYFGRCNVAEHEKLILLAQLKPEKDSDEAVTYSLGKFGQRALDFYSIHVTKESTHPVKPLAQIAGNRYASVPVGKALSDACMGTIASFLSKYQDIIIEHQKVVKGNQKRLESLRELAGKENLEYPSVTLPPQPHTKEGVDAYNEVIARVRMWVNLNLWQKLKLSRDDAKPLLRLKGFPSFPLVERQANEVDWWDMVCNVKKLINEKKEDGKVFWQNLAGYKRQEALRPYLSSEEDRKKGKKFARYQLGDLLLHLEKKHGEDWGKVYDEAWERIDKKVEGLSKHIKLEEERRSEDAQSKAALTDWLRAKASFVIEGLKEADKDEFCRCELKLQKWYGDLRGKPFAIEAENSILDISGFSKQYNCAFIWQKDGVKKLNLYLIINYFKGGKLRFKKIKPEAFEANRFYTVINKKSGEIVPMEVNFNFDDPNLIILPLAFGKRQGREFIWNDLLSLETGSLKLANGRVIEKTLYNRRTRQDEPALFVALTFERREVLDSSNIKPMNLIGVDRGENIPAVIALTDPEGCPLSRFKDSLGNPTHILRIGESYKEKQRTIQAKKEVEQRRAGGYSRKYASKAKNLADDMVRNTARDLLYYAVTQDAMLIFENLSRGFGRQGKRTFMAERQYTRMEDWLTAKLAYEGLPSKTYLSKTLAQYTSKTCSNCGFTITSADYDRVLEKLKKTATGWMTTINGKELKVEGQITYYNRYKRQNVVKDLSVELDRLSEESVNNDISSWTKGRSGEALSLLKKRFSHRPVQEKFVCLNCGFETHADEQAALNIARSWLFLRSQEYKKYQTNKTSTGNTDKRAFVETWQSFYRKKLKEVWKPAV

SEQ ID NO: 34305 - protein, 979 aa, synthetic construct
  REGION 1..979: note = engineered CasX variant
QEIKRINKIRRRLVKDSNTKKAGKTGPMKTLLVRVMTPDLRERLENLRKKPENIPQPISNTSQANLNKLLTDYTEMKKAILHVYWEEFQKDPVGLMSRVAQPASKKIDQNKLKPEMDEKGNLTTAGFACSQCGQPLFVYKLEQVSEKGKAYTNYFGRCNVAEHEKLIKLAQLKPEKDSDEAVTYSLGKFGQRALDFYSIHVTKESTHPVKPLAQIAGNRYASGPVGKALSDACMGTIASFLSKYQDIIIEHQKVVKGNQKRLESLRELAGKENLEYPSVTLPPQPHTKEGVDAYNEVIARVRMWVNLNLWQKLKLSRDDAKPLLRLKGFPSFPLVERQANEVDWWDMVCNVKKLINEKKEDGKVFWQNLAGYKRQEALRPYLSSEEDRKKGKKFARYQLGDLLLHLEKKHGEDWGKVYDEAWERIDKKVEGLSKHIKLEEERRSEDAQSKAALTDWLRAKASFVIEGLKEADKDEFCRCELKLQKWYGDLRGKPFAIEAENSILDISGFSKQYNCAFIWQKDGVKKLNLYLIINYFKGGKLRFKKIKPEAFEANRFYTVINKKSGEIVPMEVNFNFDDPNLIILPLAFGKRQGREFIWNDLLSLETGSLKLANGRVIEKTLYNRRTRQDEPALFVALTFERREVLDSSNIKPMNLIGVDRGENIPAVIALTDPEGCPLSRFKDSLGNPTHILRIGESYKEKQRTIQAKKEVEQRRAGGYSRKYASKAKNLADDMVRNTARDLLYYAVTQDAMLIFENLSRGFGRQGKRTFMAERQYTRMEDWLTAKLAYEGLPSKTYLSKTLAQYTSKTCSNCGFTITSADYDRVLEKLKKTATGWMTTINGKELKVEGQITYYNRYKRQNVVKDLSVELDRLSEESVNNDISSWTKGRSGEALSLLKKRFSHRPVQEKFVCLNCGFETHADEQAALNIARSWLFLRSQEYKKYQTNKTSTGNTDKRAFVETWQSFYRKKLKEVWKPAV

SEQ ID NO: 34306 - protein, 978 aa, synthetic construct
  REGION 1..978: note = engineered CasX variant
QEIKRINKIRRRLVKDSNTKKAGKTGPMKTLLVRVMTPDLRERLENLRKKPENIPQPISNTSQANLNKLLTDYTEMKKAILHVYWEEFQKDPVGLMSRVAQPASKKIDQNKLKPEMDEKGNLTTAGFACSQCGQPLFVYKLEQVSEKGKAYTNYFGRCNVAEHEKLILLAQLKPEKDSDEAVTYSLGKFGQRALDFYSIHVTKESTHPVKPLAQIAGNRYASPVGKALSDACMGTIASFLSKYQDIIIEHQKVVKGNQKRLESLRELAGKENLEYPSVTLPPQPHTKEGVDAYNEVIARVRMWVNLNLWQKLKLSRDDAKPLLRLKGFPSFPLVERQANEVDWWDMVCNVKKLINEKKEDGKVFWQNLAGYKRQEALRPYLSSEEDRKKGKKFARYQLGDLLLHLEKKHGEDWGKVYDEAWERIDKKVEGLSKHIKLEEERRSEDAQSKAALTDWLRAKASFVIEGLKEADKDEFCRCELKLQKWYGDLRGKPFAIEAENSILDISGFSKQYNCAFIWQKDGVKKLNLYLIINYFKGGKLRFKKIKPEAFEANRFYTVINKKSGEIVPMEVNFNFDDPNLIILPLAFGKRQGREFIWNDLLSLETGSLKLANGRVIEKTLYNRRTRQDEPALFVALTFERREVLDSSNIKPMNLIGVDRGENIPAVIALTDPEGCPLSRFKDSLGNPTHILRIGESYKEKQRTIQAKKEVEQRRAGGYSRKYASKAKNLADDMVRNTARDLLYYAVTQDAMLIFENLSRGFGRQGKRTFMAERQYTRMEDWLTAKLAYEGLPSKTYLSKTLAQYTSKTCSNCGFTITSADYDRVLEKLKKTATGWMTTINGKELKVEGQITYYNRYKRQNVVKDLSVELDRLSEESVNNDISSWTKGRSGEALSLLKKRFSHRPVQEKFVCLNCGFETHADEQAALNIARSWLFLRSQEYKKYQTNKTSTGNTDKRAFVETWQSFYRKKLKEVWKPAV

SEQ ID NO: 34307 - protein, 979 aa, synthetic construct
  REGION 1..979: note = engineered CasX variant
QEIKRINKIRRRLVKDSNTKKAGKTGPMKTLLVRVMTPDLRERLENLRKKPENIPQPISNTSQANLNKLLTDYTEMKKAILHVYWEEFQKDPVGLMSRVAQPASKKIDQNKLKPEMDEKGNLTTAGFACSQCGQPLFVYKLEQVSEKGKAYTNYFGRCNVAEHEKLILLAQLKPEKDSDEAVTYSLGKFGQRALDFYSIHVTKESTHPVKPLAQIAGNRYASYPVGKALSDACMGTIASFLSKYQDIIIEHQKVVKGNQKRLESLRELAGKENLEYPSVTLPPQPHTKEGVDAYNEVIARVRMWVNLNLWQKLKLSRDDAKPLLRLKGFPSFPLVERQANEVDWWDMVCNVKKLINEKKEDGKVFWQNLAGYKRQEALRPYLSSEEDRKKGKKFARYQLGDLLLHLEKKHGEDWGKVYDEAWERIDKKVEGLSKHIKLEEERRSEDAQSKAALTDWLRAKASFVIEGLKEADKDEFCRCELKLQKWYGDLRGKPFAIEAENSILDISGFSKQYNCAFIWQKDGVKKLNLYLIINYFKGGKLRFKKIKPEAFEANRFYTVINKKSGEIVPMEVNFNFDDPNLIILPLAFGKRQGREFIWNDLLSLETGSLKLANGRVIEKTLYNRRTRQDEPALFVALTFERREVLDSSNIKPMNLIGVDRGENIPAVIALTDPEGCPLSRFKDSLGNPTHILRIGESYKEKQRTIQAKKEVEQRRAGGYSRKYASKAKNLADDMVRNTARDLLYYAVTQDAMLIFENLSRGFGRQGKRTFMAERQYTRMEDWLTAKLAYEGLPSKTYLSKTLAQYTSKTCSNCGFTITSADYDRVLEKLKKTATGWMTTINGKELKVEGQITYYNRYKRQNVVKDLSVELDRLSEESVNNDISSWTKGRSGEALSLLKKRFSHRPVQEKFVCLNCGFETHADEQAALNIARSWLFLRSQEYKKYQTNKTTGKNTDKRAFVETWQSFYRKKLKEVWKPAV

SEQ ID NO: 34308 - protein, 979 aa, synthetic construct
  REGION 1..979: note = engineered CasX variant
QEIKRINKIRRRLVKDSNTKKAGKTGPMKTLLVRVMTPDLRERLENLRKKPENIPQPISNTSQANLNKLLTDYTEMKKAILHVYWEEFQKDPVGLMSRVAQPASKKIDQNKLKPEMDEKGNLTTAGFACSQCGQPLFVYKLEQVSEKGKAYTNYFGRCNVAEHEKLILLAQLKPEKDSDEAVTYSLGKFGQRALDFYSIHVTKESTHPVKPLAQIAGNRYASHPVGKALSDACMGTIASFLSKYQDIIIEHQKVVKGNQKRLESLRELAGKENLEYPSVTLPPQPHTKEGVDAYNEVIARVRMWVNLNLWQKLKLSRDDAKPLLRLKGFPSFPLVERQANEVDWWDMVCNVKKLINEKKEDGKVFWQNLAGYKRQEALRPYLSSEEDRKKGKKFARYQLGDLLLHLEKKHGEDWGKVYDEAWERIDKKVEGLSKHIKLEEERRSEDAQSKAALTDWLRAKASFVIEGLKEADKDEFCRCELKLQKWYGDLRGKPFAIEAENSILDISGFSKQYNCAFIWQKDGVKKLNLYLIINYFKGGKLRFKKIKPEAFEANRFYTVINKKSGEIVPMEVNFNFDDPNLIILPLAFGKRQGREFIWNDLLSLETGSLKLANGRVIEKTLYNRRTRQDEPALFVALTFERREVLDSSNIKPMNLIGVDRGENIPAVIALTDPEGCPLSRFKDSLGNPTHILRIGESYKEKQRTIQAKKEVEQRRAGGYSRKYASKAKNLADDMVRNTARDLLYYAVTQDAMLIFENLSRGFGRQGKRTFMAERQYTRMEDWLTAKLAYEGLPSKTYLSKTLAQYTSKTCSNCGFTITSADYDRVLEKLKKTATGWMTTINGKELKVEGQITYYNRYKRQNVVKDLSVELDRLSEESVNNDISSWTKGRSGEALSLLKKRFSHRPVQEKFVCLNCGFETHADEQAALNIARSWLFLRSQEYKKYQTNKTTGKNTDKRAFVETWQSFYRKKLKEVWKPAV

SEQ ID NO: 34309 - protein, 979 aa, synthetic construct
  REGION 1..979: note = engineered CasX variant
QEIKRINKIRRRLVKDSNTKKAGKTGPMKTLLVRVMTPDLRERLENLRKKPENIPQPISNTSQANLNKLLTDYTEMKKAILHVYWEEFQKDPVGLMSRVAQPASKKIDQNKLKPEMDEKGNLTTAGFACSQCGQPLFVYKLEQVSEKGKAYTNYFGRCNVAEHEKLILLAQLKPEKDSDEAVTYSLGKFGQRALDFYSIHVTKESTHPVKPLAQIAGNRYASSPVGKALSDACMGTIASFLSKYQDIIIEHQKVVKGNQKRLESLRELAGKENLEYPSVTLPPQPHTKEGVDAYNEVIARVRMWVNLNLWQKLKLSRDDAKPLLRLKGFPSFPLVERQANEVDWWDMVCNVKKLINEKKEDGKVFWQNLAGYKRQEALRPYLSSEEDRKKGKKFARYQLGDLLLHLEKKHGEDWGKVYDEAWERIDKKVEGLSKHIKLEEERRSEDAQSKAALTDWLRAKASFVIEGLKEADKDEFCRCELKLQKWYGDLRGKPFAIEAENSILDISGFSKQYNCAFIWQKDGVKKLNLYLIINYFKGGKLRFKKIKPEAFEANRFYTVINKKSGEIVPMEVNFNFDDPNLIILPLAFGKRQGREFIWNDLLSLETGSLKLANGRVIEKTLYNRRTRQDEPALFVALTFERREVLDSSNIKPMNLIGVDRGENIPAVIALTDPEGCPLSRFKDSLGNPTHILRIGESYKEKQRTIQAKKEVEQRRAGGYSRKYASKAKNLADDMVRNTARDLLYYAVTQDAMLIFENLSRGFGRQGKRTFMAERQYTRMEDWLTAKLAYEGLPSKTYLSKTLAQYTSKTCSNCGFTITSADYDRVLEKLKKTATGWMTTINGKELKVEGQITYYNRYKRQNVVKDLSVELDRLSEESVNNDISSWTKGRSGEALSLLKKRFSHRPVQEKFVCLNCGFETHADEQAALNIARSWLFLRSQEYKKYQTNKTTGKNTDKRAFVETWQSFYRKKLKEVWKPAV

SEQ ID NO: 34310 - protein, 979 aa, synthetic construct
  REGION 1..979: note = engineered CasX variant
QEIKRINKIRRRLVKDSNTKKAGKTGPMKTLLVRVMTPDLRERLENLRKKPENIPQPISNTSQANLNKLLTDYTEMKKAILHVYWEEFQKDPVGLMSRVAQPASKKIDQNKLKPEMDEKGNLTTAGFACSQCGQPLFVYKLEQVSEKGKAYTNYFGRCNVAEHEKLILLAQLKPEKDSDEAVTYSLGKFGQRALDFYSIHVTKESTHPVKPLAQIAGNRYASTPVGKALSDACMGTIASFLSKYQDIIIEHQKVVKGNQKRLESLRELAGKENLEYPSVTLPPQPHTKEGVDAYNEVIARVRMWVNLNLWQKLKLSRDDAKPLLRLKGFPSFPLVERQANEVDWWDMVCNVKKLINEKKEDGKVFWQNLAGYKRQEALRPYLSSEEDRKKGKKFARYQLGDLLLHLEKKHGEDWGKVYDEAWERIDKKVEGLSKHIKLEEERRSEDAQSKAALTDWLRAKASFVIEGLKEADKDEFCRCELKLQKWYGDLRGKPFAIEAENSILDISGFSKQYNCAFIWQKDGVKKLNLYLIINYFKGGKLRFKKIKPEAFEANRFYTVINKKSGEIVPMEVNFNFDDPNLIILPLAFGKRQGREFIWNDLLSLETGSLKLANGRVIEKTLYNRRTRQDEPALFVALTFERREVLDSSNIKPMNLIGVDRGENIPAVIALTDPEGCPLSRFKDSLGNPTHILRIGESYKEKQRTIQAKKEVEQRRAGGYSRKYASKAKNLADDMVRNTARDLLYYAVTQDAMLIFENLSRGFGRQGKRTFMAERQYTRMEDWLTAKLAYEGLPSKTYLSKTLAQYTSKTCSNCGFTITSADYDRVLEKLKKTATGWMTTINGKELKVEGQITYYNRYKRQNVVKDLSVELDRLSEESVNNDISSWTKGRSGEALSLLKKRFSHRPVQEKFVCLNCGFETHADEQAALNIARSWLFLRSQEYKKYQTNKTTGKNTDKRAFVETWQSFYRKKLKEVWKPAV

SEQ ID NO: 34311 - protein, 979 aa, synthetic construct
  REGION 1..979: note = engineered CasX variant
QEIKRINKIRRRLVKDSNTKKAGKTGPMKTLLVRVMTPDLRERLENLRKKPENIPQPISNTSQANLNKLLTDYTEMKKAILHVYWEEFQKDPVGLMSRVAQPASKKIDQNKLKPEMDEKGNLTTAGFACSQCGQPLFVYKLEQVSEKGKAYTNYFGRCNVAEHEKLILLAQLKPEKDSDEAVTYSLGKFGQRALDFYSIHVTKESTHPVKPLAQIAGNRYASAPVGKALSDACMGTIASFLSKYQDIIIEHQKVVKGNQKRLESLRELAGKENLEYPSVTLPPQPHTKEGVDAYNEVIARVRMWVNLNLWQKLKLSRDDAKPLLRLKGFPSFPLVERQANEVDWWDMVCNVKKLINEKKEDGKVFWQNLAGYKRQEALRPYLSSEEDRKKGKKFARYQLGDLLLHLEKKHGEDWGKVYDEAWERIDKKVEGLSKHIKLEEERRSEDAQSKAALTDWLRAKASFVIEGLKEADKDEFCRCELKLQKWYGDLRGKPFAIEAENSILDISGFSKQYNCAFIWQKDGVKKLNLYLIINYFKGGKLRFKKIKPEAFEANRFYTVINKKSGEIVPMEVNFNFDDPNLIILPLAFGKRQGREFIWNDLLSLETGSLKLANGRVIEKTLYNRRTRQDEPALFVALTFERREVLDSSNIKPMNLIGVDRGENIPAVIALTDPEGCPLSRFKDSLGNPTHILRIGESYKEKQRTIQAKKEVEQRRAGGYSRKYASKAKNLADDMVRNTARDLLYYAVTQDAMLIFENLSRGFGRQGKRTFMAERQYTRMEDWLTAKLAYEGLPSKTYLSKTLAQYTSKTCSNCGFTITSADYDRVLEKLKKTATGWMTTINGKELKVEGQITYYNRYKRQNVVKDLSVELDRLSEESVNNDISSWTKGRSGEALSLLKKRFSHRPVQEKFVCLNCGFETHADEQAALNIARSWLFLRSQEYKKYQTNKTTGKNTDKRAFVETWQSFYRKKLKEVWKPAV

SEQ ID NO: 34312 - protein, 979 aa, synthetic construct
  REGION 1..979: note = engineered CasX variant
QEIKRINKIRRRLVKDSNTKKAGKTGPMKTLLVRVMTPDLRERLENLRKKPENIPQPISNTSQANLNKLLTDYTEMKKAILHVYWEEFQKDPVGLMSRVAQPASKKIDQNKLKPEMDEKGNLTTAGFACSQCGQPLFVYKLEQVSEKGKAYTNYFGRCNVAEHEKLILLAQLKPEKDSDEAVTYSLGKFGQRALDFYSIHVTKESTHPVKPLAQIAGNRYASVPVGKALSDACMGTIASFLSKYQDIIIEHQKVVKGNQKRLESLRELAGKENLEYPSVTLPPQPHTKEGVDAYNEVIARVRMWVNLNLWQKLKLSRDDAKPLLRLKGFPSFPLVERQANEVDWWDMVCNVKKLINEKKEDGKVFWQNLAGYKRQEALRPYLSSEEDRKKGKKFARYQLGDLLLHLEKKHGEDWGKVYDEAWERIDKKVEGLSKHIKLEEERRSEDAQSKAALTDWLRAKASFVIEGLKEADKDEFCRCELKLQKWYGDLRGKPFAIEAENSILDISGFSKQYNCAFIWQKDGVKKLNLYLIINYFKGGKLRFKKIKPEAFEANRFYTVINKKSGEIVPMEVNFNFDDPNLIILPLAFGKRQGREFIWNDLLSLETGSLKLANGRVIEKTLYNRRTRQDEPALFVALTFERREVLDSSNIKPMNLIGVDRGENIPAVIALTDPEGCPLSRFKDSLGNPTHILRIGESYKEKQRTIQAKKEVEQRRAGGYSRKYASKAKNLADDMVRNTARDLLYYAVTQDAMLIFENLSRGFGRQGKRTFMAERQYTRMEDWLTAKLAYEGLPSKTYLSKTLAQYTSKTCSNCGFTITSADYDRVLEKLKKTATGWMTTINGKELKVEGQITYYNRYKRQNVVKDLSVELDRLSEESVNNDISSWTKGRSGEALSLLKKRFSHRPVQEKFVCLNCGFETHADEQAALNIARSWLFLRSQEYKKYQTNKTTGKNTDKRAFVETWQSFYRKKLKEVWKPAV

SEQ ID NO: 34313 - protein, 979 aa, synthetic construct
  REGION 1..979: note = engineered CasX variant
QEIKRINKIRRRLVKDSNTKKAGKTGPMKTLLVRVMTPDLRERLENLRKKPENIPQPISNTSQANLNKLLTDYTEMKKAILHVYWEEFQKDPVGLMSRVAQPASKKIDQNKLKPEMDEKGNLTTAGFACSQCGQPLFVYKLEQVSEKGKAYTNYFGRCNVAEHEKLIKLAQLKPEKDSDEAVTYSLGKFGQRALDFYSIHVTKESTHPVKPLAQIAGNRYASGPVGKALSDACMGTIASFLSKYQDIIIEHQKVVKGNQKRLESLRELAGKENLEYPSVTLPPQPHTKEGVDAYNEVIARVRMWVNLNLWQKLKLSRDDAKPLLRLKGFPSFPLVERQANEVDWWDMVCNVKKLINEKKEDGKVFWQNLAGYKRQEALRPYLSSEEDRKKGKKFARYQLGDLLLHLEKKHGEDWGKVYDEAWERIDKKVEGLSKHIKLEEERRSEDAQSKAALTDWLRAKASFVIEGLKEADKDEFCRCELKLQKWYGDLRGKPFAIEAENSILDISGFSKQYNCAFIWQKDGVKKLNLYLIINYFKGGKLRFKKIKPEAFEANRFYTVINKKSGEIVPMEVNFNFDDPNLIILPLAFGKRQGREFIWNDLLSLETGSLKLANGRVIEKTLYNRRTRQDEPALFVALTFERREVLDSSNIKPMNLIGVDRGENIPAVIALTDPEGCPLSRFKDSLGNPTHILRIGESYKEKQRTIQAKKEVEQRRAGGYSRKYASKAKNLADDMVRNTARDLLYYAVTQDAMLIFENLSRGFGRQGKRTFMAERQYTRMEDWLTAKLAYEGLPSKTYLSKTLAQYTSKTCSNCGFTITSADYDRVLEKLKKTATGWMTTINGKELKVEGQITYYNRYKRQNVVKDLSVELDRLSEESVNNDISSWTKGRSGEALSLLKKRFSHRPVQEKFVCLNCGFETHADEQAALNIARSWLFLRSQEYKKYQTNKTTGKNTDKRAFVETWQSFYRKKLKEVWKPAV

SEQ ID NO: 34314 - protein, 978 aa, synthetic construct
  REGION 1..978: note = engineered CasX variant
QEIKRINKIRRRLVKDSNTKKAGKTGPMKTLLVRVMTPDLRERLENLRKKPENIPQPISNTSQANLNKLLTDYTEMKKAILHVYWEEFQKDPVGLMSRVAQPASKKIDQNKLKPEMDEKGNLTTAGFACSQCGQPLFVYKLEQVSEKGKAYTNYFGRCNVAEHEKLILLAQLKPEKDSDEAVTYSLGKFGQRALDFYSIHVTKESTHPVKPLAQIAGNRYASPVGKALSDACMGTIASFLSKYQDIIIEHQKVVKGNQKRLESLRELAGKENLEYPSVTLPPQPHTKEGVDAYNEVIARVRMWVNLNLWQKLKLSRDDAKPLLRLKGFPSFPLVERQANEVDWWDMVCNVKKLINEKKEDGKVFWQNLAGYKRQEALRPYLSSEEDRKKGKKFARYQLGDLLLHLEKKHGEDWGKVYDEAWERIDKKVEGLSKHIKLEEERRSEDAQSKAALTDWLRAKASFVIEGLKEADKDEFCRCELKLQKWYGDLRGKPFAIEAENSILDISGFSKQYNCAFIWQKDGVKKLNLYLIINYFKGGKLRFKKIKPEAFEANRFYTVINKKSGEIVPMEVNFNFDDPNLIILPLAFGKRQGREFIWNDLLSLETGSLKLANGRVIEKTLYNRRTRQDEPALFVALTFERREVLDSSNIKPMNLIGVDRGENIPAVIALTDPEGCPLSRFKDSLGNPTHILRIGESYKEKQRTIQAKKEVEQRRAGGYSRKYASKAKNLADDMVRNTARDLLYYAVTQDAMLIFENLSRGFGRQGKRTFMAERQYTRMEDWLTAKLAYEGLPSKTYLSKTLAQYTSKTCSNCGFTITSADYDRVLEKLKKTATGWMTTINGKELKVEGQITYYNRYKRQNVVKDLSVELDRLSEESVNNDISSWTKGRSGEALSLLKKRFSHRPVQEKFVCLNCGFETHADEQAALNIARSWLFLRSQEYKKYQTNKTTGKNTDKRAFVETWQSFYRKKLKEVWKPAV

SEQ ID NO: 34315 - protein, 978 aa, synthetic construct
  REGION 1..978: note = engineered CasX variant
QEIKRINKIRRRLVKDSNTKKAGKTGPMKTLLVRVMTPDLRERLENLRKKPENIPQPISNTSQANLNKLLTDYTEMKKAILHVYWEEFQKDPVGLMSRVAQPASKKIDQNKLKPEMDEKGNLTTAGFACSQCGQPLFVYKLEQVSEKGKAYTNYFGRCNVAEHEKLILLAQLKPEKDSDEAVTYSLGKFGQRALDFYSIHVTKESTHPVKPLAQIAGNRYASYPVGKALSDACMGTIASFLSKYQDIIIEHQKVVKGNQKRLESLRELAGKENLEYPSVTLPPQPHTKEGVDAYNEVIARVRMWVNLNLWQKLKLSRDDAKPLLRLKKFPSFPLVERQANEVDWWDMVCNVKKLINEKKEDGKVFWQNLAGYKRQEALRPYLSSEEDRKKGKKFARYQLGDLLLHLEKKHGEDWGKVYDEAWERIDKKVEGLSKHIKLEEERRSEDAQSKAALTDWLRAKASFVIEGLKEADKDEFCRCELKLQKWYGDLRGKPFAIEAENSILDISGFSKQYNCAFIWQKDGVKKLNLYLIINYFKGGKLRFKKIKPEAFEANRFYTVINKKSGEIVPMEVNFNFDDPNLIILPLAFGKRQGREFIWNDLLSLETGSLKLANGRVIEKTLYNRRTRQDEPALFVALTFERREVLDSSNIKPMNLIGVDRGENIPAVIALTDPEGCPLSRFKDSLGNPTHILRIGESYKEKQRTIQAKKEVEQRRAGGYSRKYASKAKNLADDMVRNTARDLLYYAVTQDAMLIFENLSRGFGRQGKRTFMAERQYTRMEDWLTAKLAYEGLPSKTYLSKTLAQYTSKTCSNCGFTITSADYDRVLEKLKKTATGWMTTINGKELKVEGQITYYNRYKRQNVVKDLSVELDRLSEESVNNDISSWTKGRSGEALSLLKKRFSHRPVQEKFVCLNCGFETHADEQAALNIARSWLFLRSQEYKKYQTNKTTGNTDKRAFVETWQSFYRKKLKEVWKPAV

SEQ ID NO: 34316 - protein, 978 aa, synthetic construct
  REGION 1..978: note = engineered CasX variant
QEIKRINKIRRRLVKDSNTKKAGKTGPMKTLLVRVMTPDLRERLENLRKKPENIPQPISNTSQANLNKLLTDYTEMKKAILHVYWEEFQKDPVGLMSRVAQPASKKIDQNKLKPEMDEKGNLTTAGFACSQCGQPLFVYKLEQVSEKGKAYTNYFGRCNVAEHEKLILLAQLKPEKDSDEAVTYSLGKFGQRALDFYSIHVTKESTHPVKPLAQIAGNRYASHPVGKALSDACMGTIASFLSKYQDIIIEHQKVVKGNQKRLESLRELAGKENLEYPSVTLPPQPHTKEGVDAYNEVIARVRMWVNLNLWQKLKLSRDDAKPLLRLKKFPSFPLVERQANEVDWWDMVCNVKKLINEKKEDGKVFWQNLAGYKRQEALRPYLSSEEDRKKGKKFARYQLGDLLLHLEKKHGEDWGKVYDEAWERIDKKVEGLSKHIKLEEERRSEDAQSKAALTDWLRAKASFVIEGLKEADKDEFCRCELKLQKWYGDLRGKPFAIEAENSILDISGFSKQYNCAFIWQKDGVKKLNLYLIINYFKGGKLRFKKIKPEAFEANRFYTVINKKSGEIVPMEVNFNFDDPNLIILPLAFGKRQGREFIWNDLLSLETGSLKLANGRVIEKTLYNRRTRQDEPALFVALTFERREVLDSSNIKPMNLIGVDRGENIPAVIALTDPEGCPLSRFKDSLGNPTHILRIGESYKEKQRTIQAKKEVEQRRAGGYSRKYASKAKNLADDMVRNTARDLLYYAVTQDAMLIFENLSRGFGRQGKRTFMAERQYTRMEDWLTAKLAYEGLPSKTYLSKTLAQYTSKTCSNCGFTITSADYDRVLEKLKKTATGWMTTINGKELKVEGQITYYNRYKRQNVVKDLSVELDRLSEESVNNDISSWTKGRSGEALSLLKKRFSHRPVQEKFVCLNCGFETHADEQAALNIARSWLFLRSQEYKKYQTNKTTGNTDKRAFVETWQSFYRKKLKEVWKPAV

SEQ ID NO: 34317 - protein, 978 aa, synthetic construct
  REGION 1..978: note = engineered CasX variant
QEIKRINKIRRRLVKDSNTKKAGKTGPMKTLLVRVMTPDLRERLENLRKKPENIPQPISNTSQANLNKLLTDYTEMKKAILHVYWEEFQKDPVGLMSRVAQPASKKIDQNKLKPEMDEKGNLTTAGFACSQCGQPLFVYKLEQVSEKGKAYTNYFGRCNVAEHEKLILLAQLKPEKDSDEAVTYSLGKFGQRALDFYSIHVTKESTHPVKPLAQIAGNRYASSPVGKALSDACMGTIASFLSKYQDIIIEHQKVVKGNQKRLESLRELAGKENLEYPSVTLPPQPHTKEGVDAYNEVIARVRMWVNLNLWQKLKLSRDDAKPLLRLKKFPSFPLVERQANEVDWWDMVCNVKKLINEKKEDGKVFWQNLAGYKRQEALRPYLSSEEDRKKGKKFARYQLGDLLLHLEKKHGEDWGKVYDEAWERIDKKVEGLSKHIKLEEERRSEDAQSKAALTDWLRAKASFVIEGLKEADKDEFCRCELKLQKWYGDLRGKPFAIEAENSILDISGFSKQYNCAFIWQKDGVKKLNLYLIINYFKGGKLRFKKIKPEAFEANRFYTVINKKSGEIVPMEVNFNFDDPNLIILPLAFGKRQGREFIWNDLLSLETGSLKLANGRVIEKTLYNRRTRQDEPALFVALTFERREVLDSSNIKPMNLIGVDRGENIPAVIALTDPEGCPLSRFKDSLGNPTHILRIGESYKEKQRTIQAKKEVEQRRAGGYSRKYASKAKNLADDMVRNTARDLLYYAVTQDAMLIFENLSRGFGRQGKRTFMAERQYTRMEDWLTAKLAYEGLPSKTYLSKTLAQYTSKTCSNCGFTITSADYDRVLEKLKKTATGWMTTINGKELKVEGQITYYNRYKRQNVVKDLSVELDRLSEESVNNDISSWTKGRSGEALSLLKKRFSHRPVQEKFVCLNCGFETHADEQAALNIARSWLFLRSQEYKKYQTNKTTGNTDKRAFVETWQSFYRKKLKEVWKPAV

SEQ ID NO: 34318 - protein, 978 aa, synthetic construct
  REGION 1..978: note = engineered CasX variant
QEIKRINKIRRRLVKDSNTKKAGKTGPMKTLLVRVMTPDLRERLENLRKKPENIPQPISNTSQANLNKLLTDYTEMKKAILHVYWEEFQKDPVGLMSRVAQPASKKIDQNKLKPEMDEKGNLTTAGFACSQCGQPLFVYKLEQVSEKGKAYTNYFGRCNVAEHEKLILLAQLKPEKDSDEAVTYSLGKFGQRALDFYSIHVTKESTHPVKPLAQIAGNRYASTPVGKALSDACMGTIASFLSKYQDIIIEHQKVVKGNQKRLESLRELAGKENLEYPSVTLPPQPHTKEGVDAYNEVIARVRMWVNLNLWQKLKLSRDDAKPLLRLKKFPSFPLVERQANEVDWWDMVCNVKKLINEKKEDGKVFWQNLAGYKRQEALRPYLSSEEDRKKGKKFARYQLGDLLLHLEKKHGEDWGKVYDEAWERIDKKVEGLSKHIKLEEERRSEDAQSKAALTDWLRAKASFVIEGLKEADKDEFCRCELKLQKWYGDLRGKPFAIEAENSILDISGFSKQYNCAFIWQKDGVKKLNLYLIINYFKGGKLRFKKIKPEAFEANRFYTVINKKSGEIVPMEVNFNFDDPNLIILPLAFGKRQGREFIWNDLLSLETGSLKLANGRVIEKTLYNRRTRQDEPALFVALTFERREVLDSSNIKPMNLIGVDRGENIPAVIALTDPEGCPLSRFKDSLGNPTHILRIGESYKEKQRTIQAKKEVEQRRAGGYSRKYASKAKNLADDMVRNTARDLLYYAVTQDAMLIFENLSRGFGRQGKRTFMAERQYTRMEDWLTAKLAYEGLPSKTYLSKTLAQYTSKTCSNCGFTITSADYDRVLEKLKKTATGWMTTINGKELKVEGQITYYNRYKRQNVVKDLSVELDRLSEESVNNDISSWTKGRSGEALSLLKKRFSHRPVQEKFVCLNCGFETHADEQAALNIARSWLFLRSQEYKKYQTNKTTGNTDKRAFVETWQSFYRKKLKEVWKPAV

SEQ ID NO: 34319 - protein, 978 aa, synthetic construct
  REGION 1..978: note = engineered CasX variant
QEIKRINKIRRRLVKDSNTKKAGKTGPMKTLLVRVMTPDLRERLENLRKKPENIPQPISNTSQANLNKLLTDYTEMKKAILHVYWEEFQKDPVGLMSRVAQPASKKIDQNKLKPEMDEKGNLTTAGFACSQCGQPLFVYKLEQVSEKGKAYTNYFGRCNVAEHEKLILLAQLKPEKDSDEAVTYSLGKFGQRALDFYSIHVTKESTHPVKPLAQIAGNRYASAPVGKALSDACMGTIASFLSKYQDIIIEHQKVVKGNQKRLESLRELAGKENLEYPSVTLPPQPHTKEGVDAYNEVIARVRMWVNLNLWQKLKLSRDDAKPLLRLKKFPSFPLVERQANEVDWWDMVCNVKKLINEKKEDGKVFWQNLAGYKRQEALRPYLSSEEDRKKGKKFARYQLGDLLLHLEKKHGEDWGKVYDEAWERIDKKVEGLSKHIKLEEERRSEDAQSKAALTDWLRAKASFVIEGLKEADKDEFCRCELKLQKWYGDLRGKPFAIEAENSILDISGFSKQYNCAFIWQKDGVKKLNLYLIINYFKGGKLRFKKIKPEAFEANRFYTVINKKSGEIVPMEVNFNFDDPNLIILPLAFGKRQGREFIWNDLLSLETGSLKLANGRVIEKTLYNRRTRQDEPALFVALTFERREVLDSSNIKPMNLIGVDRGENIPAVIALTDPEGCPLSRFKDSLGNPTHILRIGESYKEKQRTIQAKKEVEQRRAGGYSRKYASKAKNLADDMVRNTARDLLYYAVTQDAMLIFENLSRGFGRQGKRTFMAERQYTRMEDWLTAKLAYEGLPSKTYLSKTLAQYTSKTCSNCGFTITSADYDRVLEKLKKTATGWMTTINGKELKVEGQITYYNRYKRQNVVKDLSVELDRLSEESVNNDISSWTKGRSGEALSLLKKRFSHRPVQEKFVCLNCGFETHADEQAALNIARSWLFLRSQEYKKYQTNKTTGNTDKRAFVETWQSFYRKKLKEVWKPAV

SEQ ID NO: 34320 - protein, 978 aa, synthetic construct
  REGION 1..978: note = engineered CasX variant
QEIKRINKIRRRLVKDSNTKKAGKTGPMKTLLVRVMTPDLRERLENLRKKPENIPQPISNTSQANLNKLLTDYTEMKKAILHVYWEEFQKDPVGLMSRVAQPASKKIDQNKLKPEMDEKGNLTTAGFACSQCGQPLFVYKLEQVSEKGKAYTNYFGRCNVAEHEKLILLAQLKPEKDSDEAVTYSLGKFGQRALDFYSIHVTKESTHPVKPLAQIAGNRYASVPVGKALSDACMGTIASFLSKYQDIIIEHQKVVKGNQKRLESLRELAGKENLEYPSVTLPPQPHTKEGVDAYNEVIARVRMWVNLNLWQKLKLSRDDAKPLLRLKKFPSFPLVERQANEVDWWDMVCNVKKLINEKKEDGKVFWQNLAGYKRQEALRPYLSSEEDRKKGKKFARYQLGDLLLHLEKKHGEDWGKVYDEAWERIDKKVEGLSKHIKLEEERRSEDAQSKAALTDWLRAKASFVIEGLKEADKDEFCRCELKLQKWYGDLRGKPFAIEAENSILDISGFSKQYNCAFIWQKDGVKKLNLYLIINYFKGGKLRFKKIKPEAFEANRFYTVINKKSGEIVPMEVNFNFDDPNLIILPLAFGKRQGREFIWNDLLSLETGSLKLANGRVIEKTLYNRRTRQDEPALFVALTFERREVLDSSNIKPMNLIGVDRGENIPAVIALTDPEGCPLSRFKDSLGNPTHILRIGESYKEKQRTIQAKKEVEQRRAGGYSRKYASKAKNLADDMVRNTARDLLYYAVTQDAMLIFENLSRGFGRQGKRTFMAERQYTRMEDWLTAKLAYEGLPSKTYLSKTLAQYTSKTCSNCGFTITSADYDRVLEKLKKTATGWMTTINGKELKVEGQITYYNRYKRQNVVKDLSVELDRLSEESVNNDISSWTKGRSGEALSLLKKRFSHRPVQEKFVCLNCGFETHADEQAALNIARSWLFLRSQEYKKYQTNKTTGNTDKRAFVETWQSFYRKKLKEVWKPAV

SEQ ID NO: 34321 - protein, 978 aa, synthetic construct
  REGION 1..978: note = engineered CasX variant
QEIKRINKIRRRLVKDSNTKKAGKTGPMKTLLVRVMTPDLRERLENLRKKPENIPQPISNTSQANLNKLLTDYTEMKKAILHVYWEEFQKDPVGLMSRVAQPASKKIDQNKLKPEMDEKGNLTTAGFACSQCGQPLFVYKLEQVSEKGKAYTNYFGRCNVAEHEKLIKLAQLKPEKDSDEAVTYSLGKFGQRALDFYSIHVTKESTHPVKPLAQIAGNRYASGPVGKALSDACMGTIASFLSKYQDIIIEHQKVVKGNQKRLESLRELAGKENLEYPSVTLPPQPHTKEGVDAYNEVIARVRMWVNLNLWQKLKLSRDDAKPLLRLKKFPSFPLVERQANEVDWWDMVCNVKKLINEKKEDGKVFWQNLAGYKRQEALRPYLSSEEDRKKGKKFARYQLGDLLLHLEKKHGEDWGKVYDEAWERIDKKVEGLSKHIKLEEERRSEDAQSKAALTDWLRAKASFVIEGLKEADKDEFCRCELKLQKWYGDLRGKPFAIEAENSILDISGFSKQYNCAFIWQKDGVKKLNLYLIINYFKGGKLRFKKIKPEAFEANRFYTVINKKSGEIVPMEVNFNFDDPNLIILPLAFGKRQGREFIWNDLLSLETGSLKLANGRVIEKTLYNRRTRQDEPALFVALTFERREVLDSSNIKPMNLIGVDRGENIPAVIALTDPEGCPLSRFKDSLGNPTHILRIGESYKEKQRTIQAKKEVEQRRAGGYSRKYASKAKNLADDMVRNTARDLLYYAVTQDAMLIFENLSRGFGRQGKRTFMAERQYTRMEDWLTAKLAYEGLPSKTYLSKTLAQYTSKTCSNCGFTITSADYDRVLEKLKKTATGWMTTINGKELKVEGQITYYNRYKRQNVVKDLSVELDRLSEESVNNDISSWTKGRSGEALSLLKKRFSHRPVQEKFVCLNCGFETHADEQAALNIARSWLFLRSQEYKKYQTNKTTGNTDKRAFVETWQSFYRKKLKEVWKPAV

SEQ ID NO: 34322 - protein, 977 aa, synthetic construct
  REGION 1..977: note = engineered CasX variant
QEIKRINKIRRRLVKDSNTKKAGKTGPMKTLLVRVMTPDLRERLENLRKKPENIPQPISNTSQANLNKLLTDYTEMKKAILHVYWEEFQKDPVGLMSRVAQPASKKIDQNKLKPEMDEKGNLTTAGFACSQCGQPLFVYKLEQVSEKGKAYTNYFGRCNVAEHEKLILLAQLKPEKDSDEAVTYSLGKFGQRALDFYSIHVTKESTHPVKPLAQIAGNRYASPVGKALSDACMGTIASFLSKYQDIIIEHQKVVKGNQKRLESLRELAGKENLEYPSVTLPPQPHTKEGVDAYNEVIARVRMWVNLNLWQKLKLSRDDAKPLLRLKKFPSFPLVERQANEVDWWDMVCNVKKLINEKKEDGKVFWQNLAGYKRQEALRPYLSSEEDRKKGKKFARYQLGDLLLHLEKKHGEDWGKVYDEAWERIDKKVEGLSKHIKLEEERRSEDAQSKAALTDWLRAKASFVIEGLKEADKDEFCRCELKLQKWYGDLRGKPFAIEAENSILDISGFSKQYNCAFIWQKDGVKKLNLYLIINYFKGGKLRFKKIKPEAFEANRFYTVINKKSGEIVPMEVNFNFDDPNLIILPLAFGKRQGREFIWNDLLSLETGSLKLANGRVIEKTLYNRRTRQDEPALFVALTFERREVLDSSNIKPMNLIGVDRGENIPAVIALTDPEGCPLSRFKDSLGNPTHILRIGESYKEKQRTIQAKKEVEQRRAGGYSRKYASKAKNLADDMVRNTARDLLYYAVTQDAMLIFENLSRGFGRQGKRTFMAERQYTRMEDWLTAKLAYEGLPSKTYLSKTLAQYTSKTCSNCGFTITSADYDRVLEKLKKTATGWMTTINGKELKVEGQITYYNRYKRQNVVKDLSVELDRLSEESVNNDISSWTKGRSGEALSLLKKRFSHRPVQEKFVCLNCGFETHADEQAALNIARSWLFLRSQEYKKYQTNKTTGNTDKRAFVETWQSFYRKKLKEVWKPAV

SEQ ID NO: 34323 - protein, 978 aa, synthetic construct
  REGION 1..978: note = engineered CasX variant
QEIKRINKIRRRLVKDSNTKKAGKTGPMKTLLVRVMTPDLRERLENLRKKPENIPQPISNTSQANLNKLLTDYTEMKKAILHVYWEEFQKDPVGLMSRVAQPASKKIDQNKLKPEMDEKGNLTTAGFACSQCGQPLFVYKLEQVSEKGKAYTNYFGRCNVAEHEKLILLAQLKPEKDSDEAVTYSLGKFGQRALDFYSIHVTKESTHPVKPLAQIAGNRYASYPVGKALSDACMGTIASFLSKYQDIIIEHQKVVKGNQKRLESLRELAGKENLEYPSVTLPPQPHTKEGVDAYNEVIARVRMWVNLNLWQKLKLSRDDAKPLLRLKGFPSFPLVERQANEVDWWDMVCNVKKLINEKKEDGKVFWQNLAGYKRQEALRPYLSSEEDRKKGKKFARYQLGDLLLHLEKKHGEDWGKVYDEAWERIDKKVEGLSKHIKLEEERRSEDAQSKAALTDWLRAKASFVIEGLKEADKDEFCRCELKLQKWYGDLRGKPFAIEAENSILDISGFSKQYNCAFIWQKDGVKKLNLYLIINYFKGGKLRFKKIKPEAFEANRFYTVINKKSGEIVPMEVNFNFDDPNLIILPLAFGKRQGREFIWNDLLSLETGSLKLANGRVIEKTLYNRRTRQDEPALFVALTFERREVLDSSNIKPMNLIGVDRGENIPAVIALTDPEGCPLSRFKDSLGNPTHILRIGERYKEKQRTIQAKKEVEQRRAGGYSRKYASKAKNLADDMVRNTARDLLYYAVTQDAMLIFENLSRGFGRQGKRTFMAERQYTRMEDWLTAKLAYEGLPSKTYLSKTLAQYTSKTCSNCGFTITSADYDRVLEKLKKTATGWMTTINGKELKVEGQITYYNRYKRQNVVKDLSVELDRLSEESVNNDISSWTKGRSGEALSLLKKRFSHRPVQEKFVCLNCGFETHADEQAALNIARSWLFLRSQEYKKYQTNKTTGNTDKRAFVETWQSFYRKKLKEVWKPAV

SEQ ID NO: 34324 - protein, 978 aa, synthetic construct
  REGION 1..978: note = engineered CasX variant
QEIKRINKIRRRLVKDSNTKKAGKTGPMKTLLVRVMTPDLRERLENLRKKPENIPQPISNTSQANLNKLLTDYTEMKKAILHVYWEEFQKDPVGLMSRVAQPASKKIDQNKLKPEMDEKGNLTTAGFACSQCGQPLFVYKLEQVSEKGKAYTNYFGRCNVAEHEKLILLAQLKPEKDSDEAVTYSLGKFGQRALDFYSIHVTKESTHPVKPLAQIAGNRYASHPVGKALSDACMGTIASFLSKYQDIIIEHQKVVKGNQKRLESLRELAGKENLEYPSVTLPPQPHTKEGVDAYNEVIARVRMWVNLNLWQKLKLSRDDAKPLLRLKGFPSFPLVERQANEVDWWDMVCNVKKLINEKKEDGKVFWQNLAGYKRQEALRPYLSSEEDRKKGKKFARYQLGDLLLHLEKKHGEDWGKVYDEAWERIDKKVEGLSKHIKLEEERRSEDAQSKAALTDWLRAKASFVIEGLKEADKDEFCRCELKLQKWYGDLRGKPFAIEAENSILDISGFSKQYNCAFIWQKDGVKKLNLYLIINYFKGGKLRFKKIKPEAFEANRFYTVINKKSGEIVPMEVNFNFDDPNLIILPLAFGKRQGREFIWNDLLSLETGSLKLANGRVIEKTLYNRRTRQDEPALFVALTFERREVLDSSNIKPMNLIGVDRGENIPAVIALTDPEGCPLSRFKDSLGNPTHILRIGERYKEKQRTIQAKKEVEQRRAGGYSRKYASKAKNLADDMVRNTARDLLYYAVTQDAMLIFENLSRGFGRQGKRTFMAERQYTRMEDWLTAKLAYEGLPSKTYLSKTLAQYTSKTCSNCGFTITSADYDRVLEKLKKTATGWMTTINGKELKVEGQITYYNRYKRQNVVKDLSVELDRLSEESVNNDISSWTKGRSGEALSLLKKRFSHRPVQEKFVCLNCGFETHADEQAALNIARSWLFLRSQEYKKYQTNKTTGNTDKRAFVETWQSFYRKKLKEVWKPAV

SEQ ID NO: 34325 - protein, 978 aa, synthetic construct
  REGION 1..978: note = engineered CasX variant
QEIKRINKIRRRLVKDSNTKKAGKTGPMKTLLVRVMTPDLRERLENLRKKPENIPQPISNTSQANLNKLLTDYTEMKKAILHVYWEEFQKDPVGLMSRVAQPASKKIDQNKLKPEMDEKGNLTTAGFACSQCGQPLFVYKLEQVSEKGKAYTNYFGRCNVAEHEKLILLAQLKPEKDSDEAVTYSLGKFGQRALDFYSIHVTKESTHPVKPLAQIAGNRYASSPVGKALSDACMGTIASFLSKYQDIIIEHQKVVKGNQKRLESLRELAGKENLEYPSVTLPPQPHTKEGVDAYNEVIARVRMWVNLNLWQKLKLSRDDAKPLLRLKGFPSFPLVERQANEVDWWDMVCNVKKLINEKKEDGKVFWQNLAGYKRQEALRPYLSSEEDRKKGKKFARYQLGDLLLHLEKKHGEDWGKVYDEAWERIDKKVEGLSKHIKLEEERRSEDAQSKAALTDWLRAKASFVIEGLKEADKDEFCRCELKLQKWYGDLRGKPFAIEAENSILDISGFSKQYNCAFIWQKDGVKKLNLYLIINYFKGGKLRFKKIKPEAFEANRFYTVINKKSGEIVPMEVNFNFDDPNLIILPLAFGKRQGREFIWNDLLSLETGSLKLANGRVIEKTLYNRRTRQDEPALFVALTFERREVLDSSNIKPMNLIGVDRGENIPAVIALTDPEGCPLSRFKDSLGNPTHILRIGERYKEKQRTIQAKKEVEQRRAGGYSRKYASKAKNLADDMVRNTARDLLYYAVTQDAMLIFENLSRGFGRQGKRTFMAERQYTRMEDWLTAKLAYEGLPSKTYLSKTLAQYTSKTCSNCGFTITSADYDRVLEKLKKTATGWMTTINGKELKVEGQITYYNRYKRQNVVKDLSVELDRLSEESVNNDISSWTKGRSGEALSLLKKRFSHRPVQEKFVCLNCGFETHADEQAALNIARSWLFLRSQEYKKYQTNKTTGNTDKRAFVETWQSFYRKKLKEVWKPAV

SEQ ID NO: 34326 - protein, 978 aa, synthetic construct
  REGION 1..978: note = engineered CasX variant
QEIKRINKIRRRLVKDSNTKKAGKTGPMKTLLVRVMTPDLRERLENLRKKPENIPQPISNTSQANLNKLLTDYTEMKKAILHVYWEEFQKDPVGLMSRVAQPASKKIDQNKLKPEMDEKGNLTTAGFACSQCGQPLFVYKLEQVSEKGKAYTNYFGRCNVAEHEKLILLAQLKPEKDSDEAVTYSLGKFGQRALDFYSIHVTKESTHPVKPLAQIAGNRYASTPVGKALSDACMGTIASFLSKYQDIIIEHQKVVKGNQKRLESLRELAGKENLEYPSVTLPPQPHTKEGVDAYNEVIARVRMWVNLNLWQKLKLSRDDAKPLLRLKGFPSFPLVERQANEVDWWDMVCNVKKLINEKKEDGKVFWQNLAGYKRQEALRPYLSSEEDRKKGKKFARYQLGDLLLHLEKKHGEDWGKVYDEAWERIDKKVEGLSKHIKLEEERRSEDAQSKAALTDWLRAKASFVIEGLKEADKDEFCRCELKLQKWYGDLRGKPFAIEAENSILDISGFSKQYNCAFIWQKDGVKKLNLYLIINYFKGGKLRFKKIKPEAFEANRFYTVINKKSGEIVPMEVNFNFDDPNLIILPLAFGKRQGREFIWNDLLSLETGSLKLANGRVIEKTLYNRRTRQDEPALFVALTFERREVLDSSNIKPMNLIGVDRGENIPAVIALTDPEGCPLSRFKDSLGNPTHILRIGERYKEKQRTIQAKKEVEQRRAGGYSRKYASKAKNLADDMVRNTARDLLYYAVTQDAMLIFENLSRGFGRQGKRTFMAERQYTRMEDWLTAKLAYEGLPSKTYLSKTLAQYTSKTCSNCGFTITSADYDRVLEKLKKTATGWMTTINGKELKVEGQITYYNRYKRQNVVKDLSVELDRLSEESVNNDISSWTKGRSGEALSLLKKRFSHRPVQEKFVCLNCGFETHADEQAALNIARSWLFLRSQEYKKYQTNKTTGNTDKRAFVETWQSFYRKKLKEVWKPAV

SEQ ID NO: 34327 - protein, 978 aa, synthetic construct
  REGION 1..978: note = engineered CasX variant
QEIKRINKIRRRLVKDSNTKKAGKTGPMKTLLVRVMTPDLRERLENLRKKPENIPQPISNTSQANLNKLLTDYTEMKKAILHVYWEEFQKDPVGLMSRVAQPASKKIDQNKLKPEMDEKGNLTTAGFACSQCGQPLFVYKLEQVSEKGKAYTNYFGRCNVAEHEKLILLAQLKPEKDSDEAVTYSLGKFGQRALDFYSIHVTKESTHPVKPLAQIAGNRYASAPVGKALSDACMGTIASFLSKYQDIIIEHQKVVKGNQKRLESLRELAGKENLEYPSVTLPPQPHTKEGVDAYNEVIARVRMWVNLNLWQKLKLSRDDAKPLLRLKGFPSFPLVERQANEVDWWDMVCNVKKLINEKKEDGKVFWQNLAGYKRQEALRPYLSSEEDRKKGKKFARYQLGDLLLHLEKKHGEDWGKVYDEAWERIDKKVEGLSKHIKLEEERRSEDAQSKAALTDWLRAKASFVIEGLKEADKDEFCRCELKLQKWYGDLRGKPFAIEAENSILDISGFSKQYNCAFIWQKDGVKKLNLYLIINYFKGGKLRFKKIKPEAFEANRFYTVINKKSGEIVPMEVNFNFDDPNLIILPLAFGKRQGREFIWNDLLSLETGSLKLANGRVIEKTLYNRRTRQDEPALFVALTFERREVLDSSNIKPMNLIGVDRGENIPAVIALTDPEGCPLSRFKDSLGNPTHILRIGERYKEKQRTIQAKKEVEQRRAGGYSRKYASKAKNLADDMVRNTARDLLYYAVTQDAMLIFENLSRGFGRQGKRTFMAERQYTRMEDWLTAKLAYEGLPSKTYLSKTLAQYTSKTCSNCGFTITSADYDRVLEKLKKTATGWMTTINGKELKVEGQITYYNRYKRQNVVKDLSVELDRLSEESVNNDISSWTKGRSGEALSLLKKRFSHRPVQEKFVCLNCGFETHADEQAALNIARSWLFLRSQEYKKYQTNKTTGNTDKRAFVETWQSFYRKKLKEVWKPAV

SEQ ID NO: 34328 - protein, 978 aa, synthetic construct
  REGION 1..978: note = engineered CasX variant
QEIKRINKIRRRLVKDSNTKKAGKTGPMKTLLVRVMTPDLRERLENLRKKPENIPQPISNTSQANLNKLLTDYTEMKKAILHVYWEEFQKDPVGLMSRVAQPASKKIDQNKLKPEMDEKGNLTTAGFACSQCGQPLFVYKLEQVSEKGKAYTNYFGRCNVAEHEKLILLAQLKPEKDSDEAVTYSLGKFGQRALDFYSIHVTKESTHPVKPLAQIAGNRYASVPVGKALSDACMGTIASFLSKYQDIIIEHQKVVKGNQKRLESLRELAGKENLEYPSVTLPPQPHTKEGVDAYNEVIARVRMWVNLNLWQKLKLSRDDAKPLLRLKGFPSFPLVERQANEVDWWDMVCNVKKLINEKKEDGKVFWQNLAGYKRQEALRPYLSSEEDRKKGKKFARYQLGDLLLHLEKKHGEDWGKVYDEAWERIDKKVEGLSKHIKLEEERRSEDAQSKAALTDWLRAKASFVIEGLKEADKDEFCRCELKLQKWYGDLRGKPFAIEAENSILDISGFSKQYNCAFIWQKDGVKKLNLYLIINYFKGGKLRFKKIKPEAFEANRFYTVINKKSGEIVPMEVNFNFDDPNLIILPLAFGKRQGREFIWNDLLSLETGSLKLANGRVIEKTLYNRRTRQDEPALFVALTFERREVLDSSNIKPMNLIGVDRGENIPAVIALTDPEGCPLSRFKDSLGNPTHILRIGERYKEKQRTIQAKKEVEQRRAGGYSRKYASKAKNLADDMVRNTARDLLYYAVTQDAMLIFENLSRGFGRQGKRTFMAERQYTRMEDWLTAKLAYEGLPSKTYLSKTLAQYTSKTCSNCGFTITSADYDRVLEKLKKTATGWMTTINGKELKVEGQITYYNRYKRQNVVKDLSVELDRLSEESVNNDISSWTKGRSGEALSLLKKRFSHRPVQEKFVCLNCGFETHADEQAALNIARSWLFLRSQEYKKYQTNKTTGNTDKRAFVETWQSFYRKKLKEVWKPAV

SEQ ID NO: 34329 - protein, 978 aa, synthetic construct
  REGION 1..978: note = engineered CasX variant
QEIKRINKIRRRLVKDSNTKKAGKTGPMKTLLVRVMTPDLRERLENLRKKPENIPQPISNTSQANLNKLLTDYTEMKKAILHVYWEEFQKDPVGLMSRVAQPASKKIDQNKLKPEMDEKGNLTTAGFACSQCGQPLFVYKLEQVSEKGKAYTNYFGRCNVAEHEKLIKLAQLKPEKDSDEAVTYSLGKFGQRALDFYSIHVTKESTHPVKPLAQIAGNRYASGPVGKALSDACMGTIASFLSKYQDIIIEHQKVVKGNQKRLESLRELAGKENLEYPSVTLPPQPHTKEGVDAYNEVIARVRMWVNLNLWQKLKLSRDDAKPLLRLKGFPSFPLVERQANEVDWWDMVCNVKKLINEKKEDGKVFWQNLAGYKRQEALRPYLSSEEDRKKGKKFARYQLGDLLLHLEKKHGEDWGKVYDEAWERIDKKVEGLSKHIKLEEERRSEDAQSKAALTDWLRAKASFVIEGLKEADKDEFCRCELKLQKWYGDLRGKPFAIEAENSILDISGFSKQYNCAFIWQKDGVKKLNLYLIINYFKGGKLRFKKIKPEAFEANRFYTVINKKSGEIVPMEVNFNFDDPNLIILPLAFGKRQGREFIWNDLLSLETGSLKLANGRVIEKTLYNRRTRQDEPALFVALTFERREVLDSSNIKPMNLIGVDRGENIPAVIALTDPEGCPLSRFKDSLGNPTHILRIGERYKEKQRTIQAKKEVEQRRAGGYSRKYASKAKNLADDMVRNTARDLLYYAVTQDAMLIFENLSRGFGRQGKRTFMAERQYTRMEDWLTAKLAYEGLPSKTYLSKTLAQYTSKTCSNCGFTITSADYDRVLEKLKKTATGWMTTINGKELKVEGQITYYNRYKRQNVVKDLSVELDRLSEESVNNDISSWTKGRSGEALSLLKKRFSHRPVQEKFVCLNCGFETHADEQAALNIARSWLFLRSQEYKKYQTNKTTGNTDKRAFVETWQSFYRKKLKEVWKPAV

SEQ ID NO: 34330 - protein, 977 aa, synthetic construct
  REGION 1..977: note = engineered CasX variant
QEIKRINKIRRRLVKDSNTKKAGKTGPMKTLLVRVMTPDLRERLENLRKKPENIPQPISNTSQANLNKLLTDYTEMKKAILHVYWEEFQKDPVGLMSRVAQPASKKIDQNKLKPEMDEKGNLTTAGFACSQCGQPLFVYKLEQVSEKGKAYTNYFGRCNVAEHEKLILLAQLKPEKDSDEAVTYSLGKFGQRALDFYSIHVTKESTHPVKPLAQIAGNRYASPVGKALSDACMGTIASFLSKYQDIIIEHQKVVKGNQKRLESLRELAGKENLEYPSVTLPPQPHTKEGVDAYNEVIARVRMWVNLNLWQKLKLSRDDAKPLLRLKGFPSFPLVERQANEVDWWDMVCNVKKLINEKKEDGKVFWQNLAGYKRQEALRPYLSSEEDRKKGKKFARYQLGDLLLHLEKKHGEDWGKVYDEAWERIDKKVEGLSKHIKLEEERRSEDAQSKAALTDWLRAKASFVIEGLKEADKDEFCRCELKLQKWYGDLRGKPFAIEAENSILDISGFSKQYNCAFIWQKDGVKKLNLYLIINYFKGGKLRFKKIKPEAFEANRFYTVINKKSGEIVPMEVNFNFDDPNLIILPLAFGKRQGREFIWNDLLSLETGSLKLANGRVIEKTLYNRRTRQDEPALFVALTFERREVLDSSNIKPMNLIGVDRGENIPAVIALTDPEGCPLSRFKDSLGNPTHILRIGERYKEKQRTIQAKKEVEQRRAGGYSRKYASKAKNLADDMVRNTARDLLYYAVTQDAMLIFENLSRGFGRQGKRTFMAERQYTRMEDWLTAKLAYEGLPSKTYLSKTLAQYTSKTCSNCGFTITSADYDRVLEKLKKTATGWMTTINGKELKVEGQITYYNRYKRQNVVKDLSVELDRLSEESVNNDISSWTKGRSGEALSLLKKRFSHRPVQEKFVCLNCGFETHADEQAALNIARSWLFLRSQEYKKYQTNKTTGNTDKRAFVETWQSFYRKKLKEVWKPAV

SEQ ID NO: 34331 - protein, 978 aa, synthetic construct
  REGION 1..978: note = engineered CasX variant
QEIKRINKIRRRLVKDSNTKKAGKTGPMKTLLVRVMTPDLRERLENLRKKPENIPQPISNTSQANLNKLLTDYTEMKKAILHVYWEEFQKDPVGLMSRVAQPASKKIDQNKLKPEMDEKGNLTTAGFACSQCGQPLFVYKLEQVSEKGKAYTNYFGRCNVAEHEKLILLAQLKPEKDSDEAVTYSLGKFGQRALDFYSIHVTKESTHPVKPLAQIAGNRYASYPVGKALSDACMGTIASFLSKYQDIIIEHQKVVKGNQKRLESLRELAGKENLEYPSVTLPPQPHTKEGVDAYNEVIARVRMWVNLNLWQKLKLSRDDAKPLLRLKGFPSFPLVERQANEVDWWDMVCNVKKLINEKKEDGKVFWQNLAGYKRQEALRPYLSSEEDRKKGKKFARYQLGDLLLHLEKKHGEDWGKVYDEAWERIDKKVEGLSKHIKLEEERRSEDAQSKAALTDWLRAKASFVIEGLKEADKDEFCRCELKLQKWYGDLRGKPFAIEAENSILDISGFSKQYNCAFIWQKDGVKKLNLYLIINYFKGGKLRFKKIKPEAFEANRFYTVINKKSGEIVPMEVNFNFDDPNLIILPLAFGKRQGREFIWNDLLSLETGSLQLANGRVIEKTLYNRRTRQDEPALFVALTFERREVLDSSNIKPMNLIGVDRGENIPAVIALTDPEGCPLSRFKDSLGNPTHILRIGESYKEKQRTIQAKKEVEQRRAGGYSRKYASKAKNLADDMVRNTARDLLYYAVTQDAMLIFENLSRGFGRQGKRTFMAERQYTRMEDWLTAKLAYEGLPSKTYLSKTLAQYTSKTCSNCGFTITSADYDRVLEKLKKTATGWMTTINGKELKVEGQITYYNRYKRQNVVKDLSVELDRLSEESVNNDISSWTKGRSGEALSLLKKRFSHRPVQEKFVCLNCGFETHADEQAALNIARSWLFLRSQEYKKYQTNKTTGNTDKRAFVETWQSFYRKKLKEVWKPAV

SEQ ID NO: 34332 - protein, 978 aa, synthetic construct
  REGION 1..978: note = engineered CasX variant
QEIKRINKIRRRLVKDSNTKKAGKTGPMKTLLVRVMTPDLRERLENLRKKPENIPQPISNTSQANLNKLLTDYTEMKKAILHVYWEEFQKDPVGLMSRVAQPASKKIDQNKLKPEMDEKGNLTTAGFACSQCGQPLFVYKLEQVSEKGKAYTNYFGRCNVAEHEKLILLAQLKPEKDSDEAVTYSLGKFGQRALDFYSIHVTKESTHPVKPLAQIAGNRYASHPVGKALSDACMGTIASFLSKYQDIIIEHQKVVKGNQKRLESLRELAGKENLEYPSVTLPPQPHTKEGVDAYNEVIARVRMWVNLNLWQKLKLSRDDAKPLLRLKGFPSFPLVERQANEVDWWDMVCNVKKLINEKKEDGKVFWQNLAGYKRQEALRPYLSSEEDRKKGKKFARYQLGDLLLHLEKKHGEDWGKVYDEAWERIDKKVEGLSKHIKLEEERRSEDAQSKAALTDWLRAKASFVIEGLKEADKDEFCRCELKLQKWYGDLRGKPFAIEAENSILDISGFSKQYNCAFIWQKDGVKKLNLYLIINYFKGGKLRFKKIKPEAFEANRFYTVINKKSGEIVPMEVNFNFDDPNLIILPLAFGKRQGREFIWNDLLSLETGSLQLANGRVIEKTLYNRRTRQDEPALFVALTFERREVLDSSNIKPMNLIGVDRGENIPAVIALTDPEGCPLSRFKDSLGNPTHILRIGESYKEKQRTIQAKKEVEQRRAGGYSRKYASKAKNLADDMVRNTARDLLYYAVTQDAMLIFENLSRGFGRQGKRTFMAERQYTRMEDWLTAKLAYEGLPSKTYLSKTLAQYTSKTCSNCGFTITSADYDRVLEKLKKTATGWMTTINGKELKVEGQITYYNRYKRQNVVKDLSVELDRLSEESVNNDISSWTKGRSGEALSLLKKRFSHRPVQEKFVCLNCGFETHADEQAALNIARSWLFLRSQEYKKYQTNKTTGNTDKRAFVETWQSFYRKKLKEVWKPAV

SEQ ID NO: 34333 - protein, 978 aa, synthetic construct
  REGION 1..978: note = engineered CasX variant
QEIKRINKIRRRLVKDSNTKKAGKTGPMKTLLVRVMTPDLRERLENLRKKPENIPQPISNTSQANLNKLLTDYTEMKKAILHVYWEEFQKDPVGLMSRVAQPASKKIDQNKLKPEMDEKGNLTTAGFACSQCGQPLFVYKLEQVSEKGKAYTNYFGRCNVAEHEKLILLAQLKPEKDSDEAVTYSLGKFGQRALDFYSIHVTKESTHPVKPLAQIAGNRYASSPVGKALSDACMGTIASFLSKYQDIIIEHQKVVKGNQKRLESLRELAGKENLEYPSVTLPPQPHTKEGVDAYNEVIARVRMWVNLNLWQKLKLSRDDAKPLLRLKGFPSFPLVERQANEVDWWDMVCNVKKLINEKKEDGKVFWQNLAGYKRQEALRPYLSSEEDRKKGKKFARYQLGDLLLHLEKKHGEDWGKVYDEAWERIDKKVEGLSKHIKLEEERRSEDAQSKAALTDWLRAKASFVIEGLKEADKDEFCRCELKLQKWYGDLRGKPFAIEAENSILDISGFSKQYNCAFIWQKDGVKKLNLYLIINYFKGGKLRFKKIKPEAFEANRFYTVINKKSGEIVPMEVNFNFDDPNLIILPLAFGKRQGREFIWNDLLSLETGSLQLANGRVIEKTLYNRRTRQDEPALFVALTFERREVLDSSNIKPMNLIGVDRGENIPAVIALTDPEGCPLSRFKDSLGNPTHILRIGESYKEKQRTIQAKKEVEQRRAGGYSRKYASKAKNLADDMVRNTARDLLYYAVTQDAMLIFENLSRGFGRQGKRTFMAERQYTRMEDWLTAKLAYEGLPSKTYLSKTLAQYTSKTCSNCGFTITSADYDRVLEKLKKTATGWMTTINGKELKVEGQITYYNRYKRQNVVKDLSVELDRLSEESVNNDISSWTKGRSGEALSLLKKRFSHRPVQEKFVCLNCGFETHADEQAALNIARSWLFLRSQEYKKYQTNKTTGNTDKRAFVETWQSFYRKKLKEVWKPAV

SEQ ID NO: 34334 - protein, 978 aa, synthetic construct
  REGION 1..978: note = engineered CasX variant
QEIKRINKIRRRLVKDSNTKKAGKTGPMKTLLVRVMTPDLRERLENLRKKPENIPQPISNTSQANLNKLLTDYTEMKKAILHVYWEEFQKDPVGLMSRVAQPASKKIDQNKLKPEMDEKGNLTTAGFACSQCGQPLFVYKLEQVSEKGKAYTNYFGRCNVAEHEKLILLAQLKPEKDSDEAVTYSLGKFGQRALDFYSIHVTKESTHPVKPLAQIAGNRYASTPVGKALSDACMGTIASFLSKYQDIIIEHQKVVKGNQKRLESLRELAGKENLEYPSVTLPPQPHTKEGVDAYNEVIARVRMWVNLNLWQKLKLSRDDAKPLLRLKGFPSFPLVERQANEVDWWDMVCNVKKLINEKKEDGKVFWQNLAGYKRQEALRPYLSSEEDRKKGKKFARYQLGDLLLHLEKKHGEDWGKVYDEAWERIDKKVEGLSKHIKLEEERRSEDAQSKAALTDWLRAKASFVIEGLKEADKDEFCRCELKLQKWYGDLRGKPFAIEAENSILDISGFSKQYNCAFIWQKDGVKKLNLYLIINYFKGGKLRFKKIKPEAFEANRFYTVINKKSGEIVPMEVNFNFDDPNLIILPLAFGKRQGREFIWNDLLSLETGSLQLANGRVIEKTLYNRRTRQDEPALFVALTFERREVLDSSNIKPMNLIGVDRGENIPAVIALTDPEGCPLSRFKDSLGNPTHILRIGESYKEKQRTIQAKKEVEQRRAGGYSRKYASKAKNLADDMVRNTARDLLYYAVTQDAMLIFENLSRGFGRQGKRTFMAERQYTRMEDWLTAKLAYEGLPSKTYLSKTLAQYTSKTCSNCGFTITSADYDRVLEKLKKTATGWMTTINGKELKVEGQITYYNRYKRQNVVKDLSVELDRLSEESVNNDISSWTKGRSGEALSLLKKRFSHRPVQEKFVCLNCGFETHADEQAALNIARSWLFLRSQEYKKYQTNKTTGNTDKRAFVETWQSFYRKKLKEVWKPAV

SEQ ID NO: 34335 - protein, 978 aa, synthetic construct
  REGION 1..978: note = engineered CasX variant
QEIKRINKIRRRLVKDSNTKKAGKTGPMKTLLVRVMTPDLRERLENLRKKPENIPQPISNTSQANLNKLLTDYTEMKKAILHVYWEEFQKDPVGLMSRVAQPASKKIDQNKLKPEMDEKGNLTTAGFACSQCGQPLFVYKLEQVSEKGKAYTNYFGRCNVAEHEKLILLAQLKPEKDSDEAVTYSLGKFGQRALDFYSIHVTKESTHPVKPLAQIAGNRYASAPVGKALSDACMGTIASFLSKYQDIIIEHQKVVKGNQKRLESLRELAGKENLEYPSVTLPPQPHTKEGVDAYNEVIARVRMWVNLNLWQKLKLSRDDAKPLLRLKGFPSFPLVERQANEVDWWDMVCNVKKLINEKKEDGKVFWQNLAGYKRQEALRPYLSSEEDRKKGKKFARYQLGDLLLHLEKKHGEDWGKVYDEAWERIDKKVEGLSKHIKLEEERRSEDAQSKAALTDWLRAKASFVIEGLKEADKDEFCRCELKLQKWYGDLRGKPFAIEAENSILDISGFSKQYNCAFIWQKDGVKKLNLYLIINYFKGGKLRFKKIKPEAFEANRFYTVINKKSGEIVPMEVNFNFDDPNLIILPLAFGKRQGREFIWNDLLSLETGSLQLANGRVIEKTLYNRRTRQDEPALFVALTFERREVLDSSNIKPMNLIGVDRGENIPAVIALTDPEGCPLSRFKDSLGNPTHILRIGESYKEKQRTIQAKKEVEQRRAGGYSRKYASKAKNLADDMVRNTARDLLYYAVTQDAMLIFENLSRGFGRQGKRTFMAERQYTRMEDWLTAKLAYEGLPSKTYLSKTLAQYTSKTCSNCGFTITSADYDRVLEKLKKTATGWMTTINGKELKVEGQITYYNRYKRQNVVKDLSVELDRLSEESVNNDISSWTKGRSGEALSLLKKRFSHRPVQEKFVCLNCGFETHADEQAALNIARSWLFLRSQEYKKYQTNKTTGNTDKRAFVETWQSFYRKKLKEVWKPAV

SEQ ID NO: 34336 - protein, 978 aa, synthetic construct
  REGION 1..978: note = engineered CasX variant
QEIKRINKIRRRLVKDSNTKKAGKTGPMKTLLVRVMTPDLRERLENLRKKPENIPQPISNTSQANLNKLLTDYTEMKKAILHVYWEEFQKDPVGLMSRVAQPASKKIDQNKLKPEMDEKGNLTTAGFACSQCGQPLFVYKLEQVSEKGKAYTNYFGRCNVAEHEKLILLAQLKPEKDSDEAVTYSLGKFGQRALDFYSIHVTKESTHPVKPLAQIAGNRYASVPVGKALSDACMGTIASFLSKYQDIIIEHQKVVKGNQKRLESLRELAGKENLEYPSVTLPPQPHTKEGVDAYNEVIARVRMWVNLNLWQKLKLSRDDAKPLLRLKGFPSFPLVERQANEVDWWDMVCNVKKLINEKKEDGKVFWQNLAGYKRQEALRPYLSSEEDRKKGKKFARYQLGDLLLHLEKKHGEDWGKVYDEAWERIDKKVEGLSKHIKLEEERRSEDAQSKAALTDWLRAKASFVIEGLKEADKDEFCRCELKLQKWYGDLRGKPFAIEAENSILDISGFSKQYNCAFIWQKDGVKKLNLYLIINYFKGGKLRFKKIKPEAFEANRFYTVINKKSGEIVPMEVNFNFDDPNLIILPLAFGKRQGREFIWNDLLSLETGSLQLANGRVIEKTLYNRRTRQDEPALFVALTFERREVLDSSNIKPMNLIGVDRGENIPAVIALTDPEGCPLSRFKDSLGNPTHILRIGESYKEKQRTIQAKKEVEQRRAGGYSRKYASKAKNLADDMVRNTARDLLYYAVTQDAMLIFENLSRGFGRQGKRTFMAERQYTRMEDWLTAKLAYEGLPSKTYLSKTLAQYTSKTCSNCGFTITSADYDRVLEKLKKTATGWMTTINGKELKVEGQITYYNRYKRQNVVKDLSVELDRLSEESVNNDISSWTKGRSGEALSLLKKRFSHRPVQEKFVCLNCGFETHADEQAALNIARSWLFLRSQEYKKYQTNKTTGNTDKRAFVETWQSFYRKKLKEVWKPAV

SEQ ID NO: 34337 - protein, 978 aa, synthetic construct
  REGION 1..978: note = engineered CasX variant
QEIKRINKIRRRLVKDSNTKKAGKTGPMKTLLVRVMTPDLRERLENLRKKPENIPQPISNTSQANLNKLLTDYTEMKKAILHVYWEEFQKDPVGLMSRVAQPASKKIDQNKLKPEMDEKGNLTTAGFACSQCGQPLFVYKLEQVSEKGKAYTNYFGRCNVAEHEKLIKLAQLKPEKDSDEAVTYSLGKFGQRALDFYSIHVTKESTHPVKPLAQIAGNRYASGPVGKALSDACMGTIASFLSKYQDIIIEHQKVVKGNQKRLESLRELAGKENLEYPSVTLPPQPHTKEGVDAYNEVIARVRMWVNLNLWQKLKLSRDDAKPLLRLKGFPSFPLVERQANEVDWWDMVCNVKKLINEKKEDGKVFWQNLAGYKRQEALRPYLSSEEDRKKGKKFARYQLGDLLLHLEKKHGEDWGKVYDEAWERIDKKVEGLSKHIKLEEERRSEDAQSKAALTDWLRAKASFVIEGLKEADKDEFCRCELKLQKWYGDLRGKPFAIEAENSILDISGFSKQYNCAFIWQKDGVKKLNLYLIINYFKGGKLRFKKIKPEAFEANRFYTVINKKSGEIVPMEVNFNFDDPNLIILPLAFGKRQGREFIWNDLLSLETGSLQLANGRVIEKTLYNRRTRQDEPALFVALTFERREVLDSSNIKPMNLIGVDRGENIPAVIALTDPEGCPLSRFKDSLGNPTHILRIGESYKEKQRTIQAKKEVEQRRAGGYSRKYASKAKNLADDMVRNTARDLLYYAVTQDAMLIFENLSRGFGRQGKRTFMAERQYTRMEDWLTAKLAYEGLPSKTYLSKTLAQYTSKTCSNCGFTITSADYDRVLEKLKKTATGWMTTINGKELKVEGQITYYNRYKRQNVVKDLSVELDRLSEESVNNDISSWTKGRSGEALSLLKKRFSHRPVQEKFVCLNCGFETHADEQAALNIARSWLFLRSQEYKKYQTNKTTGNTDKRAFVETWQSFYRKKLKEVWKPAV

SEQ ID NO: 34338 - protein, 977 aa, synthetic construct
  REGION 1..977: note = engineered CasX variant
QEIKRINKIRRRLVKDSNTKKAGKTGPMKTLLVRVMTPDLRERLENLRKKPENIPQPISNTSQANLNKLLTDYTEMKKAILHVYWEEFQKDPVGLMSRVAQPASKKIDQNKLKPEMDEKGNLTTAGFACSQCGQPLFVYKLEQVSEKGKAYTNYFGRCNVAEHEKLILLAQLKPEKDSDEAVTYSLGKFGQRALDFYSIHVTKESTHPVKPLAQIAGNRYASPVGKALSDACMGTIASFLSKYQDIIIEHQKVVKGNQKRLESLRELAGKENLEYPSVTLPPQPHTKEGVDAYNEVIARVRMWVNLNLWQKLKLSRDDAKPLLRLKGFPSFPLVERQANEVDWWDMVCNVKKLINEKKEDGKVFWQNLAGYKRQEALRPYLSSEEDRKKGKKFARYQLGDLLLHLEKKHGEDWGKVYDEAWERIDKKVEGLSKHIKLEEERRSEDAQSKAALTDWLRAKASFVIEGLKEADKDEFCRCELKLQKWYGDLRGKPFAIEAENSILDISGFSKQYNCAFIWQKDGVKKLNLYLIINYFKGGKLRFKKIKPEAFEANRFYTVINKKSGEIVPMEVNFNFDDPNLIILPLAFGKRQGREFIWNDLLSLETGSLQLANGRVIEKTLYNRRTRQDEPALFVALTFERREVLDSSNIKPMNLIGVDRGENIPAVIALTDPEGCPLSRFKDSLGNPTHILRIGESYKEKQRTIQAKKEVEQRRAGGYSRKYASKAKNLADDMVRNTARDLLYYAVTQDAMLIFENLSRGFGRQGKRTFMAERQYTRMEDWLTAKLAYEGLPSKTYLSKTLAQYTSKTCSNCGFTITSADYDRVLEKLKKTATGWMTTINGKELKVEGQITYYNRYKRQNVVKDLSVELDRLSEESVNNDISSWTKGRSGEALSLLKKRFSHRPVQEKFVCLNCGFETHADEQAALNIARSWLFLRSQEYKKYQTNKTTGNTDKRAFVETWQSFYRKKLKEVWKPAV

SEQ ID NO: 34339 - protein, 978 aa, synthetic construct
  REGION 1..978: note = engineered CasX variant
QEIKRINKIRRRLVKDSNTKKAGKTGPMKTLLVRVMTPDLRERLENLRKKPENIPQPISNTSRANLNKLLTDYTEMKKAILHVYDEEFQKDPVGLMSRVAQPASKKIDQNKLKPEMDEKGNLTTAGFACSQCGQPLFVYKLEQVSEKGKAYTNYFGRCNVAEHEKLIKLAQLKPEKDSDEAVTYSLGKFGQRALDFYSIHVTKESTHPVKPLAQIAGNRYASYPVGKALSDACMGTIASFLSKYQDIIIEHQKVVKGNQKRLESLRELAGKENLEYPSVTLPPQPHTKEGVDAYNEVIARVRMWVNLNLWQKLKLSRDDAKPLLRLKGFPSFPLVERQANEVDWWDMVCNVKKLINEKKEDGKVFWQNLAGYKRQEALRPYLSSEEDRKKGKKFARYQLGDLLLHLEKKHGEDWGKVYDEAWERIDKKVEGLSKHIKLEEERRSEDAQSKAALTDWLRAKASFVIEGLKEADKDEFCRCELKLQKWYGDLRGKPFAIEAENSILDISGFSKQYNCAFIWQKDGVKKLNLYLIINYFKGGKLRFKKIKPEAFEANRFYTVINKKSGEIVPMEVNFNFDDPNLIILPLAFGKRQGREFIWNDLLSLETGSLKLANGRVIEKTLYNRRTRQDEPALFVALTFERREVLDSSNIKPMNLIGVDRGENIPAVIALTDPEGCPLSRFKDSLGNPTHILRIGESYKEKQRTIQAKKEVEQRRAGGYSRKYASKAKNLADDMVRNTARDLLYYAVTQDAMLIFENLSRGFGRQGKRTFMAERQYTRMEDWLTAKLAYEGLPSKTYLSKTLAQYTSKTCSNCGFTITSADYDRVLEKLKKTATGWMTTINGKELKVEGQITYYNRYKRQNVVKDLSVELDRLSEESVNNDISSWTKGRSGEALSLLKKRFSHRPVQEKFVCLNCGFETHADEQAALNIARSWLFLRSQEYKKYQTNKTTGNTDKRAFVETWQSFYRKKLKEVWKPAV

SEQ ID NO: 34340 - protein, 978 aa, synthetic construct
  REGION 1..978: note = engineered CasX variant
QEIKRINKIRRRLVKDSNTKKAGKTGPMKTLLVRVMTPDLRERLENLRKKPENIPQPISNTSRANLNKLLTDYTEMKKAILHVYDEEFQKDPVGLMSRVAQPASKKIDQNKLKPEMDEKGNLTTAGFACSQCGQPLFVYKLEQVSEKGKAYTNYFGRCNVAEHEKLIKLAQLKPEKDSDEAVTYSLGKFGQRALDFYSIHVTKESTHPVKPLAQIAGNRYASHPVGKALSDACMGTIASFLSKYQDIIIEHQKVVKGNQKRLESLRELAGKENLEYPSVTLPPQPHTKEGVDAYNEVIARVRMWVNLNLWQKLKLSRDDAKPLLRLKGFPSFPLVERQANEVDWWDMVCNVKKLINEKKEDGKVFWQNLAGYKRQEALRPYLSSEEDRKKGKKFARYQLGDLLLHLEKKHGEDWGKVYDEAWERIDKKVEGLSKHIKLEEERRSEDAQSKAALTDWLRAKASFVIEGLKEADKDEFCRCELKLQKWYGDLRGKPFAIEAENSILDISGFSKQYNCAFIWQKDGVKKLNLYLIINYFKGGKLRFKKIKPEAFEANRFYTVINKKSGEIVPMEVNFNFDDPNLIILPLAFGKRQGREFIWNDLLSLETGSLKLANGRVIEKTLYNRRTRQDEPALFVALTFERREVLDSSNIKPMNLIGVDRGENIPAVIALTDPEGCPLSRFKDSLGNPTHILRIGESYKEKQRTIQAKKEVEQRRAGGYSRKYASKAKNLADDMVRNTARDLLYYAVTQDAMLIFENLSRGFGRQGKRTFMAERQYTRMEDWLTAKLAYEGLPSKTYLSKTLAQYTSKTCSNCGFTITSADYDRVLEKLKKTATGWMTTINGKELKVEGQITYYNRYKRQNVVKDLSVELDRLSEESVNNDISSWTKGRSGEALSLLKKRFSHRPVQEKFVCLNCGFETHADEQAALNIARSWLFLRSQEYKKYQTNKTTGNTDKRAFVETWQSFYRKKLKEVWKPAV

SEQ ID NO: 34341 - protein, 978 aa, synthetic construct
  REGION 1..978: note = engineered CasX variant
QEIKRINKIRRRLVKDSNTKKAGKTGPMKTLLVRVMTPDLRERLENLRKKPENIPQPISNTSRANLNKLLTDYTEMKKAILHVYDEEFQKDPVGLMSRVAQPASKKIDQNKLKPEMDEKGNLTTAGFACSQCGQPLFVYKLEQVSEKGKAYTNYFGRCNVAEHEKLIKLAQLKPEKDSDEAVTYSLGKFGQRALDFYSIHVTKESTHPVKPLAQIAGNRYASTPVGKALSDACMGTIASFLSKYQDIIIEHQKVVKGNQKRLESLRELAGKENLEYPSVTLPPQPHTKEGVDAYNEVIARVRMWVNLNLWQKLKLSRDDAKPLLRLKGFPSFPLVERQANEVDWWDMVCNVKKLINEKKEDGKVFWQNLAGYKRQEALRPYLSSEEDRKKGKKFARYQLGDLLLHLEKKHGEDWGKVYDEAWERIDKKVEGLSKHIKLEEERRSEDAQSKAALTDWLRAKASFVIEGLKEADKDEFCRCELKLQKWYGDLRGKPFAIEAENSILDISGFSKQYNCAFIWQKDGVKKLNLYLIINYFKGGKLRFKKIKPEAFEANRFYTVINKKSGEIVPMEVNFNFDDPNLIILPLAFGKRQGREFIWNDLLSLETGSLKLANGRVIEKTLYNRRTRQDEPALFVALTFERREVLDSSNIKPMNLIGVDRGENIPAVIALTDPEGCPLSRFKDSLGNPTHILRIGESYKEKQRTIQAKKEVEQRRAGGYSRKYASKAKNLADDMVRNTARDLLYYAVTQDAMLIFENLSRGFGRQGKRTFMAERQYTRMEDWLTAKLAYEGLPSKTYLSKTLAQYTSKTCSNCGFTITSADYDRVLEKLKKTATGWMTTINGKELKVEGQITYYNRYKRQNVVKDLSVELDRLSEESVNNDISSWTKGRSGEALSLLKKRFSHRPVQEKFVCLNCGFETHADEQAALNIARSWLFLRSQEYKKYQTNKTTGNTDKRAFVETWQSFYRKKLKEVWKPAV

SEQ ID NO: 34342 - protein, 978 aa, synthetic construct
  REGION 1..978: note = engineered CasX variant
QEIKRINKIRRRLVKDSNTKKAGKTGPMKTLLVRVMTPDLRERLENLRKKPENIPQPISNTSRANLNKLLTDYTEMKKAILHVYDEEFQKDPVGLMSRVAQPASKKIDQNKLKPEMDEKGNLTTAGFACSQCGQPLFVYKLEQVSEKGKAYTNYFGRCNVAEHEKLIKLAQLKPEKDSDEAVTYSLGKFGQRALDFYSIHVTKESTHPVKPLAQIAGNRYASAPVGKALSDACMGTIASFLSKYQDIIIEHQKVVKGNQKRLESLRELAGKENLEYPSVTLPPQPHTKEGVDAYNEVIARVRMWVNLNLWQKLKLSRDDAKPLLRLKGFPSFPLVERQANEVDWWDMVCNVKKLINEKKEDGKVFWQNLAGYKRQEALRPYLSSEEDRKKGKKFARYQLGDLLLHLEKKHGEDWGKVYDEAWERIDKKVEGLSKHIKLEEERRSEDAQSKAALTDWLRAKASFVIEGLKEADKDEFCRCELKLQKWYGDLRGKPFAIEAENSILDISGFSKQYNCAFIWQKDGVKKLNLYLIINYFKGGKLRFKKIKPEAFEANRFYTVINKKSGEIVPMEVNFNFDDPNLIILPLAFGKRQGREFIWNDLLSLETGSLKLANGRVIEKTLYNRRTRQDEPALFVALTFERREVLDSSNIKPMNLIGVDRGENIPAVIALTDPEGCPLSRFKDSLGNPTHILRIGESYKEKQRTIQAKKEVEQRRAGGYSRKYASKAKNLADDMVRNTARDLLYYAVTQDAMLIFENLSRGFGRQGKRTFMAERQYTRMEDWLTAKLAYEGLPSKTYLSKTLAQYTSKTCSNCGFTITSADYDRVLEKLKKTATGWMTTINGKELKVEGQITYYNRYKRQNVVKDLSVELDRLSEESVNNDISSWTKGRSGEALSLLKKRFSHRPVQEKFVCLNCGFETHADEQAALNIARSWLFLRSQEYKKYQTNKTTGNTDKRAFVETWQSFYRKKLKEVWKPAV

SEQ ID NO: 34343 - protein, 978 aa, synthetic construct
  REGION 1..978: note = engineered CasX variant
QEIKRINKIRRRLVKDSNTKKAGKTGPMKTLLVRVMTPDLRERLENLRKKPENIPQPISNTSRANLNKLLTDYTEMKKAILHVYDEEFQKDPVGLMSRVAQPASKKIDQNKLKPEMDEKGNLTTAGFACSQCGQPLFVYKLEQVSEKGKAYTNYFGRCNVAEHEKLIKLAQLKPEKDSDEAVTYSLGKFGQRALDFYSIHVTKESTHPVKPLAQIAGNRYASVPVGKALSDACMGTIASFLSKYQDIIIEHQKVVKGNQKRLESLRELAGKENLEYPSVTLPPQPHTKEGVDAYNEVIARVRMWVNLNLWQKLKLSRDDAKPLLRLKGFPSFPLVERQANEVDWWDMVCNVKKLINEKKEDGKVFWQNLAGYKRQEALRPYLSSEEDRKKGKKFARYQLGDLLLHLEKKHGEDWGKVYDEAWERIDKKVEGLSKHIKLEEERRSEDAQSKAALTDWLRAKASFVIEGLKEADKDEFCRCELKLQKWYGDLRGKPFAIEAENSILDISGFSKQYNCAFIWQKDGVKKLNLYLIINYFKGGKLRFKKIKPEAFEANRFYTVINKKSGEIVPMEVNFNFDDPNLIILPLAFGKRQGREFIWNDLLSLETGSLKLANGRVIEKTLYNRRTRQDEPALFVALTFERREVLDSSNIKPMNLIGVDRGENIPAVIALTDPEGCPLSRFKDSLGNPTHILRIGESYKEKQRTIQAKKEVEQRRAGGYSRKYASKAKNLADDMVRNTARDLLYYAVTQDAMLIFENLSRGFGRQGKRTFMAERQYTRMEDWLTAKLAYEGLPSKTYLSKTLAQYTSKTCSNCGFTITSADYDRVLEKLKKTATGWMTTINGKELKVEGQITYYNRYKRQNVVKDLSVELDRLSEESVNNDISSWTKGRSGEALSLLKKRFSHRPVQEKFVCLNCGFETHADEQAALNIARSWLFLRSQEYKKYQTNKTTGNTDKRAFVETWQSFYRKKLKEVWKPAV

SEQ ID NO: 34344 - protein, 979 aa, synthetic construct
  REGION 1..979: note = engineered CasX variant
QEIKRINKIRRRLVKDSNTKKAGKTGPMKTLLVRVMTPDLRERLENLRKKPENIPQPISNTSRANLNKLLTDYTEMKKAILHVYDEEFQKDPVGLMSRVAQPASKKIDQNKLKPEMDEKGNLTTAGFACSQCGQPLFVYKLEQVSEKGKAYTNYFGRCNVAEHEKLIKKLAQLKPEKDSDEAVTYSLGKFGQRALDFYSIHVTKESTHPVKPLAQIAGNRYASGPVGKALSDACMGTIASFLSKYQDIIIEHQKVVKGNQKRLESLRELAGKENLEYPSVTLPPQPHTKEGVDAYNEVIARVRMWVNLNLWQKLKLSRDDAKPLLRLKGFPSFPLVERQANEVDWWDMVCNVKKLINEKKEDGKVFWQNLAGYKRQEALRPYLSSEEDRKKGKKFARYQLGDLLLHLEKKHGEDWGKVYDEAWERIDKKVEGLSKHIKLEEERRSEDAQSKAALTDWLRAKASFVIEGLKEADKDEFCRCELKLQKWYGDLRGKPFAIEAENSILDISGFSKQYNCAFIWQKDGVKKLNLYLIINYFKGGKLRFKKIKPEAFEANRFYTVINKKSGEIVPMEVNFNFDDPNLIILPLAFGKRQGREFIWNDLLSLETGSLKLANGRVIEKTLYNRRTRQDEPALFVALTFERREVLDSSNIKPMNLIGVDRGENIPAVIALTDPEGCPLSRFKDSLGNPTHILRIGESYKEKQRTIQAKKEVEQRRAGGYSRKYASKAKNLADDMVRNTARDLLYYAVTQDAMLIFENLSRGFGRQGKRTFMAERQYTRMEDWLTAKLAYEGLPSKTYLSKTLAQYTSKTCSNCGFTITSADYDRVLEKLKKTATGWMTTINGKELKVEGQITYYNRYKRQNVVKDLSVELDRLSEESVNNDISSWTKGRSGEALSLLKKRFSHRPVQEKFVCLNCGFETHADEQAALNIARSWLFLRSQEYKKYQTNKTTGNTDKRAFVETWQSFYRKKLKEVWKPAV

SEQ ID NO: 34345 - protein, 977 aa, synthetic construct
  REGION 1..977: note = engineered CasX variant
QEIKRINKIRRRLVKDSNTKKAGKTGPMKTLLVRVMTPDLRERLENLRKKPENIPQPISNTSRANLNKLLTDYTEMKKAILHVYDEEFQKDPVGLMSRVAQPASKKIDQNKLKPEMDEKGNLTTAGFACSQCGQPLFVYKLEQVSEKGKAYTNYFGRCNVAEHEKLIKLAQLKPEKDSDEAVTYSLGKFGQRALDFYSIHVTKESTHPVKPLAQIAGNRYASPVGKALSDACMGTIASFLSKYQDIIIEHQKVVKGNQKRLESLRELAGKENLEYPSVTLPPQPHTKEGVDAYNEVIARVRMWVNLNLWQKLKLSRDDAKPLLRLKGFPSFPLVERQANEVDWWDMVCNVKKLINEKKEDGKVFWQNLAGYKRQEALRPYLSSEEDRKKGKKFARYQLGDLLLHLEKKHGEDWGKVYDEAWERIDKKVEGLSKHIKLEEERRSEDAQSKAALTDWLRAKASFVIEGLKEADKDEFCRCELKLQKWYGDLRGKPFAIEAENSILDISGFSKQYNCAFIWQKDGVKKLNLYLIINYFKGGKLRFKKIKPEAFEANRFYTVINKKSGEIVPMEVNFNFDDPNLIILPLAFGKRQGREFIWNDLLSLETGSLKLANGRVIEKTLYNRRTRQDEPALFVALTFERREVLDSSNIKPMNLIGVDRGENIPAVIALTDPEGCPLSRFKDSLGNPTHILRIGESYKEKQRTIQAKKEVEQRRAGGYSRKYASKAKNLADDMVRNTARDLLYYAVTQDAMLIFENLSRGFGRQGKRTFMAERQYTRMEDWLTAKLAYEGLPSKTYLSKTLAQYTSKTCSNCGFTITSADYDRVLEKLKKTATGWMTTINGKELKVEGQITYYNRYKRQNVVKDLSVELDRLSEESVNNDISSWTKGRSGEALSLLKKRFSHRPVQEKFVCLNCGFETHADEQAALNIARSWLFLRSQEYKKYQTNKTTGNTDKRAFVETWQSFYRKKLKEVWKPAV

SEQ ID NO: 34346 - protein, 978 aa, synthetic construct
  REGION 1..978: note = engineered CasX variant
QEIKRINKIRRRLVKDSNTKKAGKTGPMKTLLVRVMTPDLRERLENLRKKPENIPQPISNTSRANLNKLLTDYTEMKKAILHVYDEEFQKDPVGLMSRVAQPASKKIDQNKLKPEMDEKGNLTTAGFACSQCGQPLFVYKLEQVSEKGKAYTNYFGRCNVAEHEKLILLYQLKPEKDSDEAVTYSLGKFGQRALDFYSIHVTKESTHPVKPLAQIAGNRYASYPVGKALSDACMGTIASFLSKYQDIIIEHQKVVKGNQKRLESLRELAGKENLEYPSVTLPPQPHTKEGVDAYNEVIARVRMWVNLNLWQKLKLSRDDAKPLLRLKGFPSFPLVERQANEVDWWDMVCNVKKLINEKKEDGKVFWQNLAGYKRQEALRPYLSSEEDRKKGKKFARYQLGDLLLHLEKKHGEDWGKVYDEAWERIDKKVEGLSKHIKLEEERRSEDAQSKAALTDWLRAKASFVIEGLKEADKDEFCRCELKLQKWYGDLRGKPFAIEAENSILDISGFSKQYNCAFIWQKDGVKKLNLYLIINYFKGGKLRFKKIKPEAFEANRFYTVINKKSGEIVPMEVNFNFDDPNLIILPLAFGKRQGREFIWNDLLSLETGSLKLANGRVIEKTLYNRRTRQDEPALFVALTFERREVLDSSNIKPMNLIGVDRGENIPAVIALTDPEGCPLSRFKDSLGNPTHILRIGESYKEKQRTIQAKKEVEQRRAGGYSRKYASKAKNLADDMVRNTARDLLYYAVTQDAMLIFENLSRGFGRQGKRTFMAERQYTRMEDWLTAKLAYEGLPSKTYLSKTLAQYTSKTCSNCGFTITSADYDRVLEKLKKTATGWMTTINGKELKVEGQITYYNRYKRQNVVKDLSVELDRLSEESVNNDISSWTKGRSGEALSLLKKRFSHRPVQEKFVCLNCGFETHADEQAALNIARSWLFLRSQEYKKYQTNKTTGNTDKRAFVETWQSFYRKKLKEVWKPAV

SEQ ID NO: 34347 - protein, 978 aa, synthetic construct
  REGION 1..978: note = engineered CasX variant
QEIKRINKIRRRLVKDSNTKKAGKTGPMKTLLVRVMTPDLRERLENLRKKPENIPQPISNTSRANLNKLLTDYTEMKKAILHVYDEEFQKDPVGLMSRVAQPASKKIDQNKLKPEMDEKGNLTTAGFACSQCGQPLFVYKLEQVSEKGKAYTNYFGRCNVAEHEKLILLYQLKPEKDSDEAVTYSLGKFGQRALDFYSIHVTKESTHPVKPLAQIAGNRYASHPVGKALSDACMGTIASFLSKYQDIIIEHQKVVKGNQKRLESLRELAGKENLEYPSVTLPPQPHTKEGVDAYNEVIARVRMWVNLNLWQKLKLSRDDAKPLLRLKGFPSFPLVERQANEVDWWDMVCNVKKLINEKKEDGKVFWQNLAGYKRQEALRPYLSSEEDRKKGKKFARYQLGDLLLHLEKKHGEDWGKVYDEAWERIDKKVEGLSKHIKLEEERRSEDAQSKAALTDWLRAKASFVIEGLKEADKDEFCRCELKLQKWYGDLRGKPFAIEAENSILDISGFSKQYNCAFIWQKDGVKKLNLYLIINYFKGGKLRFKKIKPEAFEANRFYTVINKKSGEIVPMEVNFNFDDPNLIILPLAFGKRQGREFIWNDLLSLETGSLKLANGRVIEKTLYNRRTRQDEPALFVALTFERREVLDSSNIKPMNLIGVDRGENIPAVIALTDPEGCPLSRFKDSLGNPTHILRIGESYKEKQRTIQAKKEVEQRRAGGYSRKYASKAKNLADDMVRNTARDLLYYAVTQDAMLIFENLSRGFGRQGKRTFMAERQYTRMEDWLTAKLAYEGLPSKTYLSKTLAQYTSKTCSNCGFTITSADYDRVLEKLKKTATGWMTTINGKELKVEGQITYYNRYKRQNVVKDLSVELDRLSEESVNNDISSWTKGRSGEALSLLKKRFSHRPVQEKFVCLNCGFETHADEQAALNIARSWLFLRSQEYKKYQTNKTTGNTDKRAFVETWQSFYRKKLKEVWKPAV

SEQ ID NO: 34348 - protein, 978 aa, synthetic construct
  REGION 1..978: note = engineered CasX variant
QEIKRINKIRRRLVKDSNTKKAGKTGPMKTLLVRVMTPDLRERLENLRKKPENIPQPISNTSRANLNKLLTDYTEMKKAILHVYDEEFQKDPVGLMSRVAQPASKKIDQNKLKPEMDEKGNLTTAGFACSQCGQPLFVYKLEQVSEKGKAYTNYFGRCNVAEHEKLILLYQLKPEKDSDEAVTYSLGKFGQRALDFYSIHVTKESTHPVKPLAQIAGNRYASSPVGKALSDACMGTIASFLSKYQDIIIEHQKVVKGNQKRLESLRELAGKENLEYPSVTLPPQPHTKEGVDAYNEVIARVRMWVNLNLWQKLKLSRDDAKPLLRLKGFPSFPLVERQANEVDWWDMVCNVKKLINEKKEDGKVFWQNLAGYKRQEALRPYLSSEEDRKKGKKFARYQLGDLLLHLEKKHGEDWGKVYDEAWERIDKKVEGLSKHIKLEEERRSEDAQSKAALTDWLRAKASFVIEGLKEADKDEFCRCELKLQKWYGDLRGKPFAIEAENSILDISGFSKQYNCAFIWQKDGVKKLNLYLIINYFKGGKLRFKKIKPEAFEANRFYTVINKKSGEIVPMEVNFNFDDPNLIILPLAFGKRQGREFIWNDLLSLETGSLKLANGRVIEKTLYNRRTRQDEPALFVALTFERREVLDSSNIKPMNLIGVDRGENIPAVIALTDPEGCPLSRFKDSLGNPTHILRIGESYKEKQRTIQAKKEVEQRRAGGYSRKYASKAKNLADDMVRNTARDLLYYAVTQDAMLIFENLSRGFGRQGKRTFMAERQYTRMEDWLTAKLAYEGLPSKTYLSKTLAQYTSKTCSNCGFTITSADYDRVLEKLKKTATGWMTTINGKELKVEGQITYYNRYKRQNVVKDLSVELDRLSEESVNNDISSWTKGRSGEALSLLKKRFSHRPVQEKFVCLNCGFETHADEQAALNIARSWLFLRSQEYKKYQTNKTTGNTDKRAFVETWQSFYRKKLKEVWKPAV

SEQ ID NO: 34349 - protein, 978 aa, synthetic construct
  REGION 1..978: note = engineered CasX variant
QEIKRINKIRRRLVKDSNTKKAGKTGPMKTLLVRVMTPDLRERLENLRKKPENIPQPISNTSRANLNKLLTDYTEMKKAILHVYDEEFQKDPVGLMSRVAQPASKKIDQNKLKPEMDEKGNLTTAGFACSQCGQPLFVYKLEQVSEKGKAYTNYFGRCNVAEHEKLILLYQLKPEKDSDEAVTYSLGKFGQRALDFYSIHVTKESTHPVKPLAQIAGNRYASTPVGKALSDACMGTIASFLSKYQDIIIEHQKVVKGNQKRLESLRELAGKENLEYPSVTLPPQPHTKEGVDAYNEVIARVRMWVNLNLWQKLKLSRDDAKPLLRLKGFPSFPLVERQANEVDWWDMVCNVKKLINEKKEDGKVFWQNLAGYKRQEALRPYLSSEEDRKKGKKFARYQLGDLLLHLEKKHGEDWGKVYDEAWERIDKKVEGLSKHIKLEEERRSEDAQSKAALTDWLRAKASFVIEGLKEADKDEFCRCELKLQKWYGDLRGKPFAIEAENSILDISGFSKQYNCAFIWQKDGVKKLNLYLIINYFKGGKLRFKKIKPEAFEANRFYTVINKKSGEIVPMEVNFNFDDPNLIILPLAFGKRQGREFIWNDLLSLETGSLKLANGRVIEKTLYNRRTRQDEPALFVALTFERREVLDSSNIKPMNLIGVDRGENIPAVIALTDPEGCPLSRFKDSLGNPTHILRIGESYKEKQRTIQAKKEVEQRRAGGYSRKYASKAKNLADDMVRNTARDLLYYAVTQDAMLIFENLSRGFGRQGKRTFMAERQYTRMEDWLTAKLAYEGLPSKTYLSKTLAQYTSKTCSNCGFTITSADYDRVLEKLKKTATGWMTTINGKELKVEGQITYYNRYKRQNVVKDLSVELDRLSEESVNNDISSWTKGRSGEALSLLKKRFSHRPVQEKFVCLNCGFETHADEQAALNIARSWLFLRSQEYKKYQTNKTTGNTDKRAFVETWQSFYRKKLKEVWKPAV

SEQ ID NO: 34350 - protein, 978 aa, synthetic construct
  REGION 1..978: note = engineered CasX variant
QEIKRINKIRRRLVKDSNTKKAGKTGPMKTLLVRVMTPDLRERLENLRKKPENIPQPISNTSRANLNKLLTDYTEMKKAILHVYDEEFQKDPVGLMSRVAQPASKKIDQNKLKPEMDEKGNLTTAGFACSQCGQPLFVYKLEQVSEKGKAYTNYFGRCNVAEHEKLILLYQLKPEKDSDEAVTYSLGKFGQRALDFYSIHVTKESTHPVKPLAQIAGNRYASAPVGKALSDACMGTIASFLSKYQDIIIEHQKVVKGNQKRLESLRELAGKENLEYPSVTLPPQPHTKEGVDAYNEVIARVRMWVNLNLWQKLKLSRDDAKPLLRLKGFPSFPLVERQANEVDWWDMVCNVKKLINEKKEDGKVFWQNLAGYKRQEALRPYLSSEEDRKKGKKFARYQLGDLLLHLEKKHGEDWGKVYDEAWERIDKKVEGLSKHIKLEEERRSEDAQSKAALTDWLRAKASFVIEGLKEADKDEFCRCELKLQKWYGDLRGKPFAIEAENSILDISGFSKQYNCAFIWQKDGVKKLNLYLIINYFKGGKLRFKKIKPEAFEANRFYTVINKKSGEIVPMEVNFNFDDPNLIILPLAFGKRQGREFIWNDLLSLETGSLKLANGRVIEKTLYNRRTRQDEPALFVALTFERREVLDSSNIKPMNLIGVDRGENIPAVIALTDPEGCPLSRFKDSLGNPTHILRIGESYKEKQRTIQAKKEVEQRRAGGYSRKYASKAKNLADDMVRNTARDLLYYAVTQDAMLIFENLSRGFGRQGKRTFMAERQYTRMEDWLTAKLAYEGLPSKTYLSKTLAQYTSKTCSNCGFTITSADYDRVLEKLKKTATGWMTTINGKELKVEGQITYYNRYKRQNVVKDLSVELDRLSEESVNNDISSWTKGRSGEALSLLKKRFSHRPVQEKFVCLNCGFETHADEQAALNIARSWLFLRSQEYKKYQTNKTTGNTDKRAFVETWQSFYRKKLKEVWKPAV

SEQ ID NO: 34351 - protein, 978 aa, synthetic construct
  REGION 1..978: note = engineered CasX variant
QEIKRINKIRRRLVKDSNTKKAGKTGPMKTLLVRVMTPDLRERLENLRKKPENIPQPISNTSRANLNKLLTDYTEMKKAILHVYDEEFQKDPVGLMSRVAQPASKKIDQNKLKPEMDEKGNLTTAGFACSQCGQPLFVYKLEQVSEKGKAYTNYFGRCNVAEHEKLILLYQLKPEKDSDEAVTYSLGKFGQRALDFYSIHVTKESTHPVKPLAQIAGNRYASVPVGKALSDACMGTIASFLSKYQDIIIEHQKVVKGNQKRLESLRELAGKENLEYPSVTLPPQPHTKEGVDAYNEVIARVRMWVNLNLWQKLKLSRDDAKPLLRLKGFPSFPLVERQANEVDWWDMVCNVKKLINEKKEDGKVFWQNLAGYKRQEALRPYLSSEEDRKKGKKFARYQLGDLLLHLEKKHGEDWGKVYDEAWERIDKKVEGLSKHIKLEEERRSEDAQSKAALTDWLRAKASFVIEGLKEADKDEFCRCELKLQKWYGDLRGKPFAIEAENSILDISGFSKQYNCAFIWQKDGVKKLNLYLIINYFKGGKLRFKKIKPEAFEANRFYTVINKKSGEIVPMEVNFNFDDPNLIILPLAFGKRQGREFIWNDLLSLETGSLKLANGRVIEKTLYNRRTRQDEPALFVALTFERREVLDSSNIKPMNLIGVDRGENIPAVIALTDPEGCPLSRFKDSLGNPTHILRIGESYKEKQRTIQAKKEVEQRRAGGYSRKYASKAKNLADDMVRNTARDLLYYAVTQDAMLIFENLSRGFGRQGKRTFMAERQYTRMEDWLTAKLAYEGLPSKTYLSKTLAQYTSKTCSNCGFTITSADYDRVLEKLKKTATGWMTTINGKELKVEGQITYYNRYKRQNVVKDLSVELDRLSEESVNNDISSWTKGRSGEALSLLKKRFSHRPVQEKFVCLNCGFETHADEQAALNIARSWLFLRSQEYKKYQTNKTTGNTDKRAFVETWQSFYRKKLKEVWKPAV

SEQ ID NO: 34352 - protein, 978 aa, synthetic construct
  REGION 1..978: note = engineered CasX variant
QEIKRINKIRRRLVKDSNTKKAGKTGPMKTLLVRVMTPDLRERLENLRKKPENIPQPISNTSRANLNKLLTDYTEMKKAILHVYDEEFQKDPVGLMSRVAQPASKKIDQNKLKPEMDEKGNLTTAGFACSQCGQPLFVYKLEQVSEKGKAYTNYFGRCNVAEHEKLIKLYQLKPEKDSDEAVTYSLGKFGQRALDFYSIHVTKESTHPVKPLAQIAGNRYASGPVGKALSDACMGTIASFLSKYQDIIIEHQKVVKGNQKRLESLRELAGKENLEYPSVTLPPQPHTKEGVDAYNEVIARVRMWVNLNLWQKLKLSRDDAKPLLRLKGFPSFPLVERQANEVDWWDMVCNVKKLINEKKEDGKVFWQNLAGYKRQEALRPYLSSEEDRKKGKKFARYQLGDLLLHLEKKHGEDWGKVYDEAWERIDKKVEGLSKHIKLEEERRSEDAQSKAALTDWLRAKASFVIEGLKEADKDEFCRCELKLQKWYGDLRGKPFAIEAENSILDISGFSKQYNCAFIWQKDGVKKLNLYLIINYFKGGKLRFKKIKPEAFEANRFYTVINKKSGEIVPMEVNFNFDDPNLIILPLAFGKRQGREFIWNDLLSLETGSLKLANGRVIEKTLYNRRTRQDEPALFVALTFERREVLDSSNIKPMNLIGVDRGENIPAVIALTDPEGCPLSRFKDSLGNPTHILRIGESYKEKQRTIQAKKEVEQRRAGGYSRKYASKAKNLADDMVRNTARDLLYYAVTQDAMLIFENLSRGFGRQGKRTFMAERQYTRMEDWLTAKLAYEGLPSKTYLSKTLAQYTSKTCSNCGFTITSADYDRVLEKLKKTATGWMTTINGKELKVEGQITYYNRYKRQNVVKDLSVELDRLSEESVNNDISSWTKGRSGEALSLLKKRFSHRPVQEKFVCLNCGFETHADEQAALNIARSWLFLRSQEYKKYQTNKTTGNTDKRAFVETWQSFYRKKLKEVWKPAV

SEQ ID NO: 34353 - protein, 977 aa, synthetic construct
  REGION 1..977: note = engineered CasX variant
QEIKRINKIRRRLVKDSNTKKAGKTGPMKTLLVRVMTPDLRERLENLRKKPENIPQPISNTSRANLNKLLTDYTEMKKAILHVYDEEFQKDPVGLMSRVAQPASKKIDQNKLKPEMDEKGNLTTAGFACSQCGQPLFVYKLEQVSEKGKAYTNYFGRCNVAEHEKLILLYQLKPEKDSDEAVTYSLGKFGQRALDFYSIHVTKESTHPVKPLAQIAGNRYASPVGKALSDACMGTIASFLSKYQDIIIEHQKVVKGNQKRLESLRELAGKENLEYPSVTLPPQPHTKEGVDAYNEVIARVRMWVNLNLWQKLKLSRDDAKPLLRLKGFPSFPLVERQANEVDWWDMVCNVKKLINEKKEDGKVFWQNLAGYKRQEALRPYLSSEEDRKKGKKFARYQLGDLLLHLEKKHGEDWGKVYDEAWERIDKKVEGLSKHIKLEEERRSEDAQSKAALTDWLRAKASFVIEGLKEADKDEFCRCELKLQKWYGDLRGKPFAIEAENSILDISGFSKQYNCAFIWQKDGVKKLNLYLIINYFKGGKLRFKKIKPEAFEANRFYTVINKKSGEIVPMEVNFNFDDPNLIILPLAFGKRQGREFIWNDLLSLETGSLKLANGRVIEKTLYNRRTRQDEPALFVALTFERREVLDSSNIKPMNLIGVDRGENIPAVIALTDPEGCPLSRFKDSLGNPTHILRIGESYKEKQRTIQAKKEVEQRRAGGYSRKYASKAKNLADDMVRNTARDLLYYAVTQDAMLIFENLSRGFGRQGKRTFMAERQYTRMEDWLTAKLAYEGLPSKTYLSKTLAQYTSKTCSNCGFTITSADYDRVLEKLKKTATGWMTTINGKELKVEGQITYYNRYKRQNVVKDLSVELDRLSEESVNNDISSWTKGRSGEALSLLKKRFSHRPVQEKFVCLNCGFETHADEQAALNIARSWLFLRSQEYKKYQTNKTTGNTDKRAFVETWQSFYRKKLKEVWKPAV

SEQ ID NO: 34354 - protein, 978 aa, synthetic construct
  REGION 1..978: note = engineered CasX variant
QEIKRINKIRRRLVKDSNTKKAGKTGPMKTLLVRVMTPDLRERLENLRKKPENIPQPISNTSRANLNKLLTDYTEMKKAILHVYDEEFQKDPVGLMSRVAQPASKKIDQNKLKPEMDEKGNLTTAGFACSQCGQPLFVYKLEQVSEKGKAYTNYFGRCNVAEHEKLILLSQLKPEKDSDEAVTYSLGKFGQRALDFYSIHVTKESTHPVKPLAQIAGNRYASYPVGKALSDACMGTIASFLSKYQDIIIEHQKVVKGNQKRLESLRELAGKENLEYPSVTLPPQPHTKEGVDAYNEVIARVRMWVNLNLWQKLKLSRDDAKPLLRLKGFPSFPLVERQANEVDWWDMVCNVKKLINEKKEDGKVFWQNLAGYKRQEALRPYLSSEEDRKKGKKFARYQLGDLLLHLEKKHGEDWGKVYDEAWERIDKKVEGLSKHIKLEEERRSEDAQSKAALTDWLRAKASFVIEGLKEADKDEFCRCELKLQKWYGDLRGKPFAIEAENSILDISGFSKQYNCAFIWQKDGVKKLNLYLIINYFKGGKLRFKKIKPEAFEANRFYTVINKKSGEIVPMEVNFNFDDPNLIILPLAFGKRQGREFIWNDLLSLETGSLKLANGRVIEKTLYNRRTRQDEPALFVALTFERREVLDSSNIKPMNLIGVDRGENIPAVIALTDPEGCPLSRFKDSLGNPTHILRIGESYKEKQRTIQAKKEVEQRRAGGYSRKYASKAKNLADDMVRNTARDLLYYAVTQDAMLIFENLSRGFGRQGKRTFMAERQYTRMEDWLTAKLAYEGLPSKTYLSKTLAQYTSKTCSNCGFTITSADYDRVLEKLKKTATGWMTTINGKELKVEGQITYYNRYKRQNVVKDLSVELDRLSEESVNNDISSWTKGRSGEALSLLKKRFSHRPVQEKFVCLNCGFETHADEQAALNIARSWLFLRSQEYKKYQTNKTTGNTDKRAFVETWQSFYRKKLKEVWKPAV

SEQ ID NO: 34355 - protein, 978 aa, synthetic construct
  REGION 1..978: note = engineered CasX variant
QEIKRINKIRRRLVKDSNTKKAGKTGPMKTLLVRVMTPDLRERLENLRKKPENIPQPISNTSRANLNKLLTDYTEMKKAILHVYDEEFQKDPVGLMSRVAQPASKKIDQNKLKPEMDEKGNLTTAGFACSQCGQPLFVYKLEQVSEKGKAYTNYFGRCNVAEHEKLILLSQLKPEKDSDEAVTYSLGKFGQRALDFYSIHVTKESTHPVKPLAQIAGNRYASHPVGKALSDACMGTIASFLSKYQDIIIEHQKVVKGNQKRLESLRELAGKENLEYPSVTLPPQPHTKEGVDAYNEVIARVRMWVNLNLWQKLKLSRDDAKPLLRLKGFPSFPLVERQANEVDWWDMVCNVKKLINEKKEDGKVFWQNLAGYKRQEALRPYLSSEEDRKKGKKFARYQLGDLLLHLEKKHGEDWGKVYDEAWERIDKKVEGLSKHIKLEEERRSEDAQSKAALTDWLRAKASFVIEGLKEADKDEFCRCELKLQKWYGDLRGKPFAIEAENSILDISGFSKQYNCAFIWQKDGVKKLNLYLIINYFKGGKLRFKKIKPEAFEANRFYTVINKKSGEIVPMEVNFNFDDPNLIILPLAFGKRQGREFIWNDLLSLETGSLKLANGRVIEKTLYNRRTRQDEPALFVALTFERREVLDSSNIKPMNLIGVDRGENIPAVIALTDPEGCPLSRFKDSLGNPTHILRIGESYKEKQRTIQAKKEVEQRRAGGYSRKYASKAKNLADDMVRNTARDLLYYAVTQDAMLIFENLSRGFGRQGKRTFMAERQYTRMEDWLTAKLAYEGLPSKTYLSKTLAQYTSKTCSNCGFTITSADYDRVLEKLKKTATGWMTTINGKELKVEGQITYYNRYKRQNVVKDLSVELDRLSEESVNNDISSWTKGRSGEALSLLKKRFSHRPVQEKFVCLNCGFETHADEQAALNIARSWLFLRSQEYKKYQTNKTTGNTDKRAFVETWQSFYRKKLKEVWKPAV

SEQ ID NO: 34356 - protein, 978 aa, synthetic construct
  REGION 1..978: note = engineered CasX variant
QEIKRINKIRRRLVKDSNTKKAGKTGPMKTLLVRVMTPDLRERLENLRKKPENIPQPISNTSRANLNKLLTDYTEMKKAILHVYDEEFQKDPVGLMSRVAQPASKKIDQNKLKPEMDEKGNLTTAGFACSQCGQPLFVYKLEQVSEKGKAYTNYFGRCNVAEHEKLILLSQLKPEKDSDEAVTYSLGKFGQRALDFYSIHVTKESTHPVKPLAQIAGNRYASSPVGKALSDACMGTIASFLSKYQDIIIEHQKVVKGNQKRLESLRELAGKENLEYPSVTLPPQPHTKEGVDAYNEVIARVRMWVNLNLWQKLKLSRDDAKPLLRLKGFPSFPLVERQANEVDWWDMVCNVKKLINEKKEDGKVFWQNLAGYKRQEALRPYLSSEEDRKKGKKFARYQLGDLLLHLEKKHGEDWGKVYDEAWERIDKKVEGLSKHIKLEEERRSEDAQSKAALTDWLRAKASFVIEGLKEADKDEFCRCELKLQKWYGDLRGKPFAIEAENSILDISGFSKQYNCAFIWQKDGVKKLNLYLIINYFKGGKLRFKKIKPEAFEANRFYTVINKKSGEIVPMEVNFNFDDPNLIILPLAFGKRQGREFIWNDLLSLETGSLKLANGRVIEKTLYNRRTRQDEPALFVALTFERREVLDSSNIKPMNLIGVDRGENIPAVIALTDPEGCPLSRFKDSLGNPTHILRIGESYKEKQRTIQAKKEVEQRRAGGYSRKYASKAKNLADDMVRNTARDLLYYAVTQDAMLIFENLSRGFGRQGKRTFMAERQYTRMEDWLTAKLAYEGLPSKTYLSKTLAQYTSKTCSNCGFTITSADYDRVLEKLKKTATGWMTTINGKELKVEGQITYYNRYKRQNVVKDLSVELDRLSEESVNNDISSWTKGRSGEALSLLKKRFSHRPVQEKFVCLNCGFETHADEQAALNIARSWLFLRSQEYKKYQTNKTTGNTDKRAFVETWQSFYRKKLKEVWKPAV

SEQ ID NO: 34357 - protein, 978 aa, synthetic construct
  REGION 1..978: note = engineered CasX variant
QEIKRINKIRRRLVKDSNTKKAGKTGPMKTLLVRVMTPDLRERLENLRKKPENIPQPISNTSRANLNKLLTDYTEMKKAILHVYDEEFQKDPVGLMSRVAQPASKKIDQNKLKPEMDEKGNLTTAGFACSQCGQPLFVYKLEQVSEKGKAYTNYFGRCNVAEHEKLILLSQLKPEKDSDEAVTYSLGKFGQRALDFYSIHVTKESTHPVKPLAQIAGNRYASTPVGKALSDACMGTIASFLSKYQDIIIEHQKVVKGNQKRLESLRELAGKENLEYPSVTLPPQPHTKEGVDAYNEVIARVRMWVNLNLWQKLKLSRDDAKPLLRLKGFPSFPLVERQANEVDWWDMVCNVKKLINEKKEDGKVFWQNLAGYKRQEALRPYLSSEEDRKKGKKFARYQLGDLLLHLEKKHGEDWGKVYDEAWERIDKKVEGLSKHIKLEEERRSEDAQSKAALTDWLRAKASFVIEGLKEADKDEFCRCELKLQKWYGDLRGKPFAIEAENSILDISGFSKQYNCAFIWQKDGVKKLNLYLIINYFKGGKLRFKKIKPEAFEANRFYTVINKKSGEIVPMEVNFNFDDPNLIILPLAFGKRQGREFIWNDLLSLETGSLKLANGRVIEKTLYNRRTRQDEPALFVALTFERREVLDSSNIKPMNLIGVDRGENIPAVIALTDPEGCPLSRFKDSLGNPTHILRIGESYKEKQRTIQAKKEVEQRRAGGYSRKYASKAKNLADDMVRNTARDLLYYAVTQDAMLIFENLSRGFGRQGKRTFMAERQYTRMEDWLTAKLAYEGLPSKTYLSKTLAQYTSKTCSNCGFTITSADYDRVLEKLKKTATGWMTTINGKELKVEGQITYYNRYKRQNVVKDLSVELDRLSEESVNNDISSWTKGRSGEALSLLKKRFSHRPVQEKFVCLNCGFETHADEQAALNIARSWLFLRSQEYKKYQTNKTTGNTDKRAFVETWQSFYRKKLKEVWKPAV

SEQ ID NO: 34358 - protein, 978 aa, synthetic construct
  REGION 1..978: note = engineered CasX variant
QEIKRINKIRRRLVKDSNTKKAGKTGPMKTLLVRVMTPDLRERLENLRKKPENIPQPISNTSRANLNKLLTDYTEMKKAILHVYDEEFQKDPVGLMSRVAQPASKKIDQNKLKPEMDEKGNLTTAGFACSQCGQPLFVYKLEQVSEKGKAYTNYFGRCNVAEHEKLILLSQLKPEKDSDEAVTYSLGKFGQRALDFYSIHVTKESTHPVKPLAQIAGNRYASAPVGKALSDACMGTIASFLSKYQDIIIEHQKVVKGNQKRLESLRELAGKENLEYPSVTLPPQPHTKEGVDAYNEVIARVRMWVNLNLWQKLKLSRDDAKPLLRLKGFPSFPLVERQANEVDWWDMVCNVKKLINEKKEDGKVFWQNLAGYKRQEALRPYLSSEEDRKKGKKFARYQLGDLLLHLEKKHGEDWGKVYDEAWERIDKKVEGLSKHIKLEEERRSEDAQSKAALTDWLRAKASFVIEGLKEADKDEFCRCELKLQKWYGDLRGKPFAIEAENSILDISGFSKQYNCAFIWQKDGVKKLNLYLIINYFKGGKLRFKKIKPEAFEANRFYTVINKKSGEIVPMEVNFNFDDPNLIILPLAFGKRQGREFIWNDLLSLETGSLKLANGRVIEKTLYNRRTRQDEPALFVALTFERREVLDSSNIKPMNLIGVDRGENIPAVIALTDPEGCPLSRFKDSLGNPTHILRIGESYKEKQRTIQAKKEVEQRRAGGYSRKYASKAKNLADDMVRNTARDLLYYAVTQDAMLIFENLSRGFGRQGKRTFMAERQYTRMEDWLTAKLAYEGLPSKTYLSKTLAQYTSKTCSNCGFTITSADYDRVLEKLKKTATGWMTTINGKELKVEGQITYYNRYKRQNVVKDLSVELDRLSEESVNNDISSWTKGRSGEALSLLKKRFSHRPVQEKFVCLNCGFETHADEQAALNIARSWLFLRSQEYKKYQTNKTTGNTDKRAFVETWQSFYRKKLKEVWKPAV

SEQ ID NO: 34359 - protein, 978 aa, synthetic construct
  REGION 1..978: note = engineered CasX variant
QEIKRINKIRRRLVKDSNTKKAGKTGPMKTLLVRVMTPDLRERLENLRKKPENIPQPISNTSRANLNKLLTDYTEMKKAILHVYDEEFQKDPVGLMSRVAQPASKKIDQNKLKPEMDEKGNLTTAGFACSQCGQPLFVYKLEQVSEKGKAYTNYFGRCNVAEHEKLILLSQLKPEKDSDEAVTYSLGKFGQRALDFYSIHVTKESTHPVKPLAQIAGNRYASVPVGKALSDACMGTIASFLSKYQDIIIEHQKVVKGNQKRLESLRELAGKENLEYPSVTLPPQPHTKEGVDAYNEVIARVRMWVNLNLWQKLKLSRDDAKPLLRLKGFPSFPLVERQANEVDWWDMVCNVKKLINEKKEDGKVFWQNLAGYKRQEALRPYLSSEEDRKKGKKFARYQLGDLLLHLEKKHGEDWGKVYDEAWERIDKKVEGLSKHIKLEEERRSEDAQSKAALTDWLRAKASFVIEGLKEADKDEFCRCELKLQKWYGDLRGKPFAIEAENSILDISGFSKQYNCAFIWQKDGVKKLNLYLIINYFKGGKLRFKKIKPEAFEANRFYTVINKKSGEIVPMEVNFNFDDPNLIILPLAFGKRQGREFIWNDLLSLETGSLKLANGRVIEKTLYNRRTRQDEPALFVALTFERREVLDSSNIKPMNLIGVDRGENIPAVIALTDPEGCPLSRFKDSLGNPTHILRIGESYKEKQRTIQAKKEVEQRRAGGYSRKYASKAKNLADDMVRNTARDLLYYAVTQDAMLIFENLSRGFGRQGKRTFMAERQYTRMEDWLTAKLAYEGLPSKTYLSKTLAQYTSKTCSNCGFTITSADYDRVLEKLKKTATGWMTTINGKELKVEGQITYYNRYKRQNVVKDLSVELDRLSEESVNNDISSWTKGRSGEALSLLKKRFSHRPVQEKFVCLNCGFETHADEQAALNIARSWLFLRSQEYKKYQTNKTTGNTDKRAFVETWQSFYRKKLKEVWKPAV

SEQ ID NO: 34360 - protein, 978 aa, synthetic construct
  REGION 1..978: note = engineered CasX variant
QEIKRINKIRRRLVKDSNTKKAGKTGPMKTLLVRVMTPDLRERLENLRKKPENIPQPISNTSRANLNKLLTDYTEMKKAILHVYDEEFQKDPVGLMSRVAQPASKKIDQNKLKPEMDEKGNLTTAGFACSQCGQPLFVYKLEQVSEKGKAYTNYFGRCNVAEHEKLIKLSQLKPEKDSDEAVTYSLGKFGQRALDFYSIHVTKESTHPVKPLAQIAGNRYASGPVGKALSDACMGTIASFLSKYQDIIIEHQKVVKGNQKRLESLRELAGKENLEYPSVTLPPQPHTKEGVDAYNEVIARVRMWVNLNLWQKLKLSRDDAKPLLRLKGFPSFPLVERQANEVDWWDMVCNVKKLINEKKEDGKVFWQNLAGYKRQEALRPYLSSEEDRKKGKKFARYQLGDLLLHLEKKHGEDWGKVYDEAWERIDKKVEGLSKHIKLEEERRSEDAQSKAALTDWLRAKASFVIEGLKEADKDEFCRCELKLQKWYGDLRGKPFAIEAENSILDISGFSKQYNCAFIWQKDGVKKLNLYLIINYFKGGKLRFKKIKPEAFEANRFYTVINKKSGEIVPMEVNFNFDDPNLIILPLAFGKRQGREFIWNDLLSLETGSLKLANGRVIEKTLYNRRTRQDEPALFVALTFERREVLDSSNIKPMNLIGVDRGENIPAVIALTDPEGCPLSRFKDSLGNPTHILRIGESYKEKQRTIQAKKEVEQRRAGGYSRKYASKAKNLADDMVRNTARDLLYYAVTQDAMLIFENLSRGFGRQGKRTFMAERQYTRMEDWLTAKLAYEGLPSKTYLSKTLAQYTSKTCSNCGFTITSADYDRVLEKLKKTATGWMTTINGKELKVEGQITYYNRYKRQNVVKDLSVELDRLSEESVNNDISSWTKGRSGEALSLLKKRFSHRPVQEKFVCLNCGFETHADEQAALNIARSWLFLRSQEYKKYQTNKTTGNTDKRAFVETWQSFYRKKLKEVWKPAV

SEQ ID NO: 34361 - protein, 977 aa, synthetic construct
  REGION 1..977: note = engineered CasX variant
QEIKRINKIRRRLVKDSNTKKAGKTGPMKTLLVRVMTPDLRERLENLRKKPENIPQPISNTSRANLNKLLTDYTEMKKAILHVYDEEFQKDPVGLMSRVAQPASKKIDQNKLKPEMDEKGNLTTAGFACSQCGQPLFVYKLEQVSEKGKAYTNYFGRCNVAEHEKLILLSQLKPEKDSDEAVTYSLGKFGQRALDFYSIHVTKESTHPVKPLAQIAGNRYASPVGKALSDACMGTIASFLSKYQDIIIEHQKVVKGNQKRLESLRELAGKENLEYPSVTLPPQPHTKEGVDAYNEVIARVRMWVNLNLWQKLKLSRDDAKPLLRLKGFPSFPLVERQANEVDWWDMVCNVKKLINEKKEDGKVFWQNLAGYKRQEALRPYLSSEEDRKKGKKFARYQLGDLLLHLEKKHGEDWGKVYDEAWERIDKKVEGLSKHIKLEEERRSEDAQSKAALTDWLRAKASFVIEGLKEADKDEFCRCELKLQKWYGDLRGKPFAIEAENSILDISGFSKQYNCAFIWQKDGVKKLNLYLIINYFKGGKLRFKKIKPEAFEANRFYTVINKKSGEIVPMEVNFNFDDPNLIILPLAFGKRQGREFIWNDLLSLETGSLKLANGRVIEKTLYNRRTRQDEPALFVALTFERREVLDSSNIKPMNLIGVDRGENIPAVIALTDPEGCPLSRFKDSLGNPTHILRIGESYKEKQRTIQAKKEVEQRRAGGYSRKYASKAKNLADDMVRNTARDLLYYAVTQDAMLIFENLSRGFGRQGKRTFMAERQYTRMEDWLTAKLAYEGLPSKTYLSKTLAQYTSKTCSNCGFTITSADYDRVLEKLKKTATGWMTTINGKELKVEGQITYYNRYKRQNVVKDLSVELDRLSEESVNNDISSWTKGRSGEALSLLKKRFSHRPVQEKFVCLNCGFETHADEQAALNIARSWLFLRSQEYKKYQTNKTTGNTDKRAFVETWQSFYRKKLKEVWKPAV

SEQ ID NO: 34362 - protein, 978 aa, synthetic construct
  REGION 1..978: note = engineered CasX variant
QEIKRINKIRRRLVKDSNTKKAGKTGPMKTLLVRVMTPDLRERLENLRKKPENIPQPISNTSRANLNKLLTDYTEMKKAILHVYDEEFQKDPVGLMSRVAQPASKKIDQNKLKPEMDEKGNLTTAGFACSQCGQPLFVYKLEQVSEKGKAYTNYFGRCNVAEHEKLILLAQLKPEKDSDEAVTYSLGKFGQRALDFYSIHVTKESTHPVKPLAQIAGNRYASYPVGKALSDACMGTIASFLSKYQDIIIEHQKVVKGNQKRLESLRELAGKENLEYPSVTLPPQPHTKEGVDAYNEVIARVRMWVNLNLWQKLKLSRDDAKPLLRLKGFPSFPLVERQANEVDWWDMVCNVKKLINEKKEDGKVFWQNLAGYKRQEALRPYLSSEEDRKKGKKFARYQLGDLLLHLEKKHGEDWGKVYDEAWERIDKKVEGLSKHIKLEEERRSEDAQSKAALTDWLRAKASFVIEGLKEADKDEFCRCELKLQKWYGDLRGKPFAIEAENSILDISGFSKQYNCAFIWQKDGVKKLNLYLIINYFKGGKLRFKKIKPEAFEANRFYTVINKKSGEIVPMEVNFNFDDPNLIILPLAFGKRQGREFIWNDLLSLETGSLKLANGRVIEKTLYNRRTRQDEPALFVALTFERREVLDSSNIKPMNLIGVDRGENIPAVIALTDPEGCPLSRFKDSLGNPTHILRIGESYKEKQRTIQAKKEVEQRRAGGYSRKYASKAKNLADDMVRNTARDLLYYAVTQDAMLIFENLSRGFGRQGKRTFMAERQYTRMEDWLTAKLAYEGLPSKTYLSKTLAQYTSKTCSNCGFTITSADYDRVLEKLKKTATGWMTTINGKELKVEGQITYYNRYKRQNVVKDLSVELDRLSEESVNNDISSWTKGRSGEALSLLKKRFSHRPVQEKFVCLNCGFETHADEQAALNIARSWLFLRSQEYKKYQTNKTTGNTDKRAFVETWQSFYRKKLKEVWKPAV

SEQ ID NO: 34363 - protein, 978 aa, synthetic construct
  REGION 1..978: note = engineered CasX variant
QEIKRINKIRRRLVKDSNTKKAGKTGPMKTLLVRVMTPDLRERLENLRKKPENIPQPISNTSRANLNKLLTDYTEMKKAILHVYDEEFQKDPVGLMSRVAQPASKKIDQNKLKPEMDEKGNLTTAGFACSQCGQPLFVYKLEQVSEKGKAYTNYFGRCNVAEHEKLILLAQLKPEKDSDEAVTYSLGKFGQRALDFYSIHVTKESTHPVKPLAQIAGNRYASHPVGKALSDACMGTIASFLSKYQDIIIEHQKVVKGNQKRLESLRELAGKENLEYPSVTLPPQPHTKEGVDAYNEVIARVRMWVNLNLWQKLKLSRDDAKPLLRLKGFPSFPLVERQANEVDWWDMVCNVKKLINEKKEDGKVFWQNLAGYKRQEALRPYLSSEEDRKKGKKFARYQLGDLLLHLEKKHGEDWGKVYDEAWERIDKKVEGLSKHIKLEEERRSEDAQSKAALTDWLRAKASFVIEGLKEADKDEFCRCELKLQKWYGDLRGKPFAIEAENSILDISGFSKQYNCAFIWQKDGVKKLNLYLIINYFKGGKLRFKKIKPEAFEANRFYTVINKKSGEIVPMEVNFNFDDPNLIILPLAFGKRQGREFIWNDLLSLETGSLKLANGRVIEKTLYNRRTRQDEPALFVALTFERREVLDSSNIKPMNLIGVDRGENIPAVIALTDPEGCPLSRFKDSLGNPTHILRIGESYKEKQRTIQAKKEVEQRRAGGYSRKYASKAKNLADDMVRNTARDLLYYAVTQDAMLIFENLSRGFGRQGKRTFMAERQYTRMEDWLTAKLAYEGLPSKTYLSKTLAQYTSKTCSNCGFTITSADYDRVLEKLKKTATGWMTTINGKELKVEGQITYYNRYKRQNVVKDLSVELDRLSEESVNNDISSWTKGRSGEALSLLKKRFSHRPVQEKFVCLNCGFETHADEQAALNIARSWLFLRSQEYKKYQTNKTTGNTDKRAFVETWQSFYRKKLKEVWKPAV

SEQ ID NO: 34364 - protein, 978 aa, synthetic construct
  REGION 1..978: note = engineered CasX variant
QEIKRINKIRRRLVKDSNTKKAGKTGPMKTLLVRVMTPDLRERLENLRKKPENIPQPISNTSRANLNKLLTDYTEMKKAILHVYDEEFQKDPVGLMSRVAQPASKKIDQNKLKPEMDEKGNLTTAGFACSQCGQPLFVYKLEQVSEKGKAYTNYFGRCNVAEHEKLILLAQLKPEKDSDEAVTYSLGKFGQRALDFYSIHVTKESTHPVKPLAQIAGNRYASTPVGKALSDACMGTIASFLSKYQDIIIEHQKVVKGNQKRLESLRELAGKENLEYPSVTLPPQPHTKEGVDAYNEVIARVRMWVNLNLWQKLKLSRDDAKPLLRLKGFPSFPLVERQANEVDWWDMVCNVKKLINEKKEDGKVFWQNLAGYKRQEALRPYLSSEEDRKKGKKFARYQLGDLLLHLEKKHGEDWGKVYDEAWERIDKKVEGLSKHIKLEEERRSEDAQSKAALTDWLRAKASFVIEGLKEADKDEFCRCELKLQKWYGDLRGKPFAIEAENSILDISGFSKQYNCAFIWQKDGVKKLNLYLIINYFKGGKLRFKKIKPEAFEANRFYTVINKKSGEIVPMEVNFNFDDPNLIILPLAFGKRQGREFIWNDLLSLETGSLKLANGRVIEKTLYNRRTRQDEPALFVALTFERREVLDSSNIKPMNLIGVDRGENIPAVIALTDPEGCPLSRFKDSLGNPTHILRIGESYKEKQRTIQAKKEVEQRRAGGYSRKYASKAKNLADDMVRNTARDLLYYAVTQDAMLIFENLSRGFGRQGKRTFMAERQYTRMEDWLTAKLAYEGLPSKTYLSKTLAQYTSKTCSNCGFTITSADYDRVLEKLKKTATGWMTTINGKELKVEGQITYYNRYKRQNVVKDLSVELDRLSEESVNNDISSWTKGRSGEALSLLKKRFSHRPVQEKFVCLNCGFETHADEQAALNIARSWLFLRSQEYKKYQTNKTTGNTDKRAFVETWQSFYRKKLKEVWKPAV

SEQ ID NO: 34365 - protein, 978 aa, synthetic construct
  REGION 1..978: note = engineered CasX variant
QEIKRINKIRRRLVKDSNTKKAGKTGPMKTLLVRVMTPDLRERLENLRKKPENIPQPISNTSRANLNKLLTDYTEMKKAILHVYDEEFQKDPVGLMSRVAQPASKKIDQNKLKPEMDEKGNLTTAGFACSQCGQPLFVYKLEQVSEKGKAYTNYFGRCNVAEHEKLILLAQLKPEKDSDEAVTYSLGKFGQRALDFYSIHVTKESTHPVKPLAQIAGNRYASAPVGKALSDACMGTIASFLSKYQDIIIEHQKVVKGNQKRLESLRELAGKENLEYPSVTLPPQPHTKEGVDAYNEVIARVRMWVNLNLWQKLKLSRDDAKPLLRLKGFPSFPLVERQANEVDWWDMVCNVKKLINEKKEDGKVFWQNLAGYKRQEALRPYLSSEEDRKKGKKFARYQLGDLLLHLEKKHGEDWGKVYDEAWERIDKKVEGLSKHIKLEEERRSEDAQSKAALTDWLRAKASFVIEGLKEADKDEFCRCELKLQKWYGDLRGKPFAIEAENSILDISGFSKQYNCAFIWQKDGVKKLNLYLIINYFKGGKLRFKKIKPEAFEANRFYTVINKKSGEIVPMEVNFNFDDPNLIILPLAFGKRQGREFIWNDLLSLETGSLKLANGRVIEKTLYNRRTRQDEPALFVALTFERREVLDSSNIKPMNLIGVDRGENIPAVIALTDPEGCPLSRFKDSLGNPTHILRIGESYKEKQRTIQAKKEVEQRRAGGYSRKYASKAKNLADDMVRNTARDLLYYAVTQDAMLIFENLSRGFGRQGKRTFMAERQYTRMEDWLTAKLAYEGLPSKTYLSKTLAQYTSKTCSNCGFTITSADYDRVLEKLKKTATGWMTTINGKELKVEGQITYYNRYKRQNVVKDLSVELDRLSEESVNNDISSWTKGRSGEALSLLKKRFSHRPVQEKFVCLNCGFETHADEQAALNIARSWLFLRSQEYKKYQTNKTTGNTDKRAFVETWQSFYRKKLKEVWKPAV

SEQ ID NO: 34366 - protein, 978 aa, synthetic construct
  REGION 1..978: note = engineered CasX variant
QEIKRINKIRRRLVKDSNTKKAGKTGPMKTLLVRVMTPDLRERLENLRKKPENIPQPISNTSRANLNKLLTDYTEMKKAILHVYDEEFQKDPVGLMSRVAQPASKKIDQNKLKPEMDEKGNLTTAGFACSQCGQPLFVYKLEQVSEKGKAYTNYFGRCNVAEHEKLILLAQLKPEKDSDEAVTYSLGKFGQRALDFYSIHVTKESTHPVKPLAQIAGNRYASVPVGKALSDACMGTIASFLSKYQDIIIEHQKVVKGNQKRLESLRELAGKENLEYPSVTLPPQPHTKEGVDAYNEVIARVRMWVNLNLWQKLKLSRDDAKPLLRLKGFPSFPLVERQANEVDWWDMVCNVKKLINEKKEDGKVFWQNLAGYKRQEALRPYLSSEEDRKKGKKFARYQLGDLLLHLEKKHGEDWGKVYDEAWERIDKKVEGLSKHIKLEEERRSEDAQSKAALTDWLRAKASFVIEGLKEADKDEFCRCELKLQKWYGDLRGKPFAIEAENSILDISGFSKQYNCAFIWQKDGVKKLNLYLIINYFKGGKLRFKKIKPEAFEANRFYTVINKKSGEIVPMEVNFNFDDPNLIILPLAFGKRQGREFIWNDLLSLETGSLKLANGRVIEKTLYNRRTRQDEPALFVALTFERREVLDSSNIKPMNLIGVDRGENIPAVIALTDPEGCPLSRFKDSLGNPTHILRIGESYKEKQRTIQAKKEVEQRRAGGYSRKYASKAKNLADDMVRNTARDLLYYAVTQDAMLIFENLSRGFGRQGKRTFMAERQYTRMEDWLTAKLAYEGLPSKTYLSKTLAQYTSKTCSNCGFTITSADYDRVLEKLKKTATGWMTTINGKELKVEGQITYYNRYKRQNVVKDLSVELDRLSEESVNNDISSWTKGRSGEALSLLKKRFSHRPVQEKFVCLNCGFETHADEQAALNIARSWLFLRSQEYKKYQTNKTTGNTDKRAFVETWQSFYRKKLKEVWKPAV

SEQ ID NO: 34367 - protein, 978 aa, synthetic construct
  REGION 1..978: note = engineered CasX variant
QEIKRINKIRRRLVKDSNTKKAGKTGPMKTLLVRVMTPDLRERLENLRKKPENIPQPISNTSRANLNKLLTDYTEMKKAILHVYDEEFQKDPVGLMSRVAQPASKKIDQNKLKPEMDEKGNLTTAGFACSQCGQPLFVYKLEQVSEKGKAYTNYFGRCNVAEHEKLILLAQLKPEKDSDEAVTYSLGKFGQRALDFYSIHVTKESTHPVKPLAQIAGNRYASYPVGKALSDACMGTIASFLSKYQDIIIEHQKVVKGNQKRLESLRELAGKENLEYPSVTLPPQPHTSEGVDAYNEVIARVRMWVNLNLWQKLKLSRDDAKPLLRLKGFPSFPLVERQANEVDWWDMVCNVKKLINEKKEDGKVFWQNLAGYKRQEALRPYLSSEEDRKKGKKFARYQLGDLLLHLEKKHGEDWGKVYDEAWERIDKKVEGLSKHIKLEEERRSEDAQSKAALTDWLRAKASFVIEGLKEADKDEFCRCELKLQKWYGDLRGKPFAIEAENSILDISGFSKQYNCAFIWQKDGVKKLNLYLIINYFKGGKLRFKKIKPEAFEANRFYTVINKKSGEIVPMEVNFNFDDPNLIILPLAFGKRQGREFIWNDLLSLETGSLKLANGRVIEKTLYNRRTRQDEPALFVALTFERREVLDSSNIKPMNLIGVDRGENIPAVIALTDPEGCPLSRFKDSLGNPTHILRIGESYKEKQRTIQAKKEVEQRRAGGYSRKYASKAKNLADDMVRNTARDLLYYAVTQDAMLIFENLSRGFGRQGKRTFMAERQYTRMEDWLTAKLAYEGLPSKTYLSKTLAQYTSKTCSNCGFTITSADYDRVLEKLKKTATGWMTTINGKELKVEGQITYYNRYKRQNVVKDLSVELDRLSEESVNNDISSWTKGRSGEALSLLKKRFSHRPVQEKFVCLNCGFETHADEQAALNIARSWLFLRSQEYKKYQTNKTTGNTDKRAFVETWQSFYRKKLKEVWKPAV

SEQ ID NO: 34368 - protein, 978 aa, synthetic construct
  REGION 1..978: note = engineered CasX variant
QEIKRINKIRRRLVKDSNTKKAGKTGPMKTLLVRVMTPDLRERLENLRKKPENIPQPISNTSRANLNKLLTDYTEMKKAILHVYDEEFQKDPVGLMSRVAQPASKKIDQNKLKPEMDEKGNLTTAGFACSQCGQPLFVYKLEQVSEKGKAYTNYFGRCNVAEHEKLILLAQLKPEKDSDEAVTYSLGKFGQRALDFYSIHVTKESTHPVKPLAQIAGNRYASHPVGKALSDACMGTIASFLSKYQDIIIEHQKVVKGNQKRLESLRELAGKENLEYPSVTLPPQPHTSEGVDAYNEVIARVRMWVNLNLWQKLKLSRDDAKPLLRLKGFPSFPLVERQANEVDWWDMVCNVKKLINEKKEDGKVFWQNLAGYKRQEALRPYLSSEEDRKKGKKFARYQLGDLLLHLEKKHGEDWGKVYDEAWERIDKKVEGLSKHIKLEEERRSEDAQSKAALTDWLRAKASFVIEGLKEADKDEFCRCELKLQKWYGDLRGKPFAIEAENSILDISGFSKQYNCAFIWQKDGVKKLNLYLIINYFKGGKLRFKKIKPEAFEANRFYTVINKKSGEIVPMEVNFNFDDPNLIILPLAFGKRQGREFIWNDLLSLETGSLKLANGRVIEKTLYNRRTRQDEPALFVALTFERREVLDSSNIKPMNLIGVDRGENIPAVIALTDPEGCPLSRFKDSLGNPTHILRIGESYKEKQRTIQAKKEVEQRRAGGYSRKYASKAKNLADDMVRNTARDLLYYAVTQDAMLIFENLSRGFGRQGKRTFMAERQYTRMEDWLTAKLAYEGLPSKTYLSKTLAQYTSKTCSNCGFTITSADYDRVLEKLKKTATGWMTTINGKELKVEGQITYYNRYKRQNVVKDLSVELDRLSEESVNNDISSWTKGRSGEALSLLKKRFSHRPVQEKFVCLNCGFETHADEQAALNIARSWLFLRSQEYKKYQTNKTTGNTDKRAFVETWQSFYRKKLKEVWKPAV

SEQ ID NO: 34369 - protein, 978 aa, synthetic construct
  REGION 1..978: note = engineered CasX variant
QEIKRINKIRRRLVKDSNTKKAGKTGPMKTLLVRVMTPDLRERLENLRKKPENIPQPISNTSRANLNKLLTDYTEMKKAILHVYDEEFQKDPVGLMSRVAQPASKKIDQNKLKPEMDEKGNLTTAGFACSQCGQPLFVYKLEQVSEKGKAYTNYFGRCNVAEHEKLILLAQLKPEKDSDEAVTYSLGKFGQRALDFYSIHVTKESTHPVKPLAQIAGNRYASSPVGKALSDACMGTIASFLSKYQDIIIEHQKVVKGNQKRLESLRELAGKENLEYPSVTLPPQPHTSEGVDAYNEVIARVRMWVNLNLWQKLKLSRDDAKPLLRLKGFPSFPLVERQANEVDWWDMVCNVKKLINEKKEDGKVFWQNLAGYKRQEALRPYLSSEEDRKKGKKFARYQLGDLLLHLEKKHGEDWGKVYDEAWERIDKKVEGLSKHIKLEEERRSEDAQSKAALTDWLRAKASFVIEGLKEADKDEFCRCELKLQKWYGDLRGKPFAIEAENSILDISGFSKQYNCAFIWQKDGVKKLNLYLIINYFKGGKLRFKKIKPEAFEANRFYTVINKKSGEIVPMEVNFNFDDPNLIILPLAFGKRQGREFIWNDLLSLETGSLKLANGRVIEKTLYNRRTRQDEPALFVALTFERREVLDSSNIKPMNLIGVDRGENIPAVIALTDPEGCPLSRFKDSLGNPTHILRIGESYKEKQRTIQAKKEVEQRRAGGYSRKYASKAKNLADDMVRNTARDLLYYAVTQDAMLIFENLSRGFGRQGKRTFMAERQYTRMEDWLTAKLAYEGLPSKTYLSKTLAQYTSKTCSNCGFTITSADYDRVLEKLKKTATGWMTTINGKELKVEGQITYYNRYKRQNVVKDLSVELDRLSEESVNNDISSWTKGRSGEALSLLKKRFSHRPVQEKFVCLNCGFETHADEQAALNIARSWLFLRSQEYKKYQTNKTTGNTDKRAFVETWQSFYRKKLKEVWKPAV

SEQ ID NO: 34370 - protein, 978 aa, synthetic construct
  REGION 1..978: note = engineered CasX variant
QEIKRINKIRRRLVKDSNTKKAGKTGPMKTLLVRVMTPDLRERLENLRKKPENIPQPISNTSRANLNKLLTDYTEMKKAILHVYDEEFQKDPVGLMSRVAQPASKKIDQNKLKPEMDEKGNLTTAGFACSQCGQPLFVYKLEQVSEKGKAYTNYFGRCNVAEHEKLILLAQLKPEKDSDEAVTYSLGKFGQRALDFYSIHVTKESTHPVKPLAQIAGNRYASTPVGKALSDACMGTIASFLSKYQDIIIEHQKVVKGNQKRLESLRELAGKENLEYPSVTLPPQPHTSEGVDAYNEVIARVRMWVNLNLWQKLKLSRDDAKPLLRLKGFPSFPLVERQANEVDWWDMVCNVKKLINEKKEDGKVFWQNLAGYKRQEALRPYLSSEEDRKKGKKFARYQLGDLLLHLEKKHGEDWGKVYDEAWERIDKKVEGLSKHIKLEEERRSEDAQSKAALTDWLRAKASFVIEGLKEADKDEFCRCELKLQKWYGDLRGKPFAIEAENSILDISGFSKQYNCAFIWQKDGVKKLNLYLIINYFKGGKLRFKKIKPEAFEANRFYTVINKKSGEIVPMEVNFNFDDPNLIILPLAFGKRQGREFIWNDLLSLETGSLKLANGRVIEKTLYNRRTRQDEPALFVALTFERREVLDSSNIKPMNLIGVDRGENIPAVIALTDPEGCPLSRFKDSLGNPTHILRIGESYKEKQRTIQAKKEVEQRRAGGYSRKYASKAKNLADDMVRNTARDLLYYAVTQDAMLIFENLSRGFGRQGKRTFMAERQYTRMEDWLTAKLAYEGLPSKTYLSKTLAQYTSKTCSNCGFTITSADYDRVLEKLKKTATGWMTTINGKELKVEGQITYYNRYKRQNVVKDLSVELDRLSEESVNNDISSWTKGRSGEALSLLKKRFSHRPVQEKFVCLNCGFETHADEQAALNIARSWLFLRSQEYKKYQTNKTTGNTDKRAFVETWQSFYRKKLKEVWKPAV

SEQ ID NO: 34371 - protein, 978 aa, synthetic construct
  REGION 1..978: note = engineered CasX variant
QEIKRINKIRRRLVKDSNTKKAGKTGPMKTLLVRVMTPDLRERLENLRKKPENIPQPISNTSRANLNKLLTDYTEMKKAILHVYDEEFQKDPVGLMSRVAQPASKKIDQNKLKPEMDEKGNLTTAGFACSQCGQPLFVYKLEQVSEKGKAYTNYFGRCNVAEHEKLILLAQLKPEKDSDEAVTYSLGKFGQRALDFYSIHVTKESTHPVKPLAQIAGNRYASAPVGKALSDACMGTIASFLSKYQDIIIEHQKVVKGNQKRLESLRELAGKENLEYPSVTLPPQPHTSEGVDAYNEVIARVRMWVNLNLWQKLKLSRDDAKPLLRLKGFPSFPLVERQANEVDWWDMVCNVKKLINEKKEDGKVFWQNLAGYKRQEALRPYLSSEEDRKKGKKFARYQLGDLLLHLEKKHGEDWGKVYDEAWERIDKKVEGLSKHIKLEEERRSEDAQSKAALTDWLRAKASFVIEGLKEADKDEFCRCELKLQKWYGDLRGKPFAIEAENSILDISGFSKQYNCAFIWQKDGVKKLNLYLIINYFKGGKLRFKKIKPEAFEANRFYTVINKKSGEIVPMEVNFNFDDPNLIILPLAFGKRQGREFIWNDLLSLETGSLKLANGRVIEKTLYNRRTRQDEPALFVALTFERREVLDSSNIKPMNLIGVDRGENIPAVIALTDPEGCPLSRFKDSLGNPTHILRIGESYKEKQRTIQAKKEVEQRRAGGYSRKYASKAKNLADDMVRNTARDLLYYAVTQDAMLIFENLSRGFGRQGKRTFMAERQYTRMEDWLTAKLAYEGLPSKTYLSKTLAQYTSKTCSNCGFTITSADYDRVLEKLKKTATGWMTTINGKELKVEGQITYYNRYKRQNVVKDLSVELDRLSEESVNNDISSWTKGRSGEALSLLKKRFSHRPVQEKFVCLNCGFETHADEQAALNIARSWLFLRSQEYKKYQTNKTTGNTDKRAFVETWQSFYRKKLKEVWKPAV

SEQ ID NO: 34372 - protein, 978 aa, synthetic construct
  REGION 1..978: note = engineered CasX variant
QEIKRINKIRRRLVKDSNTKKAGKTGPMKTLLVRVMTPDLRERLENLRKKPENIPQPISNTSRANLNKLLTDYTEMKKAILHVYDEEFQKDPVGLMSRVAQPASKKIDQNKLKPEMDEKGNLTTAGFACSQCGQPLFVYKLEQVSEKGKAYTNYFGRCNVAEHEKLILLAQLKPEKDSDEAVTYSLGKFGQRALDFYSIHVTKESTHPVKPLAQIAGNRYASVPVGKALSDACMGTIASFLSKYQDIIIEHQKVVKGNQKRLESLRELAGKENLEYPSVTLPPQPHTSEGVDAYNEVIARVRMWVNLNLWQKLKLSRDDAKPLLRLKGFPSFPLVERQANEVDWWDMVCNVKKLINEKKEDGKVFWQNLAGYKRQEALRPYLSSEEDRKKGKKFARYQLGDLLLHLEKKHGEDWGKVYDEAWERIDKKVEGLSKHIKLEEERRSEDAQSKAALTDWLRAKASFVIEGLKEADKDEFCRCELKLQKWYGDLRGKPFAIEAENSILDISGFSKQYNCAFIWQKDGVKKLNLYLIINYFKGGKLRFKKIKPEAFEANRFYTVINKKSGEIVPMEVNFNFDDPNLIILPLAFGKRQGREFIWNDLLSLETGSLKLANGRVIEKTLYNRRTRQDEPALFVALTFERREVLDSSNIKPMNLIGVDRGENIPAVIALTDPEGCPLSRFKDSLGNPTHILRIGESYKEKQRTIQAKKEVEQRRAGGYSRKYASKAKNLADDMVRNTARDLLYYAVTQDAMLIFENLSRGFGRQGKRTFMAERQYTRMEDWLTAKLAYEGLPSKTYLSKTLAQYTSKTCSNCGFTITSADYDRVLEKLKKTATGWMTTINGKELKVEGQITYYNRYKRQNVVKDLSVELDRLSEESVNNDISSWTKGRSGEALSLLKKRFSHRPVQEKFVCLNCGFETHADEQAALNIARSWLFLRSQEYKKYQTNKTTGNTDKRAFVETWQSFYRKKLKEVWKPAV

SEQ ID NO: 34373 - protein, 978 aa, synthetic construct
  REGION 1..978: note = engineered CasX variant
QEIKRINKIRRRLVKDSNTKKAGKTGPMKTLLVRVMTPDLRERLENLRKKPENIPQPISNTSRANLNKLLTDYTEMKKAILHVYDEEFQKDPVGLMSRVAQPASKKIDQNKLKPEMDEKGNLTTAGFACSQCGQPLFVYKLEQVSEKGKAYTNYFGRCNVAEHEKLIKLAQLKPEKDSDEAVTYSLGKFGQRALDFYSIHVTKESTHPVKPLAQIAGNRYASGPVGKALSDACMGTIASFLSKYQDIIIEHQKVVKGNQKRLESLRELAGKENLEYPSVTLPPQPHTSEGVDAYNEVIARVRMWVNLNLWQKLKLSRDDAKPLLRLKGFPSFPLVERQANEVDWWDMVCNVKKLINEKKEDGKVFWQNLAGYKRQEALRPYLSSEEDRKKGKKFARYQLGDLLLHLEKKHGEDWGKVYDEAWERIDKKVEGLSKHIKLEEERRSEDAQSKAALTDWLRAKASFVIEGLKEADKDEFCRCELKLQKWYGDLRGKPFAIEAENSILDISGFSKQYNCAFIWQKDGVKKLNLYLIINYFKGGKLRFKKIKPEAFEANRFYTVINKKSGEIVPMEVNFNFDDPNLIILPLAFGKRQGREFIWNDLLSLETGSLKLANGRVIEKTLYNRRTRQDEPALFVALTFERREVLDSSNIKPMNLIGVDRGENIPAVIALTDPEGCPLSRFKDSLGNPTHILRIGESYKEKQRTIQAKKEVEQRRAGGYSRKYASKAKNLADDMVRNTARDLLYYAVTQDAMLIFENLSRGFGRQGKRTFMAERQYTRMEDWLTAKLAYEGLPSKTYLSKTLAQYTSKTCSNCGFTITSADYDRVLEKLKKTATGWMTTINGKELKVEGQITYYNRYKRQNVVKDLSVELDRLSEESVNNDISSWTKGRSGEALSLLKKRFSHRPVQEKFVCLNCGFETHADEQAALNIARSWLFLRSQEYKKYQTNKTTGNTDKRAFVETWQSFYRKKLKEVWKPAV

SEQ ID NO: 34374 - protein, 977 aa, synthetic construct
  REGION 1..977: note = engineered CasX variant
QEIKRINKIRRRLVKDSNTKKAGKTGPMKTLLVRVMTPDLRERLENLRKKPENIPQPISNTSRANLNKLLTDYTEMKKAILHVYDEEFQKDPVGLMSRVAQPASKKIDQNKLKPEMDEKGNLTTAGFACSQCGQPLFVYKLEQVSEKGKAYTNYFGRCNVAEHEKLILLAQLKPEKDSDEAVTYSLGKFGQRALDFYSIHVTKESTHPVKPLAQIAGNRYASPVGKALSDACMGTIASFLSKYQDIIIEHQKVVKGNQKRLESLRELAGKENLEYPSVTLPPQPHTSEGVDAYNEVIARVRMWVNLNLWQKLKLSRDDAKPLLRLKGFPSFPLVERQANEVDWWDMVCNVKKLINEKKEDGKVFWQNLAGYKRQEALRPYLSSEEDRKKGKKFARYQLGDLLLHLEKKHGEDWGKVYDEAWERIDKKVEGLSKHIKLEEERRSEDAQSKAALTDWLRAKASFVIEGLKEADKDEFCRCELKLQKWYGDLRGKPFAIEAENSILDISGFSKQYNCAFIWQKDGVKKLNLYLIINYFKGGKLRFKKIKPEAFEANRFYTVINKKSGEIVPMEVNFNFDDPNLIILPLAFGKRQGREFIWNDLLSLETGSLKLANGRVIEKTLYNRRTRQDEPALFVALTFERREVLDSSNIKPMNLIGVDRGENIPAVIALTDPEGCPLSRFKDSLGNPTHILRIGESYKEKQRTIQAKKEVEQRRAGGYSRKYASKAKNLADDMVRNTARDLLYYAVTQDAMLIFENLSRGFGRQGKRTFMAERQYTRMEDWLTAKLAYEGLPSKTYLSKTLAQYTSKTCSNCGFTITSADYDRVLEKLKKTATGWMTTINGKELKVEGQITYYNRYKRQNVVKDLSVELDRLSEESVNNDISSWTKGRSGEALSLLKKRFSHRPVQEKFVCLNCGFETHADEQAALNIARSWLFLRSQEYKKYQTNKTTGNTDKRAFVETWQSFYRKKLKEVWKPAV

SEQ ID NO: 34375 - protein, 978 aa, synthetic construct
  REGION 1..978: note = engineered CasX variant
QEIKRINKIRRRLVKDSNTKKAGKTGPMKTLLVRVMTPDLRERLENLRKKPENIPQPISNTSRANLNKLLTDYTEMKKAILHVYDEEFQKDPVGLMSRVAQPASKKIDQNKLKPEMDEKGNLTTAGFACSQCGQPLFVYKLEQVSEKGKAYTNYFGRCNVAEHEKLILLAQLKPEKDSDEAVTYSLGKFGQRALDFYSIHVTKESTHPVKPLAQIAGNRYASYPVGKALSDACMGTIASFLSKYQDIIIEHQKVVKGNQKRLESLRELAGKENLEYPSVTLPPQPHTKEGLDAYNEVIARVRMWVNLNLWQKLKLSRDDAKPLLRLKGFPSFPLVERQANEVDWWDMVCNVKKLINEKKEDGKVFWQNLAGYKRQEALRPYLSSEEDRKKGKKFARYQLGDLLLHLEKKHGEDWGKVYDEAWERIDKKVEGLSKHIKLEEERRSEDAQSKAALTDWLRAKASFVIEGLKEADKDEFCRCELKLQKWYGDLRGKPFAIEAENSILDISGFSKQYNCAFIWQKDGVKKLNLYLIINYFKGGKLRFKKIKPEAFEANRFYTVINKKSGEIVPMEVNFNFDDPNLIILPLAFGKRQGREFIWNDLLSLETGSLKLANGRVIEKTLYNRRTRQDEPALFVALTFERREVLDSSNIKPMNLIGVDRGENIPAVIALTDPEGCPLSRFKDSLGNPTHILRIGESYKEKQRTIQAKKEVEQRRAGGYSRKYASKAKNLADDMVRNTARDLLYYAVTQDAMLIFENLSRGFGRQGKRTFMAERQYTRMEDWLTAKLAYEGLPSKTYLSKTLAQYTSKTCSNCGFTITSADYDRVLEKLKKTATGWMTTINGKELKVEGQITYYNRYKRQNVVKDLSVELDRLSEESVNNDISSWTKGRSGEALSLLKKRFSHRPVQEKFVCLNCGFETHADEQAALNIARSWLFLRSQEYKKYQTNKTTGNTDKRAFVETWQSFYRKKLKEVWKPAV

SEQ ID NO: 34376 - protein, 978 aa, synthetic construct
  REGION 1..978: note = engineered CasX variant
QEIKRINKIRRRLVKDSNTKKAGKTGPMKTLLVRVMTPDLRERLENLRKKPENIPQPISNTSRANLNKLLTDYTEMKKAILHVYDEEFQKDPVGLMSRVAQPASKKIDQNKLKPEMDEKGNLTTAGFACSQCGQPLFVYKLEQVSEKGKAYTNYFGRCNVAEHEKLILLAQLKPEKDSDEAVTYSLGKFGQRALDFYSIHVTKESTHPVKPLAQIAGNRYASHPVGKALSDACMGTIASFLSKYQDIIIEHQKVVKGNQKRLESLRELAGKENLEYPSVTLPPQPHTKEGLDAYNEVIARVRMWVNLNLWQKLKLSRDDAKPLLRLKGFPSFPLVERQANEVDWWDMVCNVKKLINEKKEDGKVFWQNLAGYKRQEALRPYLSSEEDRKKGKKFARYQLGDLLLHLEKKHGEDWGKVYDEAWERIDKKVEGLSKHIKLEEERRSEDAQSKAALTDWLRAKASFVIEGLKEADKDEFCRCELKLQKWYGDLRGKPFAIEAENSILDISGFSKQYNCAFIWQKDGVKKLNLYLIINYFKGGKLRFKKIKPEAFEANRFYTVINKKSGEIVPMEVNFNFDDPNLIILPLAFGKRQGREFIWNDLLSLETGSLKLANGRVIEKTLYNRRTRQDEPALFVALTFERREVLDSSNIKPMNLIGVDRGENIPAVIALTDPEGCPLSRFKDSLGNPTHILRIGESYKEKQRTIQAKKEVEQRRAGGYSRKYASKAKNLADDMVRNTARDLLYYAVTQDAMLIFENLSRGFGRQGKRTFMAERQYTRMEDWLTAKLAYEGLPSKTYLSKTLAQYTSKTCSNCGFTITSADYDRVLEKLKKTATGWMTTINGKELKVEGQITYYNRYKRQNVVKDLSVELDRLSEESVNNDISSWTKGRSGEALSLLKKRFSHRPVQEKFVCLNCGFETHADEQAALNIARSWLFLRSQEYKKYQTNKTTGNTDKRAFVETWQSFYRKKLKEVWKPAV

SEQ ID NO: 34377 - protein, 978 aa, synthetic construct
  REGION 1..978: note = engineered CasX variant
QEIKRINKIRRRLVKDSNTKKAGKTGPMKTLLVRVMTPDLRERLENLRKKPENIPQPISNTSRANLNKLLTDYTEMKKAILHVYDEEFQKDPVGLMSRVAQPASKKIDQNKLKPEMDEKGNLTTAGFACSQCGQPLFVYKLEQVSEKGKAYTNYFGRCNVAEHEKLILLAQLKPEKDSDEAVTYSLGKFGQRALDFYSIHVTKESTHPVKPLAQIAGNRYASSPVGKALSDACMGTIASFLSKYQDIIIEHQKVVKGNQKRLESLRELAGKENLEYPSVTLPPQPHTKEGLDAYNEVIARVRMWVNLNLWQKLKLSRDDAKPLLRLKGFPSFPLVERQANEVDWWDMVCNVKKLINEKKEDGKVFWQNLAGYKRQEALRPYLSSEEDRKKGKKFARYQLGDLLLHLEKKHGEDWGKVYDEAWERIDKKVEGLSKHIKLEEERRSEDAQSKAALTDWLRAKASFVIEGLKEADKDEFCRCELKLQKWYGDLRGKPFAIEAENSILDISGFSKQYNCAFIWQKDGVKKLNLYLIINYFKGGKLRFKKIKPEAFEANRFYTVINKKSGEIVPMEVNFNFDDPNLIILPLAFGKRQGREFIWNDLLSLETGSLKLANGRVIEKTLYNRRTRQDEPALFVALTFERREVLDSSNIKPMNLIGVDRGENIPAVIALTDPEGCPLSRFKDSLGNPTHILRIGESYKEKQRTIQAKKEVEQRRAGGYSRKYASKAKNLADDMVRNTARDLLYYAVTQDAMLIFENLSRGFGRQGKRTFMAERQYTRMEDWLTAKLAYEGLPSKTYLSKTLAQYTSKTCSNCGFTITSADYDRVLEKLKKTATGWMTTINGKELKVEGQITYYNRYKRQNVVKDLSVELDRLSEESVNNDISSWTKGRSGEALSLLKKRFSHRPVQEKFVCLNCGFETHADEQAALNIARSWLFLRSQEYKKYQTNKTTGNTDKRAFVETWQSFYRKKLKEVWKPAV

SEQ ID NO: 34378 - protein, 978 aa, synthetic construct
  REGION 1..978: note = engineered CasX variant
QEIKRINKIRRRLVKDSNTKKAGKTGPMKTLLVRVMTPDLRERLENLRKKPENIPQPISNTSRANLNKLLTDYTEMKKAILHVYDEEFQKDPVGLMSRVAQPASKKIDQNKLKPEMDEKGNLTTAGFACSQCGQPLFVYKLEQVSEKGKAYTNYFGRCNVAEHEKLILLAQLKPEKDSDEAVTYSLGKFGQRALDFYSIHVTKESTHPVKPLAQIAGNRYASTPVGKALSDACMGTIASFLSKYQDIIIEHQKVVKGNQKRLESLRELAGKENLEYPSVTLPPQPHTKEGLDAYNEVIARVRMWVNLNLWQKLKLSRDDAKPLLRLKGFPSFPLVERQANEVDWWDMVCNVKKLINEKKEDGKVFWQNLAGYKRQEALRPYLSSEEDRKKGKKFARYQLGDLLLHLEKKHGEDWGKVYDEAWERIDKKVEGLSKHIKLEEERRSEDAQSKAALTDWLRAKASFVIEGLKEADKDEFCRCELKLQKWYGDLRGKPFAIEAENSILDISGFSKQYNCAFIWQKDGVKKLNLYLIINYFKGGKLRFKKIKPEAFEANRFYTVINKKSGEIVPMEVNFNFDDPNLIILPLAFGKRQGREFIWNDLLSLETGSLKLANGRVIEKTLYNRRTRQDEPALFVALTFERREVLDSSNIKPMNLIGVDRGENIPAVIALTDPEGCPLSRFKDSLGNPTHILRIGESYKEKQRTIQAKKEVEQRRAGGYSRKYASKAKNLADDMVRNTARDLLYYAVTQDAMLIFENLSRGFGRQGKRTFMAERQYTRMEDWLTAKLAYEGLPSKTYLSKTLAQYTSKTCSNCGFTITSADYDRVLEKLKKTATGWMTTINGKELKVEGQITYYNRYKRQNVVKDLSVELDRLSEESVNNDISSWTKGRSGEALSLLKKRFSHRPVQEKFVCLNCGFETHADEQAALNIARSWLFLRSQEYKKYQTNKTTGNTDKRAFVETWQSFYRKKLKEVWKPAV

SEQ ID NO: 34379 - protein, 978 aa, synthetic construct
  REGION 1..978: note = engineered CasX variant
QEIKRINKIRRRLVKDSNTKKAGKTGPMKTLLVRVMTPDLRERLENLRKKPENIPQPISNTSRANLNKLLTDYTEMKKAILHVYDEEFQKDPVGLMSRVAQPASKKIDQNKLKPEMDEKGNLTTAGFACSQCGQPLFVYKLEQVSEKGKAYTNYFGRCNVAEHEKLILLAQLKPEKDSDEAVTYSLGKFGQRALDFYSIHVTKESTHPVKPLAQIAGNRYASAPVGKALSDACMGTIASFLSKYQDIIIEHQKVVKGNQKRLESLRELAGKENLEYPSVTLPPQPHTKEGLDAYNEVIARVRMWVNLNLWQKLKLSRDDAKPLLRLKGFPSFPLVERQANEVDWWDMVCNVKKLINEKKEDGKVFWQNLAGYKRQEALRPYLSSEEDRKKGKKFARYQLGDLLLHLEKKHGEDWGKVYDEAWERIDKKVEGLSKHIKLEEERRSEDAQSKAALTDWLRAKASFVIEGLKEADKDEFCRCELKLQKWYGDLRGKPFAIEAENSILDISGFSKQYNCAFIWQKDGVKKLNLYLIINYFKGGKLRFKKIKPEAFEANRFYTVINKKSGEIVPMEVNFNFDDPNLIILPLAFGKRQGREFIWNDLLSLETGSLKLANGRVIEKTLYNRRTRQDEPALFVALTFERREVLDSSNIKPMNLIGVDRGENIPAVIALTDPEGCPLSRFKDSLGNPTHILRIGESYKEKQRTIQAKKEVEQRRAGGYSRKYASKAKNLADDMVRNTARDLLYYAVTQDAMLIFENLSRGFGRQGKRTFMAERQYTRMEDWLTAKLAYEGLPSKTYLSKTLAQYTSKTCSNCGFTITSADYDRVLEKLKKTATGWMTTINGKELKVEGQITYYNRYKRQNVVKDLSVELDRLSEESVNNDISSWTKGRSGEALSLLKKRFSHRPVQEKFVCLNCGFETHADEQAALNIARSWLFLRSQEYKKYQTNKTTGNTDKRAFVETWQSFYRKKLKEVWKPAV

SEQ ID NO: 34380 - protein, 978 aa, synthetic construct
  REGION 1..978: note = engineered CasX variant
QEIKRINKIRRRLVKDSNTKKAGKTGPMKTLLVRVMTPDLRERLENLRKKPENIPQPISNTSRANLNKLLTDYTEMKKAILHVYDEEFQKDPVGLMSRVAQPASKKIDQNKLKPEMDEKGNLTTAGFACSQCGQPLFVYKLEQVSEKGKAYTNYFGRCNVAEHEKLILLAQLKPEKDSDEAVTYSLGKFGQRALDFYSIHVTKESTHPVKPLAQIAGNRYASVPVGKALSDACMGTIASFLSKYQDIIIEHQKVVKGNQKRLESLRELAGKENLEYPSVTLPPQPHTKEGLDAYNEVIARVRMWVNLNLWQKLKLSRDDAKPLLRLKGFPSFPLVERQANEVDWWDMVCNVKKLINEKKEDGKVFWQNLAGYKRQEALRPYLSSEEDRKKGKKFARYQLGDLLLHLEKKHGEDWGKVYDEAWERIDKKVEGLSKHIKLEEERRSEDAQSKAALTDWLRAKASFVIEGLKEADKDEFCRCELKLQKWYGDLRGKPFAIEAENSILDISGFSKQYNCAFIWQKDGVKKLNLYLIINYFKGGKLRFKKIKPEAFEANRFYTVINKKSGEIVPMEVNFNFDDPNLIILPLAFGKRQGREFIWNDLLSLETGSLKLANGRVIEKTLYNRRTRQDEPALFVALTFERREVLDSSNIKPMNLIGVDRGENIPAVIALTDPEGCPLSRFKDSLGNPTHILRIGESYKEKQRTIQAKKEVEQRRAGGYSRKYASKAKNLADDMVRNTARDLLYYAVTQDAMLIFENLSRGFGRQGKRTFMAERQYTRMEDWLTAKLAYEGLPSKTYLSKTLAQYTSKTCSNCGFTITSADYDRVLEKLKKTATGWMTTINGKELKVEGQITYYNRYKRQNVVKDLSVELDRLSEESVNNDISSWTKGRSGEALSLLKKRFSHRPVQEKFVCLNCGFETHADEQAALNIARSWLFLRSQEYKKYQTNKTTGNTDKRAFVETWQSFYRKKLKEVWKPAV

SEQ ID NO: 34381 - protein, 978 aa, synthetic construct
  REGION 1..978: note = engineered CasX variant
QEIKRINKIRRRLVKDSNTKKAGKTGPMKTLLVRVMTPDLRERLENLRKKPENIPQPISNTSRANLNKLLTDYTEMKKAILHVYDEEFQKDPVGLMSRVAQPASKKIDQNKLKPEMDEKGNLTTAGFACSQCGQPLFVYKLEQVSEKGKAYTNYFGRCNVAEHEKLIKLAQLKPEKDSDEAVTYSLGKFGQRALDFYSIHVTKESTHPVKPLAQIAGNRYASGPVGKALSDACMGTIASFLSKYQDIIIEHQKVVKGNQKRLESLRELAGKENLEYPSVTLPPQPHTKEGLDAYNEVIARVRMWVNLNLWQKLKLSRDDAKPLLRLKGFPSFPLVERQANEVDWWDMVCNVKKLINEKKEDGKVFWQNLAGYKRQEALRPYLSSEEDRKKGKKFARYQLGDLLLHLEKKHGEDWGKVYDEAWERIDKKVEGLSKHIKLEEERRSEDAQSKAALTDWLRAKASFVIEGLKEADKDEFCRCELKLQKWYGDLRGKPFAIEAENSILDISGFSKQYNCAFIWQKDGVKKLNLYLIINYFKGGKLRFKKIKPEAFEANRFYTVINKKSGEIVPMEVNFNFDDPNLIILPLAFGKRQGREFIWNDLLSLETGSLKLANGRVIEKTLYNRRTRQDEPALFVALTFERREVLDSSNIKPMNLIGVDRGENIPAVIALTDPEGCPLSRFKDSLGNPTHILRIGESYKEKQRTIQAKKEVEQRRAGGYSRKYASKAKNLADDMVRNTARDLLYYAVTQDAMLIFENLSRGFGRQGKRTFMAERQYTRMEDWLTAKLAYEGLPSKTYLSKTLAQYTSKTCSNCGFTITSADYDRVLEKLKKTATGWMTTINGKELKVEGQITYYNRYKRQNVVKDLSVELDRLSEESVNNDISSWTKGRSGEALSLLKKRFSHRPVQEKFVCLNCGFETHADEQAALNIARSWLFLRSQEYKKYQTNKTTGNTDKRAFVETWQSFYRKKLKEVWKPAV

SEQ ID NO: 34382 - protein, 977 aa, synthetic construct
  REGION 1..977: note = engineered CasX variant
QEIKRINKIRRRLVKDSNTKKAGKTGPMKTLLVRVMTPDLRERLENLRKKPENIPQPISNTSRANLNKLLTDYTEMKKAILHVYDEEFQKDPVGLMSRVAQPASKKIDQNKLKPEMDEKGNLTTAGFACSQCGQPLFVYKLEQVSEKGKAYTNYFGRCNVAEHEKLILLAQLKPEKDSDEAVTYSLGKFGQRALDFYSIHVTKESTHPVKPLAQIAGNRYASPVGKALSDACMGTIASFLSKYQDIIIEHQKVVKGNQKRLESLRELAGKENLEYPSVTLPPQPHTKEGLDAYNEVIARVRMWVNLNLWQKLKLSRDDAKPLLRLKGFPSFPLVERQANEVDWWDMVCNVKKLINEKKEDGKVFWQNLAGYKRQEALRPYLSSEEDRKKGKKFARYQLGDLLLHLEKKHGEDWGKVYDEAWERIDKKVEGLSKHIKLEEERRSEDAQSKAALTDWLRAKASFVIEGLKEADKDEFCRCELKLQKWYGDLRGKPFAIEAENSILDISGFSKQYNCAFIWQKDGVKKLNLYLIINYFKGGKLRFKKIKPEAFEANRFYTVINKKSGEIVPMEVNFNFDDPNLIILPLAFGKRQGREFIWNDLLSLETGSLKLANGRVIEKTLYNRRTRQDEPALFVALTFERREVLDSSNIKPMNLIGVDRGENIPAVIALTDPEGCPLSRFKDSLGNPTHILRIGESYKEKQRTIQAKKEVEQRRAGGYSRKYASKAKNLADDMVRNTARDLLYYAVTQDAMLIFENLSRGFGRQGKRTFMAERQYTRMEDWLTAKLAYEGLPSKTYLSKTLAQYTSKTCSNCGFTITSADYDRVLEKLKKTATGWMTTINGKELKVEGQITYYNRYKRQNVVKDLSVELDRLSEESVNNDISSWTKGRSGEALSLLKKRFSHRPVQEKFVCLNCGFETHADEQAALNIARSWLFLRSQEYKKYQTNKTTGNTDKRAFVETWQSFYRKKLKEVWKPAV

SEQ ID NO: 34383 - protein, 978 aa, synthetic construct
  REGION 1..978: note = engineered CasX variant
QEIKRINKIRRRLVKDSNTKKAGKTGPMKTLLVRVMTPDLRERLENLRKKPENIPQPISNTSRANLNKLLTDYTEMKKAILHVYDEEFQKDPVGLMSRVAQPASKKIDQNKLKPEMDEKGNLTTAGFACSQCGQPLFVYKLEQVSEKGKAYTNYFGRCNVAEHEKLILLAQLKPEKDSDEAVTYSLGKFGQRALDFYSIHVTKESTHPVKPLAQIAGNRYASYPVGKALSDACMGTIASFLSKYQDIIIEHQKVVKGNQKRLESLRELAGKENLEYPSVTLPPQPHTKEGVDAYNEVIARVRTWVNLNLWQKLKLSRDDAKPLLRLKGFPSFPLVERQANEVDWWDMVCNVKKLINEKKEDGKVFWQNLAGYKRQEALRPYLSSEEDRKKGKKFARYQLGDLLLHLEKKHGEDWGKVYDEAWERIDKKVEGLSKHIKLEEERRSEDAQSKAALTDWLRAKASFVIEGLKEADKDEFCRCELKLQKWYGDLRGKPFAIEAENSILDISGFSKQYNCAFIWQKDGVKKLNLYLIINYFKGGKLRFKKIKPEAFEANRFYTVINKKSGEIVPMEVNFNFDDPNLIILPLAFGKRQGREFIWNDLLSLETGSLKLANGRVIEKTLYNRRTRQDEPALFVALTFERREVLDSSNIKPMNLIGVDRGENIPAVIALTDPEGCPLSRFKDSLGNPTHILRIGESYKEKQRTIQAKKEVEQRRAGGYSRKYASKAKNLADDMVRNTARDLLYYAVTQDAMLIFENLSRGFGRQGKRTFMAERQYTRMEDWLTAKLAYEGLPSKTYLSKTLAQYTSKTCSNCGFTITSADYDRVLEKLKKTATGWMTTINGKELKVEGQITYYNRYKRQNVVKDLSVELDRLSEESVNNDISSWTKGRSGEALSLLKKRFSHRPVQEKFVCLNCGFETHADEQAALNIARSWLFLRSQEYKKYQTNKTTGNTDKRAFVETWQSFYRKKLKEVWKPAV

SEQ ID NO: 34384 - protein, 978 aa, synthetic construct
  REGION 1..978: note = engineered CasX variant
QEIKRINKIRRRLVKDSNTKKAGKTGPMKTLLVRVMTPDLRERLENLRKKPENIPQPISNTSRANLNKLLTDYTEMKKAILHVYDEEFQKDPVGLMSRVAQPASKKIDQNKLKPEMDEKGNLTTAGFACSQCGQPLFVYKLEQVSEKGKAYTNYFGRCNVAEHEKLILLAQLKPEKDSDEAVTYSLGKFGQRALDFYSIHVTKESTHPVKPLAQIAGNRYASHPVGKALSDACMGTIASFLSKYQDIIIEHQKVVKGNQKRLESLRELAGKENLEYPSVTLPPQPHTKEGVDAYNEVIARVRTWVNLNLWQKLKLSRDDAKPLLRLKGFPSFPLVERQANEVDWWDMVCNVKKLINEKKEDGKVFWQNLAGYKRQEALRPYLSSEEDRKKGKKFARYQLGDLLLHLEKKHGEDWGKVYDEAWERIDKKVEGLSKHIKLEEERRSEDAQSKAALTDWLRAKASFVIEGLKEADKDEFCRCELKLQKWYGDLRGKPFAIEAENSILDISGFSKQYNCAFIWQKDGVKKLNLYLIINYFKGGKLRFKKIKPEAFEANRFYTVINKKSGEIVPMEVNFNFDDPNLIILPLAFGKRQGREFIWNDLLSLETGSLKLANGRVIEKTLYNRRTRQDEPALFVALTFERREVLDSSNIKPMNLIGVDRGENIPAVIALTDPEGCPLSRFKDSLGNPTHILRIGESYKEKQRTIQAKKEVEQRRAGGYSRKYASKAKNLADDMVRNTARDLLYYAVTQDAMLIFENLSRGFGRQGKRTFMAERQYTRMEDWLTAKLAYEGLPSKTYLSKTLAQYTSKTCSNCGFTITSADYDRVLEKLKKTATGWMTTINGKELKVEGQITYYNRYKRQNVVKDLSVELDRLSEESVNNDISSWTKGRSGEALSLLKKRFSHRPVQEKFVCLNCGFETHADEQAALNIARSWLFLRSQEYKKYQTNKTTGNTDKRAFVETWQSFYRKKLKEVWKPAV

SEQ ID NO: 34385 - protein, 978 aa, synthetic construct
  REGION 1..978: note = engineered CasX variant
QEIKRINKIRRRLVKDSNTKKAGKTGPMKTLLVRVMTPDLRERLENLRKKPENIPQPISNTSRANLNKLLTDYTEMKKAILHVYDEEFQKDPVGLMSRVAQPASKKIDQNKLKPEMDEKGNLTTAGFACSQCGQPLFVYKLEQVSEKGKAYTNYFGRCNVAEHEKLILLAQLKPEKDSDEAVTYSLGKFGQRALDFYSIHVTKESTHPVKPLAQIAGNRYASSPVGKALSDACMGTIASFLSKYQDIIIEHQKVVKGNQKRLESLRELAGKENLEYPSVTLPPQPHTKEGVDAYNEVIARVRTWVNLNLWQKLKLSRDDAKPLLRLKGFPSFPLVERQANEVDWWDMVCNVKKLINEKKEDGKVFWQNLAGYKRQEALRPYLSSEEDRKKGKKFARYQLGDLLLHLEKKHGEDWGKVYDEAWERIDKKVEGLSKHIKLEEERRSEDAQSKAALTDWLRAKASFVIEGLKEADKDEFCRCELKLQKWYGDLRGKPFAIEAENSILDISGFSKQYNCAFIWQKDGVKKLNLYLIINYFKGGKLRFKKIKPEAFEANRFYTVINKKSGEIVPMEVNFNFDDPNLIILPLAFGKRQGREFIWNDLLSLETGSLKLANGRVIEKTLYNRRTRQDEPALFVALTFERREVLDSSNIKPMNLIGVDRGENIPAVIALTDPEGCPLSRFKDSLGNPTHILRIGESYKEKQRTIQAKKEVEQRRAGGYSRKYASKAKNLADDMVRNTARDLLYYAVTQDAMLIFENLSRGFGRQGKRTFMAERQYTRMEDWLTAKLAYEGLPSKTYLSKTLAQYTSKTCSNCGFTITSADYDRVLEKLKKTATGWMTTINGKELKVEGQITYYNRYKRQNVVKDLSVELDRLSEESVNNDISSWTKGRSGEALSLLKKRFSHRPVQEKFVCLNCGFETHADEQAALNIARSWLFLRSQEYKKYQTNKTTGNTDKRAFVETWQSFYRKKLKEVWKPAV

SEQ ID NO: 34386 - protein, 978 aa, synthetic construct
  REGION 1..978: note = engineered CasX variant
QEIKRINKIRRRLVKDSNTKKAGKTGPMKTLLVRVMTPDLRERLENLRKKPENIPQPISNTSRANLNKLLTDYTEMKKAILHVYDEEFQKDPVGLMSRVAQPASKKIDQNKLKPEMDEKGNLTTAGFACSQCGQPLFVYKLEQVSEKGKAYTNYFGRCNVAEHEKLILLAQLKPEKDSDEAVTYSLGKFGQRALDFYSIHVTKESTHPVKPLAQIAGNRYASTPVGKALSDACMGTIASFLSKYQDIIIEHQKVVKGNQKRLESLRELAGKENLEYPSVTLPPQPHTKEGVDAYNEVIARVRTWVNLNLWQKLKLSRDDAKPLLRLKGFPSFPLVERQANEVDWWDMVCNVKKLINEKKEDGKVFWQNLAGYKRQEALRPYLSSEEDRKKGKKFARYQLGDLLLHLEKKHGEDWGKVYDEAWERIDKKVEGLSKHIKLEEERRSEDAQSKAALTDWLRAKASFVIEGLKEADKDEFCRCELKLQKWYGDLRGKPFAIEAENSILDISGFSKQYNCAFIWQKDGVKKLNLYLIINYFKGGKLRFKKIKPEAFEANRFYTVINKKSGEIVPMEVNFNFDDPNLIILPLAFGKRQGREFIWNDLLSLETGSLKLANGRVIEKTLYNRRTRQDEPALFVALTFERREVLDSSNIKPMNLIGVDRGENIPAVIALTDPEGCPLSRFKDSLGNPTHILRIGESYKEKQRTIQAKKEVEQRRAGGYSRKYASKAKNLADDMVRNTARDLLYYAVTQDAMLIFENLSRGFGRQGKRTFMAERQYTRMEDWLTAKLAYEGLPSKTYLSKTLAQYTSKTCSNCGFTITSADYDRVLEKLKKTATGWMTTINGKELKVEGQITYYNRYKRQNVVKDLSVELDRLSEESVNNDISSWTKGRSGEALSLLKKRFSHRPVQEKFVCLNCGFETHADEQAALNIARSWLFLRSQEYKKYQTNKTTGNTDKRAFVETWQSFYRKKLKEVWKPAV

SEQ ID NO: 34387 - protein, 978 aa, synthetic construct
  REGION 1..978: note = engineered CasX variant
QEIKRINKIRRRLVKDSNTKKAGKTGPMKTLLVRVMTPDLRERLENLRKKPENIPQPISNTSRANLNKLLTDYTEMKKAILHVYDEEFQKDPVGLMSRVAQPASKKIDQNKLKPEMDEKGNLTTAGFACSQCGQPLFVYKLEQVSEKGKAYTNYFGRCNVAEHEKLILLAQLKPEKDSDEAVTYSLGKFGQRALDFYSIHVTKESTHPVKPLAQIAGNRYASAPVGKALSDACMGTIASFLSKYQDIIIEHQKVVKGNQKRLESLRELAGKENLEYPSVTLPPQPHTKEGVDAYNEVIARVRTWVNLNLWQKLKLSRDDAKPLLRLKGFPSFPLVERQANEVDWWDMVCNVKKLINEKKEDGKVFWQNLAGYKRQEALRPYLSSEEDRKKGKKFARYQLGDLLLHLEKKHGEDWGKVYDEAWERIDKKVEGLSKHIKLEEERRSEDAQSKAALTDWLRAKASFVIEGLKEADKDEFCRCELKLQKWYGDLRGKPFAIEAENSILDISGFSKQYNCAFIWQKDGVKKLNLYLIINYFKGGKLRFKKIKPEAFEANRFYTVINKKSGEIVPMEVNFNFDDPNLIILPLAFGKRQGREFIWNDLLSLETGSLKLANGRVIEKTLYNRRTRQDEPALFVALTFERREVLDSSNIKPMNLIGVDRGENIPAVIALTDPEGCPLSRFKDSLGNPTHILRIGESYKEKQRTIQAKKEVEQRRAGGYSRKYASKAKNLADDMVRNTARDLLYYAVTQDAMLIFENLSRGFGRQGKRTFMAERQYTRMEDWLTAKLAYEGLPSKTYLSKTLAQYTSKTCSNCGFTITSADYDRVLEKLKKTATGWMTTINGKELKVEGQITYYNRYKRQNVVKDLSVELDRLSEESVNNDISSWTKGRSGEALSLLKKRFSHRPVQEKFVCLNCGFETHADEQAALNIARSWLFLRSQEYKKYQTNKTTGNTDKRAFVETWQSFYRKKLKEVWKPAV

SEQ ID NO: 34388 - protein, 978 aa, synthetic construct
  REGION 1..978: note = engineered CasX variant
QEIKRINKIRRRLVKDSNTKKAGKTGPMKTLLVRVMTPDLRERLENLRKKPENIPQPISNTSRANLNKLLTDYTEMKKAILHVYDEEFQKDPVGLMSRVAQPASKKIDQNKLKPEMDEKGNLTTAGFACSQCGQPLFVYKLEQVSEKGKAYTNYFGRCNVAEHEKLILLAQLKPEKDSDEAVTYSLGKFGQRALDFYSIHVTKESTHPVKPLAQIAGNRYASVPVGKALSDACMGTIASFLSKYQDIIIEHQKVVKGNQKRLESLRELAGKENLEYPSVTLPPQPHTKEGVDAYNEVIARVRTWVNLNLWQKLKLSRDDAKPLLRLKGFPSFPLVERQANEVDWWDMVCNVKKLINEKKEDGKVFWQNLAGYKRQEALRPYLSSEEDRKKGKKFARYQLGDLLLHLEKKHGEDWGKVYDEAWERIDKKVEGLSKHIKLEEERRSEDAQSKAALTDWLRAKASFVIEGLKEADKDEFCRCELKLQKWYGDLRGKPFAIEAENSILDISGFSKQYNCAFIWQKDGVKKLNLYLIINYFKGGKLRFKKIKPEAFEANRFYTVINKKSGEIVPMEVNFNFDDPNLIILPLAFGKRQGREFIWNDLLSLETGSLKLANGRVIEKTLYNRRTRQDEPALFVALTFERREVLDSSNIKPMNLIGVDRGENIPAVIALTDPEGCPLSRFKDSLGNPTHILRIGESYKEKQRTIQAKKEVEQRRAGGYSRKYASKAKNLADDMVRNTARDLLYYAVTQDAMLIFENLSRGFGRQGKRTFMAERQYTRMEDWLTAKLAYEGLPSKTYLSKTLAQYTSKTCSNCGFTITSADYDRVLEKLKKTATGWMTTINGKELKVEGQITYYNRYKRQNVVKDLSVELDRLSEESVNNDISSWTKGRSGEALSLLKKRFSHRPVQEKFVCLNCGFETHADEQAALNIARSWLFLRSQEYKKYQTNKTTGNTDKRAFVETWQSFYRKKLKEVWKPAV

SEQ ID NO: 34389 - protein, 978 aa, synthetic construct
  REGION 1..978: note = engineered CasX variant
QEIKRINKIRRRLVKDSNTKKAGKTGPMKTLLVRVMTPDLRERLENLRKKPENIPQPISNTSRANLNKLLTDYTEMKKAILHVYDEEFQKDPVGLMSRVAQPASKKIDQNKLKPEMDEKGNLTTAGFACSQCGQPLFVYKLEQVSEKGKAYTNYFGRCNVAEHEKLIKLAQLKPEKDSDEAVTYSLGKFGQRALDFYSIHVTKESTHPVKPLAQIAGNRYASGPVGKALSDACMGTIASFLSKYQDIIIEHQKVVKGNQKRLESLRELAGKENLEYPSVTLPPQPHTKEGVDAYNEVIARVRTWVNLNLWQKLKLSRDDAKPLLRLKGFPSFPLVERQANEVDWWDMVCNVKKLINEKKEDGKVFWQNLAGYKRQEALRPYLSSEEDRKKGKKFARYQLGDLLLHLEKKHGEDWGKVYDEAWERIDKKVEGLSKHIKLEEERRSEDAQSKAALTDWLRAKASFVIEGLKEADKDEFCRCELKLQKWYGDLRGKPFAIEAENSILDISGFSKQYNCAFIWQKDGVKKLNLYLIINYFKGGKLRFKKIKPEAFEANRFYTVINKKSGEIVPMEVNFNFDDPNLIILPLAFGKRQGREFIWNDLLSLETGSLKLANGRVIEKTLYNRRTRQDEPALFVALTFERREVLDSSNIKPMNLIGVDRGENIPAVIALTDPEGCPLSRFKDSLGNPTHILRIGESYKEKQRTIQAKKEVEQRRAGGYSRKYASKAKNLADDMVRNTARDLLYYAVTQDAMLIFENLSRGFGRQGKRTFMAERQYTRMEDWLTAKLAYEGLPSKTYLSKTLAQYTSKTCSNCGFTITSADYDRVLEKLKKTATGWMTTINGKELKVEGQITYYNRYKRQNVVKDLSVELDRLSEESVNNDISSWTKGRSGEALSLLKKRFSHRPVQEKFVCLNCGFETHADEQAALNIARSWLFLRSQEYKKYQTNKTTGNTDKRAFVETWQSFYRKKLKEVWKPAV

SEQ ID NO: 34390 - protein, 977 aa, synthetic construct
  REGION 1..977: note = engineered CasX variant
QEIKRINKIRRRLVKDSNTKKAGKTGPMKTLLVRVMTPDLRERLENLRKKPENIPQPISNTSRANLNKLLTDYTEMKKAILHVYDEEFQKDPVGLMSRVAQPASKKIDQNKLKPEMDEKGNLTTAGFACSQCGQPLFVYKLEQVSEKGKAYTNYFGRCNVAEHEKLILLAQLKPEKDSDEAVTYSLGKFGQRALDFYSIHVTKESTHPVKPLAQIAGNRYASPVGKALSDACMGTIASFLSKYQDIIIEHQKVVKGNQKRLESLRELAGKENLEYPSVTLPPQPHTKEGVDAYNEVIARVRTWVNLNLWQKLKLSRDDAKPLLRLKGFPSFPLVERQANEVDWWDMVCNVKKLINEKKEDGKVFWQNLAGYKRQEALRPYLSSEEDRKKGKKFARYQLGDLLLHLEKKHGEDWGKVYDEAWERIDKKVEGLSKHIKLEEERRSEDAQSKAALTDWLRAKASFVIEGLKEADKDEFCRCELKLQKWYGDLRGKPFAIEAENSILDISGFSKQYNCAFIWQKDGVKKLNLYLIINYFKGGKLRFKKIKPEAFEANRFYTVINKKSGEIVPMEVNFNFDDPNLIILPLAFGKRQGREFIWNDLLSLETGSLKLANGRVIEKTLYNRRTRQDEPALFVALTFERREVLDSSNIKPMNLIGVDRGENIPAVIALTDPEGCPLSRFKDSLGNPTHILRIGESYKEKQRTIQAKKEVEQRRAGGYSRKYASKAKNLADDMVRNTARDLLYYAVTQDAMLIFENLSRGFGRQGKRTFMAERQYTRMEDWLTAKLAYEGLPSKTYLSKTLAQYTSKTCSNCGFTITSADYDRVLEKLKKTATGWMTTINGKELKVEGQITYYNRYKRQNVVKDLSVELDRLSEESVNNDISSWTKGRSGEALSLLKKRFSHRPVQEKFVCLNCGFETHADEQAALNIARSWLFLRSQEYKKYQTNKTTGNTDKRAFVETWQSFYRKKLKEVWKPAV

SEQ ID NO: 34391 - protein, 978 aa, synthetic construct
  REGION 1..978: note = engineered CasX variant
QEIKRINKIRRRLVKDSNTKKAGKTGPMKTLLVRVMTPDLRERLENLRKKPENIPQPISNTSRANLNKLLTDYTEMKKAILHVYDEEFQKDPVGLMSRVAQPASKKIDQNKLKPEMDEKGNLTTAGFACSQCGQPLFVYKLEQVSEKGKAYTNYFGRCNVAEHEKLILLAQLKPEKDSDEAVTYSLGKFGQRALDFYSIHVTKESTHPVKPLAQIAGNRYASYPVGKALSDACMGTIASFLSKYQDIIIEHQKVVKGNQKRLESLRELAGKENLEYPSVTLPPQPHTKEGVDAYNEVIARVRWWVNLNLWQKLKLSRDDAKPLLRLKGFPSFPLVERQANEVDWWDMVCNVKKLINEKKEDGKVFWQNLAGYKRQEALRPYLSSEEDRKKGKKFARYQLGDLLLHLEKKHGEDWGKVYDEAWERIDKKVEGLSKHIKLEEERRSEDAQSKAALTDWLRAKASFVIEGLKEADKDEFCRCELKLQKWYGDLRGKPFAIEAENSILDISGFSKQYNCAFIWQKDGVKKLNLYLIINYFKGGKLRFKKIKPEAFEANRFYTVINKKSGEIVPMEVNFNFDDPNLIILPLAFGKRQGREFIWNDLLSLETGSLKLANGRVIEKTLYNRRTRQDEPALFVALTFERREVLDSSNIKPMNLIGVDRGENIPAVIALTDPEGCPLSRFKDSLGNPTHILRIGESYKEKQRTIQAKKEVEQRRAGGYSRKYASKAKNLADDMVRNTARDLLYYAVTQDAMLIFENLSRGFGRQGKRTFMAERQYTRMEDWLTAKLAYEGLPSKTYLSKTLAQYTSKTCSNCGFTITSADYDRVLEKLKKTATGWMTTINGKELKVEGQITYYNRYKRQNVVKDLSVELDRLSEESVNNDISSWTKGRSGEALSLLKKRFSHRPVQEKFVCLNCGFETHADEQAALNIARSWLFLRSQEYKKYQTNKTTGNTDKRAFVETWQSFYRKKLKEVWKPAV

SEQ ID NO: 34392 - protein, 978 aa, synthetic construct
  REGION 1..978: note = engineered CasX variant
QEIKRINKIRRRLVKDSNTKKAGKTGPMKTLLVRVMTPDLRERLENLRKKPENIPQPISNTSRANLNKLLTDYTEMKKAILHVYDEEFQKDPVGLMSRVAQPASKKIDQNKLKPEMDEKGNLTTAGFACSQCGQPLFVYKLEQVSEKGKAYTNYFGRCNVAEHEKLILLAQLKPEKDSDEAVTYSLGKFGQRALDFYSIHVTKESTHPVKPLAQIAGNRYASHPVGKALSDACMGTIASFLSKYQDIIIEHQKVVKGNQKRLESLRELAGKENLEYPSVTLPPQPHTKEGVDAYNEVIARVRWWVNLNLWQKLKLSRDDAKPLLRLKGFPSFPLVERQANEVDWWDMVCNVKKLINEKKEDGKVFWQNLAGYKRQEALRPYLSSEEDRKKGKKFARYQLGDLLLHLEKKHGEDWGKVYDEAWERIDKKVEGLSKHIKLEEERRSEDAQSKAALTDWLRAKASFVIEGLKEADKDEFCRCELKLQKWYGDLRGKPFAIEAENSILDISGFSKQYNCAFIWQKDGVKKLNLYLIINYFKGGKLRFKKIKPEAFEANRFYTVINKKSGEIVPMEVNFNFDDPNLIILPLAFGKRQGREFIWNDLLSLETGSLKLANGRVIEKTLYNRRTRQDEPALFVALTFERREVLDSSNIKPMNLIGVDRGENIPAVIALTDPEGCPLSRFKDSLGNPTHILRIGESYKEKQRTIQAKKEVEQRRAGGYSRKYASKAKNLADDMVRNTARDLLYYAVTQDAMLIFENLSRGFGRQGKRTFMAERQYTRMEDWLTAKLAYEGLPSKTYLSKTLAQYTSKTCSNCGFTITSADYDRVLEKLKKTATGWMTTINGKELKVEGQITYYNRYKRQNVVKDLSVELDRLSEESVNNDISSWTKGRSGEALSLLKKRFSHRPVQEKFVCLNCGFETHADEQAALNIARSWLFLRSQEYKKYQTNKTTGNTDKRAFVETWQSFYRKKLKEVWKPAV

SEQ ID NO: 34393 - protein, 978 aa, synthetic construct
  REGION 1..978: note = engineered CasX variant
QEIKRINKIRRRLVKDSNTKKAGKTGPMKTLLVRVMTPDLRERLENLRKKPENIPQPISNTSRANLNKLLTDYTEMKKAILHVYDEEFQKDPVGLMSRVAQPASKKIDQNKLKPEMDEKGNLTTAGFACSQCGQPLFVYKLEQVSEKGKAYTNYFGRCNVAEHEKLILLAQLKPEKDSDEAVTYSLGKFGQRALDFYSIHVTKESTHPVKPLAQIAGNRYASSPVGKALSDACMGTIASFLSKYQDIIIEHQKVVKGNQKRLESLRELAGKENLEYPSVTLPPQPHTKEGVDAYNEVIARVRWWVNLNLWQKLKLSRDDAKPLLRLKGFPSFPLVERQANEVDWWDMVCNVKKLINEKKEDGKVFWQNLAGYKRQEALRPYLSSEEDRKKGKKFARYQLGDLLLHLEKKHGEDWGKVYDEAWERIDKKVEGLSKHIKLEEERRSEDAQSKAALTDWLRAKASFVIEGLKEADKDEFCRCELKLQKWYGDLRGKPFAIEAENSILDISGFSKQYNCAFIWQKDGVKKLNLYLIINYFKGGKLRFKKIKPEAFEANRFYTVINKKSGEIVPMEVNFNFDDPNLIILPLAFGKRQGREFIWNDLLSLETGSLKLANGRVIEKTLYNRRTRQDEPALFVALTFERREVLDSSNIKPMNLIGVDRGENIPAVIALTDPEGCPLSRFKDSLGNPTHILRIGESYKEKQRTIQAKKEVEQRRAGGYSRKYASKAKNLADDMVRNTARDLLYYAVTQDAMLIFENLSRGFGRQGKRTFMAERQYTRMEDWLTAKLAYEGLPSKTYLSKTLAQYTSKTCSNCGFTITSADYDRVLEKLKKTATGWMTTINGKELKVEGQITYYNRYKRQNVVKDLSVELDRLSEESVNNDISSWTKGRSGEALSLLKKRFSHRPVQEKFVCLNCGFETHADEQAALNIARSWLFLRSQEYKKYQTNKTTGNTDKRAFVETWQSFYRKKLKEVWKPAV

SEQ ID NO: 34394 - protein, 978 aa, synthetic construct
  REGION 1..978: note = engineered CasX variant
QEIKRINKIRRRLVKDSNTKKAGKTGPMKTLLVRVMTPDLRERLENLRKKPENIPQPISNTSRANLNKLLTDYTEMKKAILHVYDEEFQKDPVGLMSRVAQPASKKIDQNKLKPEMDEKGNLTTAGFACSQCGQPLFVYKLEQVSEKGKAYTNYFGRCNVAEHEKLILLAQLKPEKDSDEAVTYSLGKFGQRALDFYSIHVTKESTHPVKPLAQIAGNRYASTPVGKALSDACMGTIASFLSKYQDIIIEHQKVVKGNQKRLESLRELAGKENLEYPSVTLPPQPHTKEGVDAYNEVIARVRWWVNLNLWQKLKLSRDDAKPLLRLKGFPSFPLVERQANEVDWWDMVCNVKKLINEKKEDGKVFWQNLAGYKRQEALRPYLSSEEDRKKGKKFARYQLGDLLLHLEKKHGEDWGKVYDEAWERIDKKVEGLSKHIKLEEERRSEDAQSKAALTDWLRAKASFVIEGLKEADKDEFCRCELKLQKWYGDLRGKPFAIEAENSILDISGFSKQYNCAFIWQKDGVKKLNLYLIINYFKGGKLRFKKIKPEAFEANRFYTVINKKSGEIVPMEVNFNFDDPNLIILPLAFGKRQGREFIWNDLLSLETGSLKLANGRVIEKTLYNRRTRQDEPALFVALTFERREVLDSSNIKPMNLIGVDRGENIPAVIALTDPEGCPLSRFKDSLGNPTHILRIGESYKEKQRTIQAKKEVEQRRAGGYSRKYASKAKNLADDMVRNTARDLLYYAVTQDAMLIFENLSRGFGRQGKRTFMAERQYTRMEDWLTAKLAYEGLPSKTYLSKTLAQYTSKTCSNCGFTITSADYDRVLEKLKKTATGWMTTINGKELKVEGQITYYNRYKRQNVVKDLSVELDRLSEESVNNDISSWTKGRSGEALSLLKKRFSHRPVQEKFVCLNCGFETHADEQAALNIARSWLFLRSQEYKKYQTNKTTGNTDKRAFVETWQSFYRKKLKEVWKPAV

SEQ ID NO: 34395 - protein, 978 aa, synthetic construct
  REGION 1..978: note = engineered CasX variant
QEIKRINKIRRRLVKDSNTKKAGKTGPMKTLLVRVMTPDLRERLENLRKKPENIPQPISNTSRANLNKLLTDYTEMKKAILHVYDEEFQKDPVGLMSRVAQPASKKIDQNKLKPEMDEKGNLTTAGFACSQCGQPLFVYKLEQVSEKGKAYTNYFGRCNVAEHEKLILLAQLKPEKDSDEAVTYSLGKFGQRALDFYSIHVTKESTHPVKPLAQIAGNRYASAPVGKALSDACMGTIASFLSKYQDIIIEHQKVVKGNQKRLESLRELAGKENLEYPSVTLPPQPHTKEGVDAYNEVIARVRWWVNLNLWQKLKLSRDDAKPLLRLKGFPSFPLVERQANEVDWWDMVCNVKKLINEKKEDGKVFWQNLAGYKRQEALRPYLSSEEDRKKGKKFARYQLGDLLLHLEKKHGEDWGKVYDEAWERIDKKVEGLSKHIKLEEERRSEDAQSKAALTDWLRAKASFVIEGLKEADKDEFCRCELKLQKWYGDLRGKPFAIEAENSILDISGFSKQYNCAFIWQKDGVKKLNLYLIINYFKGGKLRFKKIKPEAFEANRFYTVINKKSGEIVPMEVNFNFDDPNLIILPLAFGKRQGREFIWNDLLSLETGSLKLANGRVIEKTLYNRRTRQDEPALFVALTFERREVLDSSNIKPMNLIGVDRGENIPAVIALTDPEGCPLSRFKDSLGNPTHILRIGESYKEKQRTIQAKKEVEQRRAGGYSRKYASKAKNLADDMVRNTARDLLYYAVTQDAMLIFENLSRGFGRQGKRTFMAERQYTRMEDWLTAKLAYEGLPSKTYLSKTLAQYTSKTCSNCGFTITSADYDRVLEKLKKTATGWMTTINGKELKVEGQITYYNRYKRQNVVKDLSVELDRLSEESVNNDISSWTKGRSGEALSLLKKRFSHRPVQEKFVCLNCGFETHADEQAALNIARSWLFLRSQEYKKYQTNKTTGNTDKRAFVETWQSFYRKKLKEVWKPAV

SEQ ID NO: 34396 - protein, 978 aa, synthetic construct
  REGION 1..978: note = engineered CasX variant
QEIKRINKIRRRLVKDSNTKKAGKTGPMKTLLVRVMTPDLRERLENLRKKPENIPQPISNTSRANLNKLLTDYTEMKKAILHVYDEEFQKDPVGLMSRVAQPASKKIDQNKLKPEMDEKGNLTTAGFACSQCGQPLFVYKLEQVSEKGKAYTNYFGRCNVAEHEKLILLAQLKPEKDSDEAVTYSLGKFGQRALDFYSIHVTKESTHPVKPLAQIAGNRYASVPVGKALSDACMGTIASFLSKYQDIIIEHQKVVKGNQKRLESLRELAGKENLEYPSVTLPPQPHTKEGVDAYNEVIARVRWWVNLNLWQKLKLSRDDAKPLLRLKGFPSFPLVERQANEVDWWDMVCNVKKLINEKKEDGKVFWQNLAGYKRQEALRPYLSSEEDRKKGKKFARYQLGDLLLHLEKKHGEDWGKVYDEAWERIDKKVEGLSKHIKLEEERRSEDAQSKAALTDWLRAKASFVIEGLKEADKDEFCRCELKLQKWYGDLRGKPFAIEAENSILDISGFSKQYNCAFIWQKDGVKKLNLYLIINYFKGGKLRFKKIKPEAFEANRFYTVINKKSGEIVPMEVNFNFDDPNLIILPLAFGKRQGREFIWNDLLSLETGSLKLANGRVIEKTLYNRRTRQDEPALFVALTFERREVLDSSNIKPMNLIGVDRGENIPAVIALTDPEGCPLSRFKDSLGNPTHILRIGESYKEKQRTIQAKKEVEQRRAGGYSRKYASKAKNLADDMVRNTARDLLYYAVTQDAMLIFENLSRGFGRQGKRTFMAERQYTRMEDWLTAKLAYEGLPSKTYLSKTLAQYTSKTCSNCGFTITSADYDRVLEKLKKTATGWMTTINGKELKVEGQITYYNRYKRQNVVKDLSVELDRLSEESVNNDISSWTKGRSGEALSLLKKRFSHRPVQEKFVCLNCGFETHADEQAALNIARSWLFLRSQEYKKYQTNKTTGNTDKRAFVETWQSFYRKKLKEVWKPAV

SEQ ID NO: 34397 - protein, 978 aa, synthetic construct
  REGION 1..978: note = engineered CasX variant
QEIKRINKIRRRLVKDSNTKKAGKTGPMKTLLVRVMTPDLRERLENLRKKPENIPQPISNTSRANLNKLLTDYTEMKKAILHVYDEEFQKDPVGLMSRVAQPASKKIDQNKLKPEMDEKGNLTTAGFACSQCGQPLFVYKLEQVSEKGKAYTNYFGRCNVAEHEKLIKLAQLKPEKDSDEAVTYSLGKFGQRALDFYSIHVTKESTHPVKPLAQIAGNRYASGPVGKALSDACMGTIASFLSKYQDIIIEHQKVVKGNQKRLESLRELAGKENLEYPSVTLPPQPHTKEGVDAYNEVIARVRWWVNLNLWQKLKLSRDDAKPLLRLKGFPSFPLVERQANEVDWWDMVCNVKKLINEKKEDGKVFWQNLAGYKRQEALRPYLSSEEDRKKGKKFARYQLGDLLLHLEKKHGEDWGKVYDEAWERIDKKVEGLSKHIKLEEERRSEDAQSKAALTDWLRAKASFVIEGLKEADKDEFCRCELKLQKWYGDLRGKPFAIEAENSILDISGFSKQYNCAFIWQKDGVKKLNLYLIINYFKGGKLRFKKIKPEAFEANRFYTVINKKSGEIVPMEVNFNFDDPNLIILPLAFGKRQGREFIWNDLLSLETGSLKLANGRVIEKTLYNRRTRQDEPALFVALTFERREVLDSSNIKPMNLIGVDRGENIPAVIALTDPEGCPLSRFKDSLGNPTHILRIGESYKEKQRTIQAKKEVEQRRAGGYSRKYASKAKNLADDMVRNTARDLLYYAVTQDAMLIFENLSRGFGRQGKRTFMAERQYTRMEDWLTAKLAYEGLPSKTYLSKTLAQYTSKTCSNCGFTITSADYDRVLEKLKKTATGWMTTINGKELKVEGQITYYNRYKRQNVVKDLSVELDRLSEESVNNDISSWTKGRSGEALSLLKKRFSHRPVQEKFVCLNCGFETHADEQAALNIARSWLFLRSQEYKKYQTNKTTGNTDKRAFVETWQSFYRKKLKEVWKPAV

SEQ ID NO: 34398 - protein, 977 aa, synthetic construct
  REGION 1..977: note = engineered CasX variant
QEIKRINKIRRRLVKDSNTKKAGKTGPMKTLLVRVMTPDLRERLENLRKKPENIPQPISNTSRANLNKLLTDYTEMKKAILHVYDEEFQKDPVGLMSRVAQPASKKIDQNKLKPEMDEKGNLTTAGFACSQCGQPLFVYKLEQVSEKGKAYTNYFGRCNVAEHEKLILLAQLKPEKDSDEAVTYSLGKFGQRALDFYSIHVTKESTHPVKPLAQIAGNRYASPVGKALSDACMGTIASFLSKYQDIIIEHQKVVKGNQKRLESLRELAGKENLEYPSVTLPPQPHTKEGVDAYNEVIARVRWWVNLNLWQKLKLSRDDAKPLLRLKGFPSFPLVERQANEVDWWDMVCNVKKLINEKKEDGKVFWQNLAGYKRQEALRPYLSSEEDRKKGKKFARYQLGDLLLHLEKKHGEDWGKVYDEAWERIDKKVEGLSKHIKLEEERRSEDAQSKAALTDWLRAKASFVIEGLKEADKDEFCRCELKLQKWYGDLRGKPFAIEAENSILDISGFSKQYNCAFIWQKDGVKKLNLYLIINYFKGGKLRFKKIKPEAFEANRFYTVINKKSGEIVPMEVNFNFDDPNLIILPLAFGKRQGREFIWNDLLSLETGSLKLANGRVIEKTLYNRRTRQDEPALFVALTFERREVLDSSNIKPMNLIGVDRGENIPAVIALTDPEGCPLSRFKDSLGNPTHILRIGESYKEKQRTIQAKKEVEQRRAGGYSRKYASKAKNLADDMVRNTARDLLYYAVTQDAMLIFENLSRGFGRQGKRTFMAERQYTRMEDWLTAKLAYEGLPSKTYLSKTLAQYTSKTCSNCGFTITSADYDRVLEKLKKTATGWMTTINGKELKVEGQITYYNRYKRQNVVKDLSVELDRLSEESVNNDISSWTKGRSGEALSLLKKRFSHRPVQEKFVCLNCGFETHADEQAALNIARSWLFLRSQEYKKYQTNKTTGNTDKRAFVETWQSFYRKKLKEVWKPAV

SEQ ID NO: 34399 - protein, 979 aa, synthetic construct
  REGION 1..979: note = engineered CasX variant
QEIKRINKIRRRLVKDSNTKKAGKTGPMKTLLVRVMTPDLRERLENLRKKPENIPQPISNTSRANLNKLLTDYTEMKKAILHVYDEEFQKDPVGLMSRVAQPASKKIDQNKLKPEMDEKGNLTTAGFACSQCGQPLFVYKLEQVSEKGKAYTNYFGRCNVAEHEKLILLAQLKPEKDSDEAVTYSLGKFGQRALDFYSIHVTKESTHPVKPLAQIAGNRYASYPVGKALSDACMGTIASFLSKYQDIIIEHQKVVKGNQKRLESLRELAGKENLEYPSVTLPPQPHTKEGVDAYNEVIARVRMWVNLNLWQKLKLSRDDAKPLLRLKGFPSFPLVERQQANEVDWWDMVCNVKKLINEKKEDGKVFWQNLAGYKRQEALRPYLSSEEDRKKGKKFARYQLGDLLLHLEKKHGEDWGKVYDEAWERIDKKVEGLSKHIKLEEERRSEDAQSKAALTDWLRAKASFVIEGLKEADKDEFCRCELKLQKWYGDLRGKPFAIEAENSILDISGFSKQYNCAFIWQKDGVKKLNLYLIINYFKGGKLRFKKIKPEAFEANRFYTVINKKSGEIVPMEVNFNFDDPNLIILPLAFGKRQGREFIWNDLLSLETGSLKLANGRVIEKTLYNRRTRQDEPALFVALTFERREVLDSSNIKPMNLIGVDRGENIPAVIALTDPEGCPLSRFKDSLGNPTHILRIGESYKEKQRTIQAKKEVEQRRAGGYSRKYASKAKNLADDMVRNTARDLLYYAVTQDAMLIFENLSRGFGRQGKRTFMAERQYTRMEDWLTAKLAYEGLPSKTYLSKTLAQYTSKTCSNCGFTITSADYDRVLEKLKKTATGWMTTINGKELKVEGQITYYNRYKRQNVVKDLSVELDRLSEESVNNDISSWTKGRSGEALSLLKKRFSHRPVQEKFVCLNCGFETHADEQAALNIARSWLFLRSQEYKKYQTNKTTGNTDKRAFVETWQSFYRKKLKEVWKPAV

SEQ ID NO: 34400 - protein, 979 aa, synthetic construct
  REGION 1..979: note = engineered CasX variant
QEIKRINKIRRRLVKDSNTKKAGKTGPMKTLLVRVMTPDLRERLENLRKKPENIPQPISNTSRANLNKLLTDYTEMKKAILHVYDEEFQKDPVGLMSRVAQPASKKIDQNKLKPEMDEKGNLTTAGFACSQCGQPLFVYKLEQVSEKGKAYTNYFGRCNVAEHEKLILLAQLKPEKDSDEAVTYSLGKFGQRALDFYSIHVTKESTHPVKPLAQIAGNRYASHPVGKALSDACMGTIASFLSKYQDIIIEHQKVVKGNQKRLESLRELAGKENLEYPSVTLPPQPHTKEGVDAYNEVIARVRMWVNLNLWQKLKLSRDDAKPLLRLKGFPSFPLVERQQANEVDWWDMVCNVKKLINEKKEDGKVFWQNLAGYKRQEALRPYLSSEEDRKKGKKFARYQLGDLLLHLEKKHGEDWGKVYDEAWERIDKKVEGLSKHIKLEEERRSEDAQSKAALTDWLRAKASFVIEGLKEADKDEFCRCELKLQKWYGDLRGKPFAIEAENSILDISGFSKQYNCAFIWQKDGVKKLNLYLIINYFKGGKLRFKKIKPEAFEANRFYTVINKKSGEIVPMEVNFNFDDPNLIILPLAFGKRQGREFIWNDLLSLETGSLKLANGRVIEKTLYNRRTRQDEPALFVALTFERREVLDSSNIKPMNLIGVDRGENIPAVIALTDPEGCPLSRFKDSLGNPTHILRIGESYKEKQRTIQAKKEVEQRRAGGYSRKYASKAKNLADDMVRNTARDLLYYAVTQDAMLIFENLSRGFGRQGKRTFMAERQYTRMEDWLTAKLAYEGLPSKTYLSKTLAQYTSKTCSNCGFTITSADYDRVLEKLKKTATGWMTTINGKELKVEGQITYYNRYKRQNVVKDLSVELDRLSEESVNNDISSWTKGRSGEALSLLKKRFSHRPVQEKFVCLNCGFETHADEQAALNIARSWLFLRSQEYKKYQTNKTTGNTDKRAFVETWQSFYRKKLKEVWKPAV

SEQ ID NO: 34401 - protein, 979 aa, synthetic construct
  REGION 1..979: note = engineered CasX variant
QEIKRINKIRRRLVKDSNTKKAGKTGPMKTLLVRVMTPDLRERLENLRKKPENIPQPISNTSRANLNKLLTDYTEMKKAILHVYDEEFQKDPVGLMSRVAQPASKKIDQNKLKPEMDEKGNLTTAGFACSQCGQPLFVYKLEQVSEKGKAYTNYFGRCNVAEHEKLILLAQLKPEKDSDEAVTYSLGKFGQRALDFYSIHVTKESTHPVKPLAQIAGNRYASSPVGKALSDACMGTIASFLSKYQDIIIEHQKVVKGNQKRLESLRELAGKENLEYPSVTLPPQPHTKEGVDAYNEVIARVRMWVNLNLWQKLKLSRDDAKPLLRLKGFPSFPLVERQQANEVDWWDMVCNVKKLINEKKEDGKVFWQNLAGYKRQEALRPYLSSEEDRKKGKKFARYQLGDLLLHLEKKHGEDWGKVYDEAWERIDKKVEGLSKHIKLEEERRSEDAQSKAALTDWLRAKASFVIEGLKEADKDEFCRCELKLQKWYGDLRGKPFAIEAENSILDISGFSKQYNCAFIWQKDGVKKLNLYLIINYFKGGKLRFKKIKPEAFEANRFYTVINKKSGEIVPMEVNFNFDDPNLIILPLAFGKRQGREFIWNDLLSLETGSLKLANGRVIEKTLYNRRTRQDEPALFVALTFERREVLDSSNIKPMNLIGVDRGENIPAVIALTDPEGCPLSRFKDSLGNPTHILRIGESYKEKQRTIQAKKEVEQRRAGGYSRKYASKAKNLADDMVRNTARDLLYYAVTQDAMLIFENLSRGFGRQGKRTFMAERQYTRMEDWLTAKLAYEGLPSKTYLSKTLAQYTSKTCSNCGFTITSADYDRVLEKLKKTATGWMTTINGKELKVEGQITYYNRYKRQNVVKDLSVELDRLSEESVNNDISSWTKGRSGEALSLLKKRFSHRPVQEKFVCLNCGFETHADEQAALNIARSWLFLRSQEYKKYQTNKTTGNTDKRAFVETWQSFYRKKLKEVWKPAV

SEQ ID NO: 34402 - protein, 979 aa, synthetic construct
  REGION 1..979: note = engineered CasX variant
QEIKRINKIRRRLVKDSNTKKAGKTGPMKTLLVRVMTPDLRERLENLRKKPENIPQPISNTSRANLNKLLTDYTEMKKAILHVYDEEFQKDPVGLMSRVAQPASKKIDQNKLKPEMDEKGNLTTAGFACSQCGQPLFVYKLEQVSEKGKAYTNYFGRCNVAEHEKLILLAQLKPEKDSDEAVTYSLGKFGQRALDFYSIHVTKESTHPVKPLAQIAGNRYASTPVGKALSDACMGTIASFLSKYQDIIIEHQKVVKGNQKRLESLRELAGKENLEYPSVTLPPQPHTKEGVDAYNEVIARVRMWVNLNLWQKLKLSRDDAKPLLRLKGFPSFPLVERQQANEVDWWDMVCNVKKLINEKKEDGKVFWQNLAGYKRQEALRPYLSSEEDRKKGKKFARYQLGDLLLHLEKKHGEDWGKVYDEAWERIDKKVEGLSKHIKLEEERRSEDAQSKAALTDWLRAKASFVIEGLKEADKDEFCRCELKLQKWYGDLRGKPFAIEAENSILDISGFSKQYNCAFIWQKDGVKKLNLYLIINYFKGGKLRFKKIKPEAFEANRFYTVINKKSGEIVPMEVNFNFDDPNLIILPLAFGKRQGREFIWNDLLSLETGSLKLANGRVIEKTLYNRRTRQDEPALFVALTFERREVLDSSNIKPMNLIGVDRGENIPAVIALTDPEGCPLSRFKDSLGNPTHILRIGESYKEKQRTIQAKKEVEQRRAGGYSRKYASKAKNLADDMVRNTARDLLYYAVTQDAMLIFENLSRGFGRQGKRTFMAERQYTRMEDWLTAKLAYEGLPSKTYLSKTLAQYTSKTCSNCGFTITSADYDRVLEKLKKTATGWMTTINGKELKVEGQITYYNRYKRQNVVKDLSVELDRLSEESVNNDISSWTKGRSGEALSLLKKRFSHRPVQEKFVCLNCGFETHADEQAALNIARSWLFLRSQEYKKYQTNKTTGNTDKRAFVETWQSFYRKKLKEVWKPAV

SEQ ID NO: 34403 - protein, 979 aa, synthetic construct
  REGION 1..979: note = engineered CasX variant
QEIKRINKIRRRLVKDSNTKKAGKTGPMKTLLVRVMTPDLRERLENLRKKPENIPQPISNTSRANLNKLLTDYTEMKKAILHVYDEEFQKDPVGLMSRVAQPASKKIDQNKLKPEMDEKGNLTTAGFACSQCGQPLFVYKLEQVSEKGKAYTNYFGRCNVAEHEKLILLAQLKPEKDSDEAVTYSLGKFGQRALDFYSIHVTKESTHPVKPLAQIAGNRYASAPVGKALSDACMGTIASFLSKYQDIIIEHQKVVKGNQKRLESLRELAGKENLEYPSVTLPPQPHTKEGVDAYNEVIARVRMWVNLNLWQKLKLSRDDAKPLLRLKGFPSFPLVERQQANEVDWWDMVCNVKKLINEKKEDGKVFWQNLAGYKRQEALRPYLSSEEDRKKGKKFARYQLGDLLLHLEKKHGEDWGKVYDEAWERIDKKVEGLSKHIKLEEERRSEDAQSKAALTDWLRAKASFVIEGLKEADKDEFCRCELKLQKWYGDLRGKPFAIEAENSILDISGFSKQYNCAFIWQKDGVKKLNLYLIINYFKGGKLRFKKIKPEAFEANRFYTVINKKSGEIVPMEVNFNFDDPNLIILPLAFGKRQGREFIWNDLLSLETGSLKLANGRVIEKTLYNRRTRQDEPALFVALTFERREVLDSSNIKPMNLIGVDRGENIPAVIALTDPEGCPLSRFKDSLGNPTHILRIGESYKEKQRTIQAKKEVEQRRAGGYSRKYASKAKNLADDMVRNTARDLLYYAVTQDAMLIFENLSRGFGRQGKRTFMAERQYTRMEDWLTAKLAYEGLPSKTYLSKTLAQYTSKTCSNCGFTITSADYDRVLEKLKKTATGWMTTINGKELKVEGQITYYNRYKRQNVVKDLSVELDRLSEESVNNDISSWTKGRSGEALSLLKKRFSHRPVQEKFVCLNCGFETHADEQAALNIARSWLFLRSQEYKKYQTNKTTGNTDKRAFVETWQSFYRKKLKEVWKPAV

SEQ ID NO: 34404 - protein, 979 aa, synthetic construct
  REGION 1..979: note = engineered CasX variant
QEIKRINKIRRRLVKDSNTKKAGKTGPMKTLLVRVMTPDLRERLENLRKKPENIPQPISNTSRANLNKLLTDYTEMKKAILHVYDEEFQKDPVGLMSRVAQPASKKIDQNKLKPEMDEKGNLTTAGFACSQCGQPLFVYKLEQVSEKGKAYTNYFGRCNVAEHEKLILLAQLKPEKDSDEAVTYSLGKFGQRALDFYSIHVTKESTHPVKPLAQIAGNRYASVPVGKALSDACMGTIASFLSKYQDIIIEHQKVVKGNQKRLESLRELAGKENLEYPSVTLPPQPHTKEGVDAYNEVIARVRMWVNLNLWQKLKLSRDDAKPLLRLKGFPSFPLVERQQANEVDWWDMVCNVKKLINEKKEDGKVFWQNLAGYKRQEALRPYLSSEEDRKKGKKFARYQLGDLLLHLEKKHGEDWGKVYDEAWERIDKKVEGLSKHIKLEEERRSEDAQSKAALTDWLRAKASFVIEGLKEADKDEFCRCELKLQKWYGDLRGKPFAIEAENSILDISGFSKQYNCAFIWQKDGVKKLNLYLIINYFKGGKLRFKKIKPEAFEANRFYTVINKKSGEIVPMEVNFNFDDPNLIILPLAFGKRQGREFIWNDLLSLETGSLKLANGRVIEKTLYNRRTRQDEPALFVALTFERREVLDSSNIKPMNLIGVDRGENIPAVIALTDPEGCPLSRFKDSLGNPTHILRIGESYKEKQRTIQAKKEVEQRRAGGYSRKYASKAKNLADDMVRNTARDLLYYAVTQDAMLIFENLSRGFGRQGKRTFMAERQYTRMEDWLTAKLAYEGLPSKTYLSKTLAQYTSKTCSNCGFTITSADYDRVLEKLKKTATGWMTTINGKELKVEGQITYYNRYKRQNVVKDLSVELDRLSEESVNNDISSWTKGRSGEALSLLKKRFSHRPVQEKFVCLNCGFETHADEQAALNIARSWLFLRSQEYKKYQTNKTTGNTDKRAFVETWQSFYRKKLKEVWKPAV

SEQ ID NO: 34405 - protein, 979 aa, synthetic construct
  REGION 1..979: note = engineered CasX variant
QEIKRINKIRRRLVKDSNTKKAGKTGPMKTLLVRVMTPDLRERLENLRKKPENIPQPISNTSRANLNKLLTDYTEMKKAILHVYDEEFQKDPVGLMSRVAQPASKKIDQNKLKPEMDEKGNLTTAGFACSQCGQPLFVYKLEQVSEKGKAYTNYFGRCNVAEHEKLIKLAQLKPEKDSDEAVTYSLGKFGQRALDFYSIHVTKESTHPVKPLAQIAGNRYASGPVGKALSDACMGTIASFLSKYQDIIIEHQKVVKGNQKRLESLRELAGKENLEYPSVTLPPQPHTKEGVDAYNEVIARVRMWVNLNLWQKLKLSRDDAKPLLRLKGFPSFPLVERQQANEVDWWDMVCNVKKLINEKKEDGKVFWQNLAGYKRQEALRPYLSSEEDRKKGKKFARYQLGDLLLHLEKKHGEDWGKVYDEAWERIDKKVEGLSKHIKLEEERRSEDAQSKAALTDWLRAKASFVIEGLKEADKDEFCRCELKLQKWYGDLRGKPFAIEAENSILDISGFSKQYNCAFIWQKDGVKKLNLYLIINYFKGGKLRFKKIKPEAFEANRFYTVINKKSGEIVPMEVNFNFDDPNLIILPLAFGKRQGREFIWNDLLSLETGSLKLANGRVIEKTLYNRRTRQDEPALFVALTFERREVLDSSNIKPMNLIGVDRGENIPAVIALTDPEGCPLSRFKDSLGNPTHILRIGESYKEKQRTIQAKKEVEQRRAGGYSRKYASKAKNLADDMVRNTARDLLYYAVTQDAMLIFENLSRGFGRQGKRTFMAERQYTRMEDWLTAKLAYEGLPSKTYLSKTLAQYTSKTCSNCGFTITSADYDRVLEKLKKTATGWMTTINGKELKVEGQITYYNRYKRQNVVKDLSVELDRLSEESVNNDISSWTKGRSGEALSLLKKRFSHRPVQEKFVCLNCGFETHADEQAALNIARSWLFLRSQEYKKYQTNKTTGNTDKRAFVETWQSFYRKKLKEVWKPAV

SEQ ID NO: 34406 - protein, 978 aa, synthetic construct
  REGION 1..978: note = engineered CasX variant
QEIKRINKIRRRLVKDSNTKKAGKTGPMKTLLVRVMTPDLRERLENLRKKPENIPQPISNTSRANLNKLLTDYTEMKKAILHVYDEEFQKDPVGLMSRVAQPASKKIDQNKLKPEMDEKGNLTTAGFACSQCGQPLFVYKLEQVSEKGKAYTNYFGRCNVAEHEKLILLAQLKPEKDSDEAVTYSLGKFGQRALDFYSIHVTKESTHPVKPLAQIAGNRYASPVGKALSDACMGTIASFLSKYQDIIIEHQKVVKGNQKRLESLRELAGKENLEYPSVTLPPQPHTKEGVDAYNEVIARVRMWVNLNLWQKLKLSRDDAKPLLRLKGFPSFPLVERQQANEVDWWDMVCNVKKLINEKKEDGKVFWQNLAGYKRQEALRPYLSSEEDRKKGKKFARYQLGDLLLHLEKKHGEDWGKVYDEAWERIDKKVEGLSKHIKLEEERRSEDAQSKAALTDWLRAKASFVIEGLKEADKDEFCRCELKLQKWYGDLRGKPFAIEAENSILDISGFSKQYNCAFIWQKDGVKKLNLYLIINYFKGGKLRFKKIKPEAFEANRFYTVINKKSGEIVPMEVNFNFDDPNLIILPLAFGKRQGREFIWNDLLSLETGSLKLANGRVIEKTLYNRRTRQDEPALFVALTFERREVLDSSNIKPMNLIGVDRGENIPAVIALTDPEGCPLSRFKDSLGNPTHILRIGESYKEKQRTIQAKKEVEQRRAGGYSRKYASKAKNLADDMVRNTARDLLYYAVTQDAMLIFENLSRGFGRQGKRTFMAERQYTRMEDWLTAKLAYEGLPSKTYLSKTLAQYTSKTCSNCGFTITSADYDRVLEKLKKTATGWMTTINGKELKVEGQITYYNRYKRQNVVKDLSVELDRLSEESVNNDISSWTKGRSGEALSLLKKRFSHRPVQEKFVCLNCGFETHADEQAALNIARSWLFLRSQEYKKYQTNKTTGNTDKRAFVETWQSFYRKKLKEVWKPAV

SEQ ID NO: 34407 - protein, 979 aa, synthetic construct
  REGION 1..979: note = engineered CasX variant
QEIKRINKIRRRLVKDSNTKKAGKTGPMKTLLVRVMTPDLRERLENLRKKPENIPQPISNTSRANLNKLLTDYTEMKKAILHVYDEEFQKDPVGLMSRVAQPASKKIDQNKLKPEMDEKGNLTTAGFACSQCGQPLFVYKLEQVSEKGKAYTNYFGRCNVAEHEKLILLAQLKPEKDSDEAVTYSLGKFGQRALDFYSIHVTKESTHPVKPLAQIAGNRYASYPVGKALSDACMGTIASFLSKYQDIIIEHQKVVKGNQKRLESLRELAGKENLEYPSVTLPPQPHTKEGVDAYNEVIARVRMWVNLNLWQKLKLSRDDAKPLLRLKGFPSFPLVERQANAEVDWWDMVCNVKKLINEKKEDGKVFWQNLAGYKRQEALRPYLSSEEDRKKGKKFARYQLGDLLLHLEKKHGEDWGKVYDEAWERIDKKVEGLSKHIKLEEERRSEDAQSKAALTDWLRAKASFVIEGLKEADKDEFCRCELKLQKWYGDLRGKPFAIEAENSILDISGFSKQYNCAFIWQKDGVKKLNLYLIINYFKGGKLRFKKIKPEAFEANRFYTVINKKSGEIVPMEVNFNFDDPNLIILPLAFGKRQGREFIWNDLLSLETGSLKLANGRVIEKTLYNRRTRQDEPALFVALTFERREVLDSSNIKPMNLIGVDRGENIPAVIALTDPEGCPLSRFKDSLGNPTHILRIGESYKEKQRTIQAKKEVEQRRAGGYSRKYASKAKNLADDMVRNTARDLLYYAVTQDAMLIFENLSRGFGRQGKRTFMAERQYTRMEDWLTAKLAYEGLPSKTYLSKTLAQYTSKTCSNCGFTITSADYDRVLEKLKKTATGWMTTINGKELKVEGQITYYNRYKRQNVVKDLSVELDRLSEESVNNDISSWTKGRSGEALSLLKKRFSHRPVQEKFVCLNCGFETHADEQAALNIARSWLFLRSQEYKKYQTNKTTGNTDKRAFVETWQSFYRKKLKEVWKPAV

SEQ ID NO: 34408 - protein, 979 aa, synthetic construct
  REGION 1..979: note = engineered CasX variant
QEIKRINKIRRRLVKDSNTKKAGKTGPMKTLLVRVMTPDLRERLENLRKKPENIPQPISNTSRANLNKLLTDYTEMKKAILHVYDEEFQKDPVGLMSRVAQPASKKIDQNKLKPEMDEKGNLTTAGFACSQCGQPLFVYKLEQVSEKGKAYTNYFGRCNVAEHEKLILLAQLKPEKDSDEAVTYSLGKFGQRALDFYSIHVTKESTHPVKPLAQIAGNRYASHPVGKALSDACMGTIASFLSKYQDIIIEHQKVVKGNQKRLESLRELAGKENLEYPSVTLPPQPHTKEGVDAYNEVIARVRMWVNLNLWQKLKLSRDDAKPLLRLKGFPSFPLVERQANAEVDWWDMVCNVKKLINEKKEDGKVFWQNLAGYKRQEALRPYLSSEEDRKKGKKFARYQLGDLLLHLEKKHGEDWGKVYDEAWERIDKKVEGLSKHIKLEEERRSEDAQSKAALTDWLRAKASFVIEGLKEADKDEFCRCELKLQKWYGDLRGKPFAIEAENSILDISGFSKQYNCAFIWQKDGVKKLNLYLIINYFKGGKLRFKKIKPEAFEANRFYTVINKKSGEIVPMEVNFNFDDPNLIILPLAFGKRQGREFIWNDLLSLETGSLKLANGRVIEKTLYNRRTRQDEPALFVALTFERREVLDSSNIKPMNLIGVDRGENIPAVIALTDPEGCPLSRFKDSLGNPTHILRIGESYKEKQRTIQAKKEVEQRRAGGYSRKYASKAKNLADDMVRNTARDLLYYAVTQDAMLIFENLSRGFGRQGKRTFMAERQYTRMEDWLTAKLAYEGLPSKTYLSKTLAQYTSKTCSNCGFTITSADYDRVLEKLKKTATGWMTTINGKELKVEGQITYYNRYKRQNVVKDLSVELDRLSEESVNNDISSWTKGRSGEALSLLKKRFSHRPVQEKFVCLNCGFETHADEQAALNIARSWLFLRSQEYKKYQTNKTTGNTDKRAFVETWQSFYRKKLKEVWKPAV

SEQ ID NO: 34409 - protein, 979 aa, synthetic construct
  REGION 1..979: note = engineered CasX variant
QEIKRINKIRRRLVKDSNTKKAGKTGPMKTLLVRVMTPDLRERLENLRKKPENIPQPISNTSRANLNKLLTDYTEMKKAILHVYDEEFQKDPVGLMSRVAQPASKKIDQNKLKPEMDEKGNLTTAGFACSQCGQPLFVYKLEQVSEKGKAYTNYFGRCNVAEHEKLILLAQLKPEKDSDEAVTYSLGKFGQRALDFYSIHVTKESTHPVKPLAQIAGNRYASSPVGKALSDACMGTIASFLSKYQDIIIEHQKVVKGNQKRLESLRELAGKENLEYPSVTLPPQPHTKEGVDAYNEVIARVRMWVNLNLWQKLKLSRDDAKPLLRLKGFPSFPLVERQANAEVDWWDMVCNVKKLINEKKEDGKVFWQNLAGYKRQEALRPYLSSEEDRKKGKKFARYQLGDLLLHLEKKHGEDWGKVYDEAWERIDKKVEGLSKHIKLEEERRSEDAQSKAALTDWLRAKASFVIEGLKEADKDEFCRCELKLQKWYGDLRGKPFAIEAENSILDISGFSKQYNCAFIWQKDGVKKLNLYLIINYFKGGKLRFKKIKPEAFEANRFYTVINKKSGEIVPMEVNFNFDDPNLIILPLAFGKRQGREFIWNDLLSLETGSLKLANGRVIEKTLYNRRTRQDEPALFVALTFERREVLDSSNIKPMNLIGVDRGENIPAVIALTDPEGCPLSRFKDSLGNPTHILRIGESYKEKQRTIQAKKEVEQRRAGGYSRKYASKAKNLADDMVRNTARDLLYYAVTQDAMLIFENLSRGFGRQGKRTFMAERQYTRMEDWLTAKLAYEGLPSKTYLSKTLAQYTSKTCSNCGFTITSADYDRVLEKLKKTATGWMTTINGKELKVEGQITYYNRYKRQNVVKDLSVELDRLSEESVNNDISSWTKGRSGEALSLLKKRFSHRPVQEKFVCLNCGFETHADEQAALNIARSWLFLRSQEYKKYQTNKTTGNTDKRAFVETWQSFYRKKLKEVWKPAV

SEQ ID NO: 34410 - protein, 979 aa, synthetic construct
  REGION 1..979: note = engineered CasX variant
QEIKRINKIRRRLVKDSNTKKAGKTGPMKTLLVRVMTPDLRERLENLRKKPENIPQPISNTSRANLNKLLTDYTEMKKAILHVYDEEFQKDPVGLMSRVAQPASKKIDQNKLKPEMDEKGNLTTAGFACSQCGQPLFVYKLEQVSEKGKAYTNYFGRCNVAEHEKLILLAQLKPEKDSDEAVTYSLGKFGQRALDFYSIHVTKESTHPVKPLAQIAGNRYASTPVGKALSDACMGTIASFLSKYQDIIIEHQKVVKGNQKRLESLRELAGKENLEYPSVTLPPQPHTKEGVDAYNEVIARVRMWVNLNLWQKLKLSRDDAKPLLRLKGFPSFPLVERQANAEVDWWDMVCNVKKLINEKKEDGKVFWQNLAGYKRQEALRPYLSSEEDRKKGKKFARYQLGDLLLHLEKKHGEDWGKVYDEAWERIDKKVEGLSKHIKLEEERRSEDAQSKAALTDWLRAKASFVIEGLKEADKDEFCRCELKLQKWYGDLRGKPFAIEAENSILDISGFSKQYNCAFIWQKDGVKKLNLYLIINYFKGGKLRFKKIKPEAFEANRFYTVINKKSGEIVPMEVNFNFDDPNLIILPLAFGKRQGREFIWNDLLSLETGSLKLANGRVIEKTLYNRRTRQDEPALFVALTFERREVLDSSNIKPMNLIGVDRGENIPAVIALTDPEGCPLSRFKDSLGNPTHILRIGESYKEKQRTIQAKKEVEQRRAGGYSRKYASKAKNLADDMVRNTARDLLYYAVTQDAMLIFENLSRGFGRQGKRTFMAERQYTRMEDWLTAKLAYEGLPSKTYLSKTLAQYTSKTCSNCGFTITSADYDRVLEKLKKTATGWMTTINGKELKVEGQITYYNRYKRQNVVKDLSVELDRLSEESVNNDISSWTKGRSGEALSLLKKRFSHRPVQEKFVCLNCGFETHADEQAALNIARSWLFLRSQEYKKYQTNKTTGNTDKRAFVETWQSFYRKKLKEVWKPAV

SEQ ID NO: 34411 - protein, 979 aa, synthetic construct
  REGION 1..979: note = engineered CasX variant
QEIKRINKIRRRLVKDSNTKKAGKTGPMKTLLVRVMTPDLRERLENLRKKPENIPQPISNTSRANLNKLLTDYTEMKKAILHVYDEEFQKDPVGLMSRVAQPASKKIDQNKLKPEMDEKGNLTTAGFACSQCGQPLFVYKLEQVSEKGKAYTNYFGRCNVAEHEKLILLAQLKPEKDSDEAVTYSLGKFGQRALDFYSIHVTKESTHPVKPLAQIAGNRYASAPVGKALSDACMGTIASFLSKYQDIIIEHQKVVKGNQKRLESLRELAGKENLEYPSVTLPPQPHTKEGVDAYNEVIARVRMWVNLNLWQKLKLSRDDAKPLLRLKGFPSFPLVERQANAEVDWWDMVCNVKKLINEKKEDGKVFWQNLAGYKRQEALRPYLSSEEDRKKGKKFARYQLGDLLLHLEKKHGEDWGKVYDEAWERIDKKVEGLSKHIKLEEERRSEDAQSKAALTDWLRAKASFVIEGLKEADKDEFCRCELKLQKWYGDLRGKPFAIEAENSILDISGFSKQYNCAFIWQKDGVKKLNLYLIINYFKGGKLRFKKIKPEAFEANRFYTVINKKSGEIVPMEVNFNFDDPNLIILPLAFGKRQGREFIWNDLLSLETGSLKLANGRVIEKTLYNRRTRQDEPALFVALTFERREVLDSSNIKPMNLIGVDRGENIPAVIALTDPEGCPLSRFKDSLGNPTHILRIGESYKEKQRTIQAKKEVEQRRAGGYSRKYASKAKNLADDMVRNTARDLLYYAVTQDAMLIFENLSRGFGRQGKRTFMAERQYTRMEDWLTAKLAYEGLPSKTYLSKTLAQYTSKTCSNCGFTITSADYDRVLEKLKKTATGWMTTINGKELKVEGQITYYNRYKRQNVVKDLSVELDRLSEESVNNDISSWTKGRSGEALSLLKKRFSHRPVQEKFVCLNCGFETHADEQAALNIARSWLFLRSQEYKKYQTNKTTGNTDKRAFVETWQSFYRKKLKEVWKPAV

SEQ ID NO: 34412 - protein, 979 aa, synthetic construct
  REGION 1..979: note = engineered CasX variant
QEIKRINKIRRRLVKDSNTKKAGKTGPMKTLLVRVMTPDLRERLENLRKKPENIPQPISNTSRANLNKLLTDYTEMKKAILHVYDEEFQKDPVGLMSRVAQPASKKIDQNKLKPEMDEKGNLTTAGFACSQCGQPLFVYKLEQVSEKGKAYTNYFGRCNVAEHEKLILLAQLKPEKDSDEAVTYSLGKFGQRALDFYSIHVTKESTHPVKPLAQIAGNRYASVPVGKALSDACMGTIASFLSKYQDIIIEHQKVVKGNQKRLESLRELAGKENLEYPSVTLPPQPHTKEGVDAYNEVIARVRMWVNLNLWQKLKLSRDDAKPLLRLKGFPSFPLVERQANAEVDWWDMVCNVKKLINEKKEDGKVFWQNLAGYKRQEALRPYLSSEEDRKKGKKFARYQLGDLLLHLEKKHGEDWGKVYDEAWERIDKKVEGLSKHIKLEEERRSEDAQSKAALTDWLRAKASFVIEGLKEADKDEFCRCELKLQKWYGDLRGKPFAIEAENSILDISGFSKQYNCAFIWQKDGVKKLNLYLIINYFKGGKLRFKKIKPEAFEANRFYTVINKKSGEIVPMEVNFNFDDPNLIILPLAFGKRQGREFIWNDLLSLETGSLKLANGRVIEKTLYNRRTRQDEPALFVALTFERREVLDSSNIKPMNLIGVDRGENIPAVIALTDPEGCPLSRFKDSLGNPTHILRIGESYKEKQRTIQAKKEVEQRRAGGYSRKYASKAKNLADDMVRNTARDLLYYAVTQDAMLIFENLSRGFGRQGKRTFMAERQYTRMEDWLTAKLAYEGLPSKTYLSKTLAQYTSKTCSNCGFTITSADYDRVLEKLKKTATGWMTTINGKELKVEGQITYYNRYKRQNVVKDLSVELDRLSEESVNNDISSWTKGRSGEALSLLKKRFSHRPVQEKFVCLNCGFETHADEQAALNIARSWLFLRSQEYKKYQTNKTTGNTDKRAFVETWQSFYRKKLKEVWKPAV

SEQ ID NO: 34413 - protein, 979 aa, synthetic construct
  REGION 1..979: note = engineered CasX variant
QEIKRINKIRRRLVKDSNTKKAGKTGPMKTLLVRVMTPDLRERLENLRKKPENIPQPISNTSRANLNKLLTDYTEMKKAILHVYDEEFQKDPVGLMSRVAQPASKKIDQNKLKPEMDEKGNLTTAGFACSQCGQPLFVYKLEQVSEKGKAYTNYFGRCNVAEHEKLIKLAQLKPEKDSDEAVTYSLGKFGQRALDFYSIHVTKESTHPVKPLAQIAGNRYASGPVGKALSDACMGTIASFLSKYQDIIIEHQKVVKGNQKRLESLRELAGKENLEYPSVTLPPQPHTKEGVDAYNEVIARVRMWVNLNLWQKLKLSRDDAKPLLRLKGFPSFPLVERQANAEVDWWDMVCNVKKLINEKKEDGKVFWQNLAGYKRQEALRPYLSSEEDRKKGKKFARYQLGDLLLHLEKKHGEDWGKVYDEAWERIDKKVEGLSKHIKLEEERRSEDAQSKAALTDWLRAKASFVIEGLKEADKDEFCRCELKLQKWYGDLRGKPFAIEAENSILDISGFSKQYNCAFIWQKDGVKKLNLYLIINYFKGGKLRFKKIKPEAFEANRFYTVINKKSGEIVPMEVNFNFDDPNLIILPLAFGKRQGREFIWNDLLSLETGSLKLANGRVIEKTLYNRRTRQDEPALFVALTFERREVLDSSNIKPMNLIGVDRGENIPAVIALTDPEGCPLSRFKDSLGNPTHILRIGESYKEKQRTIQAKKEVEQRRAGGYSRKYASKAKNLADDMVRNTARDLLYYAVTQDAMLIFENLSRGFGRQGKRTFMAERQYTRMEDWLTAKLAYEGLPSKTYLSKTLAQYTSKTCSNCGFTITSADYDRVLEKLKKTATGWMTTINGKELKVEGQITYYNRYKRQNVVKDLSVELDRLSEESVNNDISSWTKGRSGEALSLLKKRFSHRPVQEKFVCLNCGFETHADEQAALNIARSWLFLRSQEYKKYQTNKTTGNTDKRAFVETWQSFYRKKLKEVWKPAV

SEQ ID NO: 34414 - protein, 978 aa, synthetic construct
  REGION 1..978: note = engineered CasX variant
QEIKRINKIRRRLVKDSNTKKAGKTGPMKTLLVRVMTPDLRERLENLRKKPENIPQPISNTSRANLNKLLTDYTEMKKAILHVYDEEFQKDPVGLMSRVAQPASKKIDQNKLKPEMDEKGNLTTAGFACSQCGQPLFVYKLEQVSEKGKAYTNYFGRCNVAEHEKLILLAQLKPEKDSDEAVTYSLGKFGQRALDFYSIHVTKESTHPVKPLAQIAGNRYASPVGKALSDACMGTIASFLSKYQDIIIEHQKVVKGNQKRLESLRELAGKENLEYPSVTLPPQPHTKEGVDAYNEVIARVRMWVNLNLWQKLKLSRDDAKPLLRLKGFPSFPLVERQANAEVDWWDMVCNVKKLINEKKEDGKVFWQNLAGYKRQEALRPYLSSEEDRKKGKKFARYQLGDLLLHLEKKHGEDWGKVYDEAWERIDKKVEGLSKHIKLEEERRSEDAQSKAALTDWLRAKASFVIEGLKEADKDEFCRCELKLQKWYGDLRGKPFAIEAENSILDISGFSKQYNCAFIWQKDGVKKLNLYLIINYFKGGKLRFKKIKPEAFEANRFYTVINKKSGEIVPMEVNFNFDDPNLIILPLAFGKRQGREFIWNDLLSLETGSLKLANGRVIEKTLYNRRTRQDEPALFVALTFERREVLDSSNIKPMNLIGVDRGENIPAVIALTDPEGCPLSRFKDSLGNPTHILRIGESYKEKQRTIQAKKEVEQRRAGGYSRKYASKAKNLADDMVRNTARDLLYYAVTQDAMLIFENLSRGFGRQGKRTFMAERQYTRMEDWLTAKLAYEGLPSKTYLSKTLAQYTSKTCSNCGFTITSADYDRVLEKLKKTATGWMTTINGKELKVEGQITYYNRYKRQNVVKDLSVELDRLSEESVNNDISSWTKGRSGEALSLLKKRFSHRPVQEKFVCLNCGFETHADEQAALNIARSWLFLRSQEYKKYQTNKTTGNTDKRAFVETWQSFYRKKLKEVWKPAV

SEQ ID NO: 34415 - protein, 978 aa, synthetic construct
  REGION 1..978: note = engineered CasX variant
QEIKRINKIRRRLVKDSNTKKAGKTGPMKTLLVRVMTPDLRERLENLRKKPENIPQPISNTSRANLNKLLTDYTEMKKAILHVYDEEFQKDPVGLMSRVAQPASKKIDQNKLKPEMDEKGNLTTAGFACSQCGQPLFVYKLEQVSEKGKAYTNYFGRCNVAEHEKLILLAQLKPEKDSDEAVTYSLGKFGQRALDFYSIHVTKESTHPVKPLAQIAGNRYASYPVGKALSDACMGTIASFLSKYQDIIIEHQKVVKGNQKRLESLRELAGKENLEYPSVTLPPQPHTKEGVDAYNEVIARVRMWVNLNLWQKLKLSRDDAKPLLRLKGFPSFPLVERQANEVDWWDMVCNVKKLINEKKEDGKVFWQNLAGYKRQEALRPYLSSEEDRKKGKKFARTQLGDLLLHLEKKHGEDWGKVYDEAWERIDKKVEGLSKHIKLEEERRSEDAQSKAALTDWLRAKASFVIEGLKEADKDEFCRCELKLQKWYGDLRGKPFAIEAENSILDISGFSKQYNCAFIWQKDGVKKLNLYLIINYFKGGKLRFKKIKPEAFEANRFYTVINKKSGEIVPMEVNFNFDDPNLIILPLAFGKRQGREFIWNDLLSLETGSLKLANGRVIEKTLYNRRTRQDEPALFVALTFERREVLDSSNIKPMNLIGVDRGENIPAVIALTDPEGCPLSRFKDSLGNPTHILRIGESYKEKQRTIQAKKEVEQRRAGGYSRKYASKAKNLADDMVRNTARDLLYYAVTQDAMLIFENLSRGFGRQGKRTFMAERQYTRMEDWLTAKLAYEGLPSKTYLSKTLAQYTSKTCSNCGFTITSADYDRVLEKLKKTATGWMTTINGKELKVEGQITYYNRYKRQNVVKDLSVELDRLSEESVNNDISSWTKGRSGEALSLLKKRFSHRPVQEKFVCLNCGFETHADEQAALNIARSWLFLRSQEYKKYQTNKTTGNTDKRAFVETWQSFYRKKLKEVWKPAV

SEQ ID NO: 34416 - protein, 978 aa, synthetic construct
  REGION 1..978: note = engineered CasX variant
QEIKRINKIRRRLVKDSNTKKAGKTGPMKTLLVRVMTPDLRERLENLRKKPENIPQPISNTSRANLNKLLTDYTEMKKAILHVYDEEFQKDPVGLMSRVAQPASKKIDQNKLKPEMDEKGNLTTAGFACSQCGQPLFVYKLEQVSEKGKAYTNYFGRCNVAEHEKLILLAQLKPEKDSDEAVTYSLGKFGQRALDFYSIHVTKESTHPVKPLAQIAGNRYASHPVGKALSDACMGTIASFLSKYQDIIIEHQKVVKGNQKRLESLRELAGKENLEYPSVTLPPQPHTKEGVDAYNEVIARVRMWVNLNLWQKLKLSRDDAKPLLRLKGFPSFPLVERQANEVDWWDMVCNVKKLINEKKEDGKVFWQNLAGYKRQEALRPYLSSEEDRKKGKKFARTQLGDLLLHLEKKHGEDWGKVYDEAWERIDKKVEGLSKHIKLEEERRSEDAQSKAALTDWLRAKASFVIEGLKEADKDEFCRCELKLQKWYGDLRGKPFAIEAENSILDISGFSKQYNCAFIWQKDGVKKLNLYLIINYFKGGKLRFKKIKPEAFEANRFYTVINKKSGEIVPMEVNFNFDDPNLIILPLAFGKRQGREFIWNDLLSLETGSLKLANGRVIEKTLYNRRTRQDEPALFVALTFERREVLDSSNIKPMNLIGVDRGENIPAVIALTDPEGCPLSRFKDSLGNPTHILRIGESYKEKQRTIQAKKEVEQRRAGGYSRKYASKAKNLADDMVRNTARDLLYYAVTQDAMLIFENLSRGFGRQGKRTFMAERQYTRMEDWLTAKLAYEGLPSKTYLSKTLAQYTSKTCSNCGFTITSADYDRVLEKLKKTATGWMTTINGKELKVEGQITYYNRYKRQNVVKDLSVELDRLSEESVNNDISSWTKGRSGEALSLLKKRFSHRPVQEKFVCLNCGFETHADEQAALNIARSWLFLRSQEYKKYQTNKTTGNTDKRAFVETWQSFYRKKLKEVWKPAV

SEQ ID NO: 34417 - protein, 978 aa, synthetic construct
  REGION 1..978: note = engineered CasX variant
QEIKRINKIRRRLVKDSNTKKAGKTGPMKTLLVRVMTPDLRERLENLRKKPENIPQPISNTSRANLNKLLTDYTEMKKAILHVYDEEFQKDPVGLMSRVAQPASKKIDQNKLKPEMDEKGNLTTAGFACSQCGQPLFVYKLEQVSEKGKAYTNYFGRCNVAEHEKLILLAQLKPEKDSDEAVTYSLGKFGQRALDFYSIHVTKESTHPVKPLAQIAGNRYASSPVGKALSDACMGTIASFLSKYQDIIIEHQKVVKGNQKRLESLRELAGKENLEYPSVTLPPQPHTKEGVDAYNEVIARVRMWVNLNLWQKLKLSRDDAKPLLRLKGFPSFPLVERQANEVDWWDMVCNVKKLINEKKEDGKVFWQNLAGYKRQEALRPYLSSEEDRKKGKKFARTQLGDLLLHLEKKHGEDWGKVYDEAWERIDKKVEGLSKHIKLEEERRSEDAQSKAALTDWLRAKASFVIEGLKEADKDEFCRCELKLQKWYGDLRGKPFAIEAENSILDISGFSKQYNCAFIWQKDGVKKLNLYLIINYFKGGKLRFKKIKPEAFEANRFYTVINKKSGEIVPMEVNFNFDDPNLIILPLAFGKRQGREFIWNDLLSLETGSLKLANGRVIEKTLYNRRTRQDEPALFVALTFERREVLDSSNIKPMNLIGVDRGENIPAVIALTDPEGCPLSRFKDSLGNPTHILRIGESYKEKQRTIQAKKEVEQRRAGGYSRKYASKAKNLADDMVRNTARDLLYYAVTQDAMLIFENLSRGFGRQGKRTFMAERQYTRMEDWLTAKLAYEGLPSKTYLSKTLAQYTSKTCSNCGFTITSADYDRVLEKLKKTATGWMTTINGKELKVEGQITYYNRYKRQNVVKDLSVELDRLSEESVNNDISSWTKGRSGEALSLLKKRFSHRPVQEKFVCLNCGFETHADEQAALNIARSWLFLRSQEYKKYQTNKTTGNTDKRAFVETWQSFYRKKLKEVWKPAV

SEQ ID NO: 34418 - protein, 978 aa, synthetic construct
  REGION 1..978: note = engineered CasX variant
QEIKRINKIRRRLVKDSNTKKAGKTGPMKTLLVRVMTPDLRERLENLRKKPENIPQPISNTSRANLNKLLTDYTEMKKAILHVYDEEFQKDPVGLMSRVAQPASKKIDQNKLKPEMDEKGNLTTAGFACSQCGQPLFVYKLEQVSEKGKAYTNYFGRCNVAEHEKLILLAQLKPEKDSDEAVTYSLGKFGQRALDFYSIHVTKESTHPVKPLAQIAGNRYASTPVGKALSDACMGTIASFLSKYQDIIIEHQKVVKGNQKRLESLRELAGKENLEYPSVTLPPQPHTKEGVDAYNEVIARVRMWVNLNLWQKLKLSRDDAKPLLRLKGFPSFPLVERQANEVDWWDMVCNVKKLINEKKEDGKVFWQNLAGYKRQEALRPYLSSEEDRKKGKKFARTQLGDLLLHLEKKHGEDWGKVYDEAWERIDKKVEGLSKHIKLEEERRSEDAQSKAALTDWLRAKASFVIEGLKEADKDEFCRCELKLQKWYGDLRGKPFAIEAENSILDISGFSKQYNCAFIWQKDGVKKLNLYLIINYFKGGKLRFKKIKPEAFEANRFYTVINKKSGEIVPMEVNFNFDDPNLIILPLAFGKRQGREFIWNDLLSLETGSLKLANGRVIEKTLYNRRTRQDEPALFVALTFERREVLDSSNIKPMNLIGVDRGENIPAVIALTDPEGCPLSRFKDSLGNPTHILRIGESYKEKQRTIQAKKEVEQRRAGGYSRKYASKAKNLADDMVRNTARDLLYYAVTQDAMLIFENLSRGFGRQGKRTFMAERQYTRMEDWLTAKLAYEGLPSKTYLSKTLAQYTSKTCSNCGFTITSADYDRVLEKLKKTATGWMTTINGKELKVEGQITYYNRYKRQNVVKDLSVELDRLSEESVNNDISSWTKGRSGEALSLLKKRFSHRPVQEKFVCLNCGFETHADEQAALNIARSWLFLRSQEYKKYQTNKTTGNTDKRAFVETWQSFYRKKLKEVWKPAV

SEQ ID NO: 34419 - protein, 978 aa, synthetic construct
  REGION 1..978: note = engineered CasX variant
QEIKRINKIRRRLVKDSNTKKAGKTGPMKTLLVRVMTPDLRERLENLRKKPENIPQPISNTSRANLNKLLTDYTEMKKAILHVYDEEFQKDPVGLMSRVAQPASKKIDQNKLKPEMDEKGNLTTAGFACSQCGQPLFVYKLEQVSEKGKAYTNYFGRCNVAEHEKLILLAQLKPEKDSDEAVTYSLGKFGQRALDFYSIHVTKESTHPVKPLAQIAGNRYASAPVGKALSDACMGTIASFLSKYQDIIIEHQKVVKGNQKRLESLRELAGKENLEYPSVTLPPQPHTKEGVDAYNEVIARVRMWVNLNLWQKLKLSRDDAKPLLRLKGFPSFPLVERQANEVDWWDMVCNVKKLINEKKEDGKVFWQNLAGYKRQEALRPYLSSEEDRKKGKKFARTQLGDLLLHLEKKHGEDWGKVYDEAWERIDKKVEGLSKHIKLEEERRSEDAQSKAALTDWLRAKASFVIEGLKEADKDEFCRCELKLQKWYGDLRGKPFAIEAENSILDISGFSKQYNCAFIWQKDGVKKLNLYLIINYFKGGKLRFKKIKPEAFEANRFYTVINKKSGEIVPMEVNFNFDDPNLIILPLAFGKRQGREFIWNDLLSLETGSLKLANGRVIEKTLYNRRTRQDEPALFVALTFERREVLDSSNIKPMNLIGVDRGENIPAVIALTDPEGCPLSRFKDSLGNPTHILRIGESYKEKQRTIQAKKEVEQRRAGGYSRKYASKAKNLADDMVRNTARDLLYYAVTQDAMLIFENLSRGFGRQGKRTFMAERQYTRMEDWLTAKLAYEGLPSKTYLSKTLAQYTSKTCSNCGFTITSADYDRVLEKLKKTATGWMTTINGKELKVEGQITYYNRYKRQNVVKDLSVELDRLSEESVNNDISSWTKGRSGEALSLLKKRFSHRPVQEKFVCLNCGFETHADEQAALNIARSWLFLRSQEYKKYQTNKTTGNTDKRAFVETWQSFYRKKLKEVWKPAV

SEQ ID NO: 34420 - protein, 978 aa, synthetic construct
  REGION 1..978: note = engineered CasX variant
QEIKRINKIRRRLVKDSNTKKAGKTGPMKTLLVRVMTPDLRERLENLRKKPENIPQPISNTSRANLNKLLTDYTEMKKAILHVYDEEFQKDPVGLMSRVAQPASKKIDQNKLKPEMDEKGNLTTAGFACSQCGQPLFVYKLEQVSEKGKAYTNYFGRCNVAEHEKLILLAQLKPEKDSDEAVTYSLGKFGQRALDFYSIHVTKESTHPVKPLAQIAGNRYASVPVGKALSDACMGTIASFLSKYQDIIIEHQKVVKGNQKRLESLRELAGKENLEYPSVTLPPQPHTKEGVDAYNEVIARVRMWVNLNLWQKLKLSRDDAKPLLRLKGFPSFPLVERQANEVDWWDMVCNVKKLINEKKEDGKVFWQNLAGYKRQEALRPYLSSEEDRKKGKKFARTQLGDLLLHLEKKHGEDWGKVYDEAWERIDKKVEGLSKHIKLEEERRSEDAQSKAALTDWLRAKASFVIEGLKEADKDEFCRCELKLQKWYGDLRGKPFAIEAENSILDISGFSKQYNCAFIWQKDGVKKLNLYLIINYFKGGKLRFKKIKPEAFEANRFYTVINKKSGEIVPMEVNFNFDDPNLIILPLAFGKRQGREFIWNDLLSLETGSLKLANGRVIEKTLYNRRTRQDEPALFVALTFERREVLDSSNIKPMNLIGVDRGENIPAVIALTDPEGCPLSRFKDSLGNPTHILRIGESYKEKQRTIQAKKEVEQRRAGGYSRKYASKAKNLADDMVRNTARDLLYYAVTQDAMLIFENLSRGFGRQGKRTFMAERQYTRMEDWLTAKLAYEGLPSKTYLSKTLAQYTSKTCSNCGFTITSADYDRVLEKLKKTATGWMTTINGKELKVEGQITYYNRYKRQNVVKDLSVELDRLSEESVNNDISSWTKGRSGEALSLLKKRFSHRPVQEKFVCLNCGFETHADEQAALNIARSWLFLRSQEYKKYQTNKTTGNTDKRAFVETWQSFYRKKLKEVWKPAV

SEQ ID NO: 34421 - protein, 978 aa, synthetic construct
  REGION 1..978: note = engineered CasX variant
QEIKRINKIRRRLVKDSNTKKAGKTGPMKTLLVRVMTPDLRERLENLRKKPENIPQPISNTSRANLNKLLTDYTEMKKAILHVYDEEFQKDPVGLMSRVAQPASKKIDQNKLKPEMDEKGNLTTAGFACSQCGQPLFVYKLEQVSEKGKAYTNYFGRCNVAEHEKLIKLAQLKPEKDSDEAVTYSLGKFGQRALDFYSIHVTKESTHPVKPLAQIAGNRYASGPVGKALSDACMGTIASFLSKYQDIIIEHQKVVKGNQKRLESLRELAGKENLEYPSVTLPPQPHTKEGVDAYNEVIARVRMWVNLNLWQKLKLSRDDAKPLLRLKGFPSFPLVERQANEVDWWDMVCNVKKLINEKKEDGKVFWQNLAGYKRQEALRPYLSSEEDRKKGKKFARTQLGDLLLHLEKKHGEDWGKVYDEAWERIDKKVEGLSKHIKLEEERRSEDAQSKAALTDWLRAKASFVIEGLKEADKDEFCRCELKLQKWYGDLRGKPFAIEAENSILDISGFSKQYNCAFIWQKDGVKKLNLYLIINYFKGGKLRFKKIKPEAFEANRFYTVINKKSGEIVPMEVNFNFDDPNLIILPLAFGKRQGREFIWNDLLSLETGSLKLANGRVIEKTLYNRRTRQDEPALFVALTFERREVLDSSNIKPMNLIGVDRGENIPAVIALTDPEGCPLSRFKDSLGNPTHILRIGESYKEKQRTIQAKKEVEQRRAGGYSRKYASKAKNLADDMVRNTARDLLYYAVTQDAMLIFENLSRGFGRQGKRTFMAERQYTRMEDWLTAKLAYEGLPSKTYLSKTLAQYTSKTCSNCGFTITSADYDRVLEKLKKTATGWMTTINGKELKVEGQITYYNRYKRQNVVKDLSVELDRLSEESVNNDISSWTKGRSGEALSLLKKRFSHRPVQEKFVCLNCGFETHADEQAALNIARSWLFLRSQEYKKYQTNKTTGNTDKRAFVETWQSFYRKKLKEVWKPAV

SEQ ID NO: 34422 - protein, 977 aa, synthetic construct
  REGION 1..977: note = engineered CasX variant
QEIKRINKIRRRLVKDSNTKKAGKTGPMKTLLVRVMTPDLRERLENLRKKPENIPQPISNTSRANLNKLLTDYTEMKKAILHVYDEEFQKDPVGLMSRVAQPASKKIDQNKLKPEMDEKGNLTTAGFACSQCGQPLFVYKLEQVSEKGKAYTNYFGRCNVAEHEKLILLAQLKPEKDSDEAVTYSLGKFGQRALDFYSIHVTKESTHPVKPLAQIAGNRYASPVGKALSDACMGTIASFLSKYQDIIIEHQKVVKGNQKRLESLRELAGKENLEYPSVTLPPQPHTKEGVDAYNEVIARVRMWVNLNLWQKLKLSRDDAKPLLRLKGFPSFPLVERQANEVDWWDMVCNVKKLINEKKEDGKVFWQNLAGYKRQEALRPYLSSEEDRKKGKKFARTQLGDLLLHLEKKHGEDWGKVYDEAWERIDKKVEGLSKHIKLEEERRSEDAQSKAALTDWLRAKASFVIEGLKEADKDEFCRCELKLQKWYGDLRGKPFAIEAENSILDISGFSKQYNCAFIWQKDGVKKLNLYLIINYFKGGKLRFKKIKPEAFEANRFYTVINKKSGEIVPMEVNFNFDDPNLIILPLAFGKRQGREFIWNDLLSLETGSLKLANGRVIEKTLYNRRTRQDEPALFVALTFERREVLDSSNIKPMNLIGVDRGENIPAVIALTDPEGCPLSRFKDSLGNPTHILRIGESYKEKQRTIQAKKEVEQRRAGGYSRKYASKAKNLADDMVRNTARDLLYYAVTQDAMLIFENLSRGFGRQGKRTFMAERQYTRMEDWLTAKLAYEGLPSKTYLSKTLAQYTSKTCSNCGFTITSADYDRVLEKLKKTATGWMTTINGKELKVEGQITYYNRYKRQNVVKDLSVELDRLSEESVNNDISSWTKGRSGEALSLLKKRFSHRPVQEKFVCLNCGFETHADEQAALNIARSWLFLRSQEYKKYQTNKTTGNTDKRAFVETWQSFYRKKLKEVWKPAV

SEQ ID NO: 34423 - protein, 979 aa, synthetic construct
  REGION 1..979: note = engineered CasX variant
QEIKRINKIRRRLVKDSNTKKAGKTGPMKTLLVRVMTPDLRERLENLRKKPENIPQPISNTSRANLNKLLTDYTEMKKAILHVYDEEFQKDPVGLMSRVAQPASKKIDQNKLKPEMDEKGNLTTAGFACSQCGQPLFVYKLEQVSEKGKAYTNYFGRCNVAEHEKLILLAQLKPEKDSDEAVTYSLGKFGQRALDFYSIHVTKESTHPVKPLAQIAGNRYASYPVGKALSDACMGTIASFLSKYQDIIIEHQKVVKGNQKRLESLRELAGKENLEYPSVTLPPQPHTKEGVDAYNEVIARVRMWVNLNLWQKLKLSRDDAKPLLRLKGFPSFPLVERQANEVDWWDMVCNVKKLINEKKEDGKVFWQNLAGYKRQEALRPYLSSEEDRKKGKKFARYQLGDLLLHLEKKHEGEDWGKVYDEAWERIDKKVEGLSKHIKLEEERRSEDAQSKAALTDWLRAKASFVIEGLKEADKDEFCRCELKLQKWYGDLRGKPFAIEAENSILDISGFSKQYNCAFIWQKDGVKKLNLYLIINYFKGGKLRFKKIKPEAFEANRFYTVINKKSGEIVPMEVNFNFDDPNLIILPLAFGKRQGREFIWNDLLSLETGSLKLANGRVIEKTLYNRRTRQDEPALFVALTFERREVLDSSNIKPMNLIGVDRGENIPAVIALTDPEGCPLSRFKDSLGNPTHILRIGESYKEKQRTIQAKKEVEQRRAGGYSRKYASKAKNLADDMVRNTARDLLYYAVTQDAMLIFENLSRGFGRQGKRTFMAERQYTRMEDWLTAKLAYEGLPSKTYLSKTLAQYTSKTCSNCGFTITSADYDRVLEKLKKTATGWMTTINGKELKVEGQITYYNRYKRQNVVKDLSVELDRLSEESVNNDISSWTKGRSGEALSLLKKRFSHRPVQEKFVCLNCGFETHADEQAALNIARSWLFLRSQEYKKYQTNKTTGNTDKRAFVETWQSFYRKKLKEVWKPAV

SEQ ID NO: 34424 - protein, 979 aa, synthetic construct
  REGION 1..979: note = engineered CasX variant
QEIKRINKIRRRLVKDSNTKKAGKTGPMKTLLVRVMTPDLRERLENLRKKPENIPQPISNTSRANLNKLLTDYTEMKKAILHVYDEEFQKDPVGLMSRVAQPASKKIDQNKLKPEMDEKGNLTTAGFACSQCGQPLFVYKLEQVSEKGKAYTNYFGRCNVAEHEKLILLAQLKPEKDSDEAVTYSLGKFGQRALDFYSIHVTKESTHPVKPLAQIAGNRYASHPVGKALSDACMGTIASFLSKYQDIIIEHQKVVKGNQKRLESLRELAGKENLEYPSVTLPPQPHTKEGVDAYNEVIARVRMWVNLNLWQKLKLSRDDAKPLLRLKGFPSFPLVERQANEVDWWDMVCNVKKLINEKKEDGKVFWQNLAGYKRQEALRPYLSSEEDRKKGKKFARYQLGDLLLHLEKKHEGEDWGKVYDEAWERIDKKVEGLSKHIKLEEERRSEDAQSKAALTDWLRAKASFVIEGLKEADKDEFCRCELKLQKWYGDLRGKPFAIEAENSILDISGFSKQYNCAFIWQKDGVKKLNLYLIINYFKGGKLRFKKIKPEAFEANRFYTVINKKSGEIVPMEVNFNFDDPNLIILPLAFGKRQGREFIWNDLLSLETGSLKLANGRVIEKTLYNRRTRQDEPALFVALTFERREVLDSSNIKPMNLIGVDRGENIPAVIALTDPEGCPLSRFKDSLGNPTHILRIGESYKEKQRTIQAKKEVEQRRAGGYSRKYASKAKNLADDMVRNTARDLLYYAVTQDAMLIFENLSRGFGRQGKRTFMAERQYTRMEDWLTAKLAYEGLPSKTYLSKTLAQYTSKTCSNCGFTITSADYDRVLEKLKKTATGWMTTINGKELKVEGQITYYNRYKRQNVVKDLSVELDRLSEESVNNDISSWTKGRSGEALSLLKKRFSHRPVQEKFVCLNCGFETHADEQAALNIARSWLFLRSQEYKKYQTNKTTGNTDKRAFVETWQSFYRKKLKEVWKPAV

SEQ ID NO: 34425 - protein, 979 aa, synthetic construct
  REGION 1..979: note = engineered CasX variant
QEIKRINKIRRRLVKDSNTKKAGKTGPMKTLLVRVMTPDLRERLENLRKKPENIPQPISNTSRANLNKLLTDYTEMKKAILHVYDEEFQKDPVGLMSRVAQPASKKIDQNKLKPEMDEKGNLTTAGFACSQCGQPLFVYKLEQVSEKGKAYTNYFGRCNVAEHEKLILLAQLKPEKDSDEAVTYSLGKFGQRALDFYSIHVTKESTHPVKPLAQIAGNRYASSPVGKALSDACMGTIASFLSKYQDIIIEHQKVVKGNQKRLESLRELAGKENLEYPSVTLPPQPHTKEGVDAYNEVIARVRMWVNLNLWQKLKLSRDDAKPLLRLKGFPSFPLVERQANEVDWWDMVCNVKKLINEKKEDGKVFWQNLAGYKRQEALRPYLSSEEDRKKGKKFARYQLGDLLLHLEKKHEGEDWGKVYDEAWERIDKKVEGLSKHIKLEEERRSEDAQSKAALTDWLRAKASFVIEGLKEADKDEFCRCELKLQKWYGDLRGKPFAIEAENSILDISGFSKQYNCAFIWQKDGVKKLNLYLIINYFKGGKLRFKKIKPEAFEANRFYTVINKKSGEIVPMEVNFNFDDPNLIILPLAFGKRQGREFIWNDLLSLETGSLKLANGRVIEKTLYNRRTRQDEPALFVALTFERREVLDSSNIKPMNLIGVDRGENIPAVIALTDPEGCPLSRFKDSLGNPTHILRIGESYKEKQRTIQAKKEVEQRRAGGYSRKYASKAKNLADDMVRNTARDLLYYAVTQDAMLIFENLSRGFGRQGKRTFMAERQYTRMEDWLTAKLAYEGLPSKTYLSKTLAQYTSKTCSNCGFTITSADYDRVLEKLKKTATGWMTTINGKELKVEGQITYYNRYKRQNVVKDLSVELDRLSEESVNNDISSWTKGRSGEALSLLKKRFSHRPVQEKFVCLNCGFETHADEQAALNIARSWLFLRSQEYKKYQTNKTTGNTDKRAFVETWQSFYRKKLKEVWKPAV

SEQ ID NO: 34426 - protein, 979 aa, synthetic construct
  REGION 1..979: note = engineered CasX variant
QEIKRINKIRRRLVKDSNTKKAGKTGPMKTLLVRVMTPDLRERLENLRKKPENIPQPISNTSRANLNKLLTDYTEMKKAILHVYDEEFQKDPVGLMSRVAQPASKKIDQNKLKPEMDEKGNLTTAGFACSQCGQPLFVYKLEQVSEKGKAYTNYFGRCNVAEHEKLILLAQLKPEKDSDEAVTYSLGKFGQRALDFYSIHVTKESTHPVKPLAQIAGNRYASTPVGKALSDACMGTIASFLSKYQDIIIEHQKVVKGNQKRLESLRELAGKENLEYPSVTLPPQPHTKEGVDAYNEVIARVRMWVNLNLWQKLKLSRDDAKPLLRLKGFPSFPLVERQANEVDWWDMVCNVKKLINEKKEDGKVFWQNLAGYKRQEALRPYLSSEEDRKKGKKFARYQLGDLLLHLEKKHEGEDWGKVYDEAWERIDKKVEGLSKHIKLEEERRSEDAQSKAALTDWLRAKASFVIEGLKEADKDEFCRCELKLQKWYGDLRGKPFAIEAENSILDISGFSKQYNCAFIWQKDGVKKLNLYLIINYFKGGKLRFKKIKPEAFEANRFYTVINKKSGEIVPMEVNFNFDDPNLIILPLAFGKRQGREFIWNDLLSLETGSLKLANGRVIEKTLYNRRTRQDEPALFVALTFERREVLDSSNIKPMNLIGVDRGENIPAVIALTDPEGCPLSRFKDSLGNPTHILRIGESYKEKQRTIQAKKEVEQRRAGGYSRKYASKAKNLADDMVRNTARDLLYYAVTQDAMLIFENLSRGFGRQGKRTFMAERQYTRMEDWLTAKLAYEGLPSKTYLSKTLAQYTSKTCSNCGFTITSADYDRVLEKLKKTATGWMTTINGKELKVEGQITYYNRYKRQNVVKDLSVELDRLSEESVNNDISSWTKGRSGEALSLLKKRFSHRPVQEKFVCLNCGFETHADEQAALNIARSWLFLRSQEYKKYQTNKTTGNTDKRAFVETWQSFYRKKLKEVWKPAV

SEQ ID NO: 34427 - protein, 979 aa, synthetic construct
  REGION 1..979: note = engineered CasX variant
QEIKRINKIRRRLVKDSNTKKAGKTGPMKTLLVRVMTPDLRERLENLRKKPENIPQPISNTSRANLNKLLTDYTEMKKAILHVYDEEFQKDPVGLMSRVAQPASKKIDQNKLKPEMDEKGNLTTAGFACSQCGQPLFVYKLEQVSEKGKAYTNYFGRCNVAEHEKLILLAQLKPEKDSDEAVTYSLGKFGQRALDFYSIHVTKESTHPVKPLAQIAGNRYASAPVGKALSDACMGTIASFLSKYQDIIIEHQKVVKGNQKRLESLRELAGKENLEYPSVTLPPQPHTKEGVDAYNEVIARVRMWVNLNLWQKLKLSRDDAKPLLRLKGFPSFPLVERQANEVDWWDMVCNVKKLINEKKEDGKVFWQNLAGYKRQEALRPYLSSEEDRKKGKKFARYQLGDLLLHLEKKHEGEDWGKVYDEAWERIDKKVEGLSKHIKLEEERRSEDAQSKAALTDWLRAKASFVIEGLKEADKDEFCRCELKLQKWYGDLRGKPFAIEAENSILDISGFSKQYNCAFIWQKDGVKKLNLYLIINYFKGGKLRFKKIKPEAFEANRFYTVINKKSGEIVPMEVNFNFDDPNLIILPLAFGKRQGREFIWNDLLSLETGSLKLANGRVIEKTLYNRRTRQDEPALFVALTFERREVLDSSNIKPMNLIGVDRGENIPAVIALTDPEGCPLSRFKDSLGNPTHILRIGESYKEKQRTIQAKKEVEQRRAGGYSRKYASKAKNLADDMVRNTARDLLYYAVTQDAMLIFENLSRGFGRQGKRTFMAERQYTRMEDWLTAKLAYEGLPSKTYLSKTLAQYTSKTCSNCGFTITSADYDRVLEKLKKTATGWMTTINGKELKVEGQITYYNRYKRQNVVKDLSVELDRLSEESVNNDISSWTKGRSGEALSLLKKRFSHRPVQEKFVCLNCGFETHADEQAALNIARSWLFLRSQEYKKYQTNKTTGNTDKRAFVETWQSFYRKKLKEVWKPAV

SEQ ID NO: 34428 - protein, 979 aa, synthetic construct
  REGION 1..979: note = engineered CasX variant
QEIKRINKIRRRLVKDSNTKKAGKTGPMKTLLVRVMTPDLRERLENLRKKPENIPQPISNTSRANLNKLLTDYTEMKKAILHVYDEEFQKDPVGLMSRVAQPASKKIDQNKLKPEMDEKGNLTTAGFACSQCGQPLFVYKLEQVSEKGKAYTNYFGRCNVAEHEKLILLAQLKPEKDSDEAVTYSLGKFGQRALDFYSIHVTKESTHPVKPLAQIAGNRYASVPVGKALSDACMGTIASFLSKYQDIIIEHQKVVKGNQKRLESLRELAGKENLEYPSVTLPPQPHTKEGVDAYNEVIARVRMWVNLNLWQKLKLSRDDAKPLLRLKGFPSFPLVERQANEVDWWDMVCNVKKLINEKKEDGKVFWQNLAGYKRQEALRPYLSSEEDRKKGKKFARYQLGDLLLHLEKKHEGEDWGKVYDEAWERIDKKVEGLSKHIKLEEERRSEDAQSKAALTDWLRAKASFVIEGLKEADKDEFCRCELKLQKWYGDLRGKPFAIEAENSILDISGFSKQYNCAFIWQKDGVKKLNLYLIINYFKGGKLRFKKIKPEAFEANRFYTVINKKSGEIVPMEVNFNFDDPNLIILPLAFGKRQGREFIWNDLLSLETGSLKLANGRVIEKTLYNRRTRQDEPALFVALTFERREVLDSSNIKPMNLIGVDRGENIPAVIALTDPEGCPLSRFKDSLGNPTHILRIGESYKEKQRTIQAKKEVEQRRAGGYSRKYASKAKNLADDMVRNTARDLLYYAVTQDAMLIFENLSRGFGRQGKRTFMAERQYTRMEDWLTAKLAYEGLPSKTYLSKTLAQYTSKTCSNCGFTITSADYDRVLEKLKKTATGWMTTINGKELKVEGQITYYNRYKRQNVVKDLSVELDRLSEESVNNDISSWTKGRSGEALSLLKKRFSHRPVQEKFVCLNCGFETHADEQAALNIARSWLFLRSQEYKKYQTNKTTGNTDKRAFVETWQSFYRKKLKEVWKPAV

SEQ ID NO: 34429 - protein, 979 aa, synthetic construct
  REGION 1..979: note = engineered CasX variant
QEIKRINKIRRRLVKDSNTKKAGKTGPMKTLLVRVMTPDLRERLENLRKKPENIPQPISNTSRANLNKLLTDYTEMKKAILHVYDEEFQKDPVGLMSRVAQPASKKIDQNKLKPEMDEKGNLTTAGFACSQCGQPLFVYKLEQVSEKGKAYTNYFGRCNVAEHEKLIKLAQLKPEKDSDEAVTYSLGKFGQRALDFYSIHVTKESTHPVKPLAQIAGNRYASGPVGKALSDACMGTIASFLSKYQDIIIEHQKVVKGNQKRLESLRELAGKENLEYPSVTLPPQPHTKEGVDAYNEVIARVRMWVNLNLWQKLKLSRDDAKPLLRLKGFPSFPLVERQANEVDWWDMVCNVKKLINEKKEDGKVFWQNLAGYKRQEALRPYLSSEEDRKKGKKFARYQLGDLLLHLEKKHEGEDWGKVYDEAWERIDKKVEGLSKHIKLEEERRSEDAQSKAALTDWLRAKASFVIEGLKEADKDEFCRCELKLQKWYGDLRGKPFAIEAENSILDISGFSKQYNCAFIWQKDGVKKLNLYLIINYFKGGKLRFKKIKPEAFEANRFYTVINKKSGEIVPMEVNFNFDDPNLIILPLAFGKRQGREFIWNDLLSLETGSLKLANGRVIEKTLYNRRTRQDEPALFVALTFERREVLDSSNIKPMNLIGVDRGENIPAVIALTDPEGCPLSRFKDSLGNPTHILRIGESYKEKQRTIQAKKEVEQRRAGGYSRKYASKAKNLADDMVRNTARDLLYYAVTQDAMLIFENLSRGFGRQGKRTFMAERQYTRMEDWLTAKLAYEGLPSKTYLSKTLAQYTSKTCSNCGFTITSADYDRVLEKLKKTATGWMTTINGKELKVEGQITYYNRYKRQNVVKDLSVELDRLSEESVNNDISSWTKGRSGEALSLLKKRFSHRPVQEKFVCLNCGFETHADEQAALNIARSWLFLRSQEYKKYQTNKTTGNTDKRAFVETWQSFYRKKLKEVWKPAV

SEQ ID NO: 34430 - protein, 978 aa, synthetic construct
  REGION 1..978: note = engineered CasX variant
QEIKRINKIRRRLVKDSNTKKAGKTGPMKTLLVRVMTPDLRERLENLRKKPENIPQPISNTSRANLNKLLTDYTEMKKAILHVYDEEFQKDPVGLMSRVAQPASKKIDQNKLKPEMDEKGNLTTAGFACSQCGQPLFVYKLEQVSEKGKAYTNYFGRCNVAEHEKLILLAQLKPEKDSDEAVTYSLGKFGQRALDFYSIHVTKESTHPVKPLAQIAGNRYASPVGKALSDACMGTIASFLSKYQDIIIEHQKVVKGNQKRLESLRELAGKENLEYPSVTLPPQPHTKEGVDAYNEVIARVRMWVNLNLWQKLKLSRDDAKPLLRLKGFPSFPLVERQANEVDWWDMVCNVKKLINEKKEDGKVFWQNLAGYKRQEALRPYLSSEEDRKKGKKFARYQLGDLLLHLEKKHEGEDWGKVYDEAWERIDKKVEGLSKHIKLEEERRSEDAQSKAALTDWLRAKASFVIEGLKEADKDEFCRCELKLQKWYGDLRGKPFAIEAENSILDISGFSKQYNCAFIWQKDGVKKLNLYLIINYFKGGKLRFKKIKPEAFEANRFYTVINKKSGEIVPMEVNFNFDDPNLIILPLAFGKRQGREFIWNDLLSLETGSLKLANGRVIEKTLYNRRTRQDEPALFVALTFERREVLDSSNIKPMNLIGVDRGENIPAVIALTDPEGCPLSRFKDSLGNPTHILRIGESYKEKQRTIQAKKEVEQRRAGGYSRKYASKAKNLADDMVRNTARDLLYYAVTQDAMLIFENLSRGFGRQGKRTFMAERQYTRMEDWLTAKLAYEGLPSKTYLSKTLAQYTSKTCSNCGFTITSADYDRVLEKLKKTATGWMTTINGKELKVEGQITYYNRYKRQNVVKDLSVELDRLSEESVNNDISSWTKGRSGEALSLLKKRFSHRPVQEKFVCLNCGFETHADEQAALNIARSWLFLRSQEYKKYQTNKTTGNTDKRAFVETWQSFYRKKLKEVWKPAV

SEQ ID NO: 34431 - protein, 978 aa, synthetic construct
  REGION 1..978: note = engineered CasX variant
QEIKRINKIRRRLVKDSNTKKAGKTGPMKTLLVRVMTPDLRERLENLRKKPENIPQPISNTSRANLNKLLTDYTEMKKAILHVYDEEFQKDPVGLMSRVAQPASKKIDQNKLKPEMDEKGNLTTAGFACSQCGQPLFVYKLEQVSEKGKAYTNYFGRCNVAEHEKLILLAQLKPEKDSDEAVTYSLGKFGQRALDFYSIHVTKESTHPVKPLAQIAGNRYASYPVGKALSDACMGTIASFLSKYQDIIIEHQKVVKGNQKRLESLRELAGKENLEYPSVTLPPQPHTKEGVDAYNEVIARVRMWVNLNLWQKLKLSRDDAKPLLRLKGFPSFPLVERQANEVDWWDMVCNVKKLINEKKEDGKVFWQNLAGYKRQEALRPYLSSEEDRKKGKKFARYQLGDLLLHLEKKHGEDWGKVYDEAWERIDKKVEGLSKHIKLEEERRSEDAQSKAALTDWLRAKASFVIEGLKEADKDEFCRCDLKLQKWYGDLRGKPFAIEAENSILDISGFSKQYNCAFIWQKDGVKKLNLYLIINYFKGGKLRFKKIKPEAFEANRFYTVINKKSGEIVPMEVNFNFDDPNLIILPLAFGKRQGREFIWNDLLSLETGSLKLANGRVIEKTLYNRRTRQDEPALFVALTFERREVLDSSNIKPMNLIGVDRGENIPAVIALTDPEGCPLSRFKDSLGNPTHILRIGESYKEKQRTIQAKKEVEQRRAGGYSRKYASKAKNLADDMVRNTARDLLYYAVTQDAMLIFENLSRGFGRQGKRTFMAERQYTRMEDWLTAKLAYEGLPSKTYLSKTLAQYTSKTCSNCGFTITSADYDRVLEKLKKTATGWMTTINGKELKVEGQITYYNRYKRQNVVKDLSVELDRLSEESVNNDISSWTKGRSGEALSLLKKRFSHRPVQEKFVCLNCGFETHADEQAALNIARSWLFLRSQEYKKYQTNKTTGNTDKRAFVETWQSFYRKKLKEVWKPAV

SEQ ID NO: 34432 - protein, 978 aa, synthetic construct
  REGION 1..978: note = engineered CasX variant
QEIKRINKIRRRLVKDSNTKKAGKTGPMKTLLVRVMTPDLRERLENLRKKPENIPQPISNTSRANLNKLLTDYTEMKKAILHVYDEEFQKDPVGLMSRVAQPASKKIDQNKLKPEMDEKGNLTTAGFACSQCGQPLFVYKLEQVSEKGKAYTNYFGRCNVAEHEKLILLAQLKPEKDSDEAVTYSLGKFGQRALDFYSIHVTKESTHPVKPLAQIAGNRYASHPVGKALSDACMGTIASFLSKYQDIIIEHQKVVKGNQKRLESLRELAGKENLEYPSVTLPPQPHTKEGVDAYNEVIARVRMWVNLNLWQKLKLSRDDAKPLLRLKGFPSFPLVERQANEVDWWDMVCNVKKLINEKKEDGKVFWQNLAGYKRQEALRPYLSSEEDRKKGKKFARYQLGDLLLHLEKKHGEDWGKVYDEAWERIDKKVEGLSKHIKLEEERRSEDAQSKAALTDWLRAKASFVIEGLKEADKDEFCRCDLKLQKWYGDLRGKPFAIEAENSILDISGFSKQYNCAFIWQKDGVKKLNLYLIINYFKGGKLRFKKIKPEAFEANRFYTVINKKSGEIVPMEVNFNFDDPNLIILPLAFGKRQGREFIWNDLLSLETGSLKLANGRVIEKTLYNRRTRQDEPALFVALTFERREVLDSSNIKPMNLIGVDRGENIPAVIALTDPEGCPLSRFKDSLGNPTHILRIGESYKEKQRTIQAKKEVEQRRAGGYSRKYASKAKNLADDMVRNTARDLLYYAVTQDAMLIFENLSRGFGRQGKRTFMAERQYTRMEDWLTAKLAYEGLPSKTYLSKTLAQYTSKTCSNCGFTITSADYDRVLEKLKKTATGWMTTINGKELKVEGQITYYNRYKRQNVVKDLSVELDRLSEESVNNDISSWTKGRSGEALSLLKKRFSHRPVQEKFVCLNCGFETHADEQAALNIARSWLFLRSQEYKKYQTNKTTGNTDKRAFVETWQSFYRKKLKEVWKPAV

SEQ ID NO: 34433 - protein, 978 aa, synthetic construct
  REGION 1..978: note = engineered CasX variant
QEIKRINKIRRRLVKDSNTKKAGKTGPMKTLLVRVMTPDLRERLENLRKKPENIPQPISNTSRANLNKLLTDYTEMKKAILHVYDEEFQKDPVGLMSRVAQPASKKIDQNKLKPEMDEKGNLTTAGFACSQCGQPLFVYKLEQVSEKGKAYTNYFGRCNVAEHEKLILLAQLKPEKDSDEAVTYSLGKFGQRALDFYSIHVTKESTHPVKPLAQIAGNRYASSPVGKALSDACMGTIASFLSKYQDIIIEHQKVVKGNQKRLESLRELAGKENLEYPSVTLPPQPHTKEGVDAYNEVIARVRMWVNLNLWQKLKLSRDDAKPLLRLKGFPSFPLVERQANEVDWWDMVCNVKKLINEKKEDGKVFWQNLAGYKRQEALRPYLSSEEDRKKGKKFARYQLGDLLLHLEKKHGEDWGKVYDEAWERIDKKVEGLSKHIKLEEERRSEDAQSKAALTDWLRAKASFVIEGLKEADKDEFCRCDLKLQKWYGDLRGKPFAIEAENSILDISGFSKQYNCAFIWQKDGVKKLNLYLIINYFKGGKLRFKKIKPEAFEANRFYTVINKKSGEIVPMEVNFNFDDPNLIILPLAFGKRQGREFIWNDLLSLETGSLKLANGRVIEKTLYNRRTRQDEPALFVALTFERREVLDSSNIKPMNLIGVDRGENIPAVIALTDPEGCPLSRFKDSLGNPTHILRIGESYKEKQRTIQAKKEVEQRRAGGYSRKYASKAKNLADDMVRNTARDLLYYAVTQDAMLIFENLSRGFGRQGKRTFMAERQYTRMEDWLTAKLAYEGLPSKTYLSKTLAQYTSKTCSNCGFTITSADYDRVLEKLKKTATGWMTTINGKELKVEGQITYYNRYKRQNVVKDLSVELDRLSEESVNNDISSWTKGRSGEALSLLKKRFSHRPVQEKFVCLNCGFETHADEQAALNIARSWLFLRSQEYKKYQTNKTTGNTDKRAFVETWQSFYRKKLKEVWKPAV

SEQ ID NO: 34434 - protein, 978 aa, synthetic construct
  REGION 1..978: note = engineered CasX variant
QEIKRINKIRRRLVKDSNTKKAGKTGPMKTLLVRVMTPDLRERLENLRKKPENIPQPISNTSRANLNKLLTDYTEMKKAILHVYDEEFQKDPVGLMSRVAQPASKKIDQNKLKPEMDEKGNLTTAGFACSQCGQPLFVYKLEQVSEKGKAYTNYFGRCNVAEHEKLILLAQLKPEKDSDEAVTYSLGKFGQRALDFYSIHVTKESTHPVKPLAQIAGNRYASTPVGKALSDACMGTIASFLSKYQDIIIEHQKVVKGNQKRLESLRELAGKENLEYPSVTLPPQPHTKEGVDAYNEVIARVRMWVNLNLWQKLKLSRDDAKPLLRLKGFPSFPLVERQANEVDWWDMVCNVKKLINEKKEDGKVFWQNLAGYKRQEALRPYLSSEEDRKKGKKFARYQLGDLLLHLEKKHGEDWGKVYDEAWERIDKKVEGLSKHIKLEEERRSEDAQSKAALTDWLRAKASFVIEGLKEADKDEFCRCDLKLQKWYGDLRGKPFAIEAENSILDISGFSKQYNCAFIWQKDGVKKLNLYLIINYFKGGKLRFKKIKPEAFEANRFYTVINKKSGEIVPMEVNFNFDDPNLIILPLAFGKRQGREFIWNDLLSLETGSLKLANGRVIEKTLYNRRTRQDEPALFVALTFERREVLDSSNIKPMNLIGVDRGENIPAVIALTDPEGCPLSRFKDSLGNPTHILRIGESYKEKQRTIQAKKEVEQRRAGGYSRKYASKAKNLADDMVRNTARDLLYYAVTQDAMLIFENLSRGFGRQGKRTFMAERQYTRMEDWLTAKLAYEGLPSKTYLSKTLAQYTSKTCSNCGFTITSADYDRVLEKLKKTATGWMTTINGKELKVEGQITYYNRYKRQNVVKDLSVELDRLSEESVNNDISSWTKGRSGEALSLLKKRFSHRPVQEKFVCLNCGFETHADEQAALNIARSWLFLRSQEYKKYQTNKTTGNTDKRAFVETWQSFYRKKLKEVWKPAV

SEQ ID NO: 34435 - protein, 978 aa, synthetic construct
  REGION 1..978: note = engineered CasX variant
QEIKRINKIRRRLVKDSNTKKAGKTGPMKTLLVRVMTPDLRERLENLRKKPENIPQPISNTSRANLNKLLTDYTEMKKAILHVYDEEFQKDPVGLMSRVAQPASKKIDQNKLKPEMDEKGNLTTAGFACSQCGQPLFVYKLEQVSEKGKAYTNYFGRCNVAEHEKLILLAQLKPEKDSDEAVTYSLGKFGQRALDFYSIHVTKESTHPVKPLAQIAGNRYASAPVGKALSDACMGTIASFLSKYQDIIIEHQKVVKGNQKRLESLRELAGKENLEYPSVTLPPQPHTKEGVDAYNEVIARVRMWVNLNLWQKLKLSRDDAKPLLRLKGFPSFPLVERQANEVDWWDMVCNVKKLINEKKEDGKVFWQNLAGYKRQEALRPYLSSEEDRKKGKKFARYQLGDLLLHLEKKHGEDWGKVYDEAWERIDKKVEGLSKHIKLEEERRSEDAQSKAALTDWLRAKASFVIEGLKEADKDEFCRCDLKLQKWYGDLRGKPFAIEAENSILDISGFSKQYNCAFIWQKDGVKKLNLYLIINYFKGGKLRFKKIKPEAFEANRFYTVINKKSGEIVPMEVNFNFDDPNLIILPLAFGKRQGREFIWNDLLSLETGSLKLANGRVIEKTLYNRRTRQDEPALFVALTFERREVLDSSNIKPMNLIGVDRGENIPAVIALTDPEGCPLSRFKDSLGNPTHILRIGESYKEKQRTIQAKKEVEQRRAGGYSRKYASKAKNLADDMVRNTARDLLYYAVTQDAMLIFENLSRGFGRQGKRTFMAERQYTRMEDWLTAKLAYEGLPSKTYLSKTLAQYTSKTCSNCGFTITSADYDRVLEKLKKTATGWMTTINGKELKVEGQITYYNRYKRQNVVKDLSVELDRLSEESVNNDISSWTKGRSGEALSLLKKRFSHRPVQEKFVCLNCGFETHADEQAALNIARSWLFLRSQEYKKYQTNKTTGNTDKRAFVETWQSFYRKKLKEVWKPAV

SEQ ID NO: 34436 - protein, 978 aa, synthetic construct
  REGION 1..978: note = engineered CasX variant
QEIKRINKIRRRLVKDSNTKKAGKTGPMKTLLVRVMTPDLRERLENLRKKPENIPQPISNTSRANLNKLLTDYTEMKKAILHVYDEEFQKDPVGLMSRVAQPASKKIDQNKLKPEMDEKGNLTTAGFACSQCGQPLFVYKLEQVSEKGKAYTNYFGRCNVAEHEKLILLAQLKPEKDSDEAVTYSLGKFGQRALDFYSIHVTKESTHPVKPLAQIAGNRYASVPVGKALSDACMGTIASFLSKYQDIIIEHQKVVKGNQKRLESLRELAGKENLEYPSVTLPPQPHTKEGVDAYNEVIARVRMWVNLNLWQKLKLSRDDAKPLLRLKGFPSFPLVERQANEVDWWDMVCNVKKLINEKKEDGKVFWQNLAGYKRQEALRPYLSSEEDRKKGKKFARYQLGDLLLHLEKKHGEDWGKVYDEAWERIDKKVEGLSKHIKLEEERRSEDAQSKAALTDWLRAKASFVIEGLKEADKDEFCRCDLKLQKWYGDLRGKPFAIEAENSILDISGFSKQYNCAFIWQKDGVKKLNLYLIINYFKGGKLRFKKIKPEAFEANRFYTVINKKSGEIVPMEVNFNFDDPNLIILPLAFGKRQGREFIWNDLLSLETGSLKLANGRVIEKTLYNRRTRQDEPALFVALTFERREVLDSSNIKPMNLIGVDRGENIPAVIALTDPEGCPLSRFKDSLGNPTHILRIGESYKEKQRTIQAKKEVEQRRAGGYSRKYASKAKNLADDMVRNTARDLLYYAVTQDAMLIFENLSRGFGRQGKRTFMAERQYTRMEDWLTAKLAYEGLPSKTYLSKTLAQYTSKTCSNCGFTITSADYDRVLEKLKKTATGWMTTINGKELKVEGQITYYNRYKRQNVVKDLSVELDRLSEESVNNDISSWTKGRSGEALSLLKKRFSHRPVQEKFVCLNCGFETHADEQAALNIARSWLFLRSQEYKKYQTNKTTGNTDKRAFVETWQSFYRKKLKEVWKPAV

SEQ ID NO: 34437 - protein, 978 aa, synthetic construct
  REGION 1..978: note = engineered CasX variant
QEIKRINKIRRRLVKDSNTKKAGKTGPMKTLLVRVMTPDLRERLENLRKKPENIPQPISNTSRANLNKLLTDYTEMKKAILHVYDEEFQKDPVGLMSRVAQPASKKIDQNKLKPEMDEKGNLTTAGFACSQCGQPLFVYKLEQVSEKGKAYTNYFGRCNVAEHEKLIKLAQLKPEKDSDEAVTYSLGKFGQRALDFYSIHVTKESTHPVKPLAQIAGNRYASGPVGKALSDACMGTIASFLSKYQDIIIEHQKVVKGNQKRLESLRELAGKENLEYPSVTLPPQPHTKEGVDAYNEVIARVRMWVNLNLWQKLKLSRDDAKPLLRLKGFPSFPLVERQANEVDWWDMVCNVKKLINEKKEDGKVFWQNLAGYKRQEALRPYLSSEEDRKKGKKFARYQLGDLLLHLEKKHGEDWGKVYDEAWERIDKKVEGLSKHIKLEEERRSEDAQSKAALTDWLRAKASFVIEGLKEADKDEFCRCDLKLQKWYGDLRGKPFAIEAENSILDISGFSKQYNCAFIWQKDGVKKLNLYLIINYFKGGKLRFKKIKPEAFEANRFYTVINKKSGEIVPMEVNFNFDDPNLIILPLAFGKRQGREFIWNDLLSLETGSLKLANGRVIEKTLYNRRTRQDEPALFVALTFERREVLDSSNIKPMNLIGVDRGENIPAVIALTDPEGCPLSRFKDSLGNPTHILRIGESYKEKQRTIQAKKEVEQRRAGGYSRKYASKAKNLADDMVRNTARDLLYYAVTQDAMLIFENLSRGFGRQGKRTFMAERQYTRMEDWLTAKLAYEGLPSKTYLSKTLAQYTSKTCSNCGFTITSADYDRVLEKLKKTATGWMTTINGKELKVEGQITYYNRYKRQNVVKDLSVELDRLSEESVNNDISSWTKGRSGEALSLLKKRFSHRPVQEKFVCLNCGFETHADEQAALNIARSWLFLRSQEYKKYQTNKTTGNTDKRAFVETWQSFYRKKLKEVWKPAV

SEQ ID NO: 34438 - protein, 977 aa, synthetic construct
  REGION 1..977: note = engineered CasX variant
QEIKRINKIRRRLVKDSNTKKAGKTGPMKTLLVRVMTPDLRERLENLRKKPENIPQPISNTSRANLNKLLTDYTEMKKAILHVYDEEFQKDPVGLMSRVAQPASKKIDQNKLKPEMDEKGNLTTAGFACSQCGQPLFVYKLEQVSEKGKAYTNYFGRCNVAEHEKLILLAQLKPEKDSDEAVTYSLGKFGQRALDFYSIHVTKESTHPVKPLAQIAGNRYASPVGKALSDACMGTIASFLSKYQDIIIEHQKVVKGNQKRLESLRELAGKENLEYPSVTLPPQPHTKEGVDAYNEVIARVRMWVNLNLWQKLKLSRDDAKPLLRLKGFPSFPLVERQANEVDWWDMVCNVKKLINEKKEDGKVFWQNLAGYKRQEALRPYLSSEEDRKKGKKFARYQLGDLLLHLEKKHGEDWGKVYDEAWERIDKKVEGLSKHIKLEEERRSEDAQSKAALTDWLRAKASFVIEGLKEADKDEFCRCDLKLQKWYGDLRGKPFAIEAENSILDISGFSKQYNCAFIWQKDGVKKLNLYLIINYFKGGKLRFKKIKPEAFEANRFYTVINKKSGEIVPMEVNFNFDDPNLIILPLAFGKRQGREFIWNDLLSLETGSLKLANGRVIEKTLYNRRTRQDEPALFVALTFERREVLDSSNIKPMNLIGVDRGENIPAVIALTDPEGCPLSRFKDSLGNPTHILRIGESYKEKQRTIQAKKEVEQRRAGGYSRKYASKAKNLADDMVRNTARDLLYYAVTQDAMLIFENLSRGFGRQGKRTFMAERQYTRMEDWLTAKLAYEGLPSKTYLSKTLAQYTSKTCSNCGFTITSADYDRVLEKLKKTATGWMTTINGKELKVEGQITYYNRYKRQNVVKDLSVELDRLSEESVNNDISSWTKGRSGEALSLLKKRFSHRPVQEKFVCLNCGFETHADEQAALNIARSWLFLRSQEYKKYQTNKTTGNTDKRAFVETWQSFYRKKLKEVWKPAV

SEQ ID NO: 34439 - protein, 978 aa, synthetic construct
  REGION 1..978: note = engineered CasX variant
QEIKRINKIRRRLVKDSNTKKAGKTGPMKTLLVRVMTPDLRERLENLRKKPENIPQPISNTSRANLNKLLTDYTEMKKAILHVYDEEFQKDPVGLMSRVAQPASKKIDQNKLKPEMDEKGNLTTAGFACSQCGQPLFVYKLEQVSEKGKAYTNYFGRCNVAEHEKLILLAQLKPEKDSDEAVTYSLGKFGQRALDFYSIHVTKESTHPVKPLAQIAGNRYASYPVGKALSDACMGTIASFLSKYQDIIIEHQKVVKGNQKRLESLRELAGKENLEYPSVTLPPQPHTKEGVDAYNEVIARVRMWVNLNLWQKLKLSRDDAKPLLRLKGFPSFPLVERQANEVDWWDMVCNVKKLINEKKEDGKVFWQNLAGYKRQEALRPYLSSEEDRKKGKKFARYQLGDLLLHLEKKHGEDWGKVYDEAWERIDKKVEGLSKHIKLEEERRSEDAQSKAALTDWLRAKASFVIEGLKEADKDEFCRCELKLQKWYGDLRGKPFAIEAENSILDISGFSKQYNCAFIWQKDGVKKLNLYLIINYFKGGKLRFKKIKPEAFEANRFYTVINKKSGEIVPMEVNFNFDDPNLIILPLAFGKRFGREFIWNDLLSLETGSLKLANGRVIEKTLYNRRTRQDEPALFVALTFERREVLDSSNIKPMNLIGVDRGENIPAVIALTDPEGCPLSRFKDSLGNPTHILRIGESYKEKQRTIQAKKEVEQRRAGGYSRKYASKAKNLADDMVRNTARDLLYYAVTQDAMLIFENLSRGFGRQGKRTFMAERQYTRMEDWLTAKLAYEGLPSKTYLSKTLAQYTSKTCSNCGFTITSADYDRVLEKLKKTATGWMTTINGKELKVEGQITYYNRYKRQNVVKDLSVELDRLSEESVNNDISSWTKGRSGEALSLLKKRFSHRPVQEKFVCLNCGFETHADEQAALNIARSWLFLRSQEYKKYQTNKTTGNTDKRAFVETWQSFYRKKLKEVWKPAV

SEQ ID NO: 34440 - protein, 978 aa, synthetic construct
  REGION 1..978: note = engineered CasX variant
QEIKRINKIRRRLVKDSNTKKAGKTGPMKTLLVRVMTPDLRERLENLRKKPENIPQPISNTSRANLNKLLTDYTEMKKAILHVYDEEFQKDPVGLMSRVAQPASKKIDQNKLKPEMDEKGNLTTAGFACSQCGQPLFVYKLEQVSEKGKAYTNYFGRCNVAEHEKLILLAQLKPEKDSDEAVTYSLGKFGQRALDFYSIHVTKESTHPVKPLAQIAGNRYASHPVGKALSDACMGTIASFLSKYQDIIIEHQKVVKGNQKRLESLRELAGKENLEYPSVTLPPQPHTKEGVDAYNEVIARVRMWVNLNLWQKLKLSRDDAKPLLRLKGFPSFPLVERQANEVDWWDMVCNVKKLINEKKEDGKVFWQNLAGYKRQEALRPYLSSEEDRKKGKKFARYQLGDLLLHLEKKHGEDWGKVYDEAWERIDKKVEGLSKHIKLEEERRSEDAQSKAALTDWLRAKASFVIEGLKEADKDEFCRCELKLQKWYGDLRGKPFAIEAENSILDISGFSKQYNCAFIWQKDGVKKLNLYLIINYFKGGKLRFKKIKPEAFEANRFYTVINKKSGEIVPMEVNFNFDDPNLIILPLAFGKRFGREFIWNDLLSLETGSLKLANGRVIEKTLYNRRTRQDEPALFVALTFERREVLDSSNIKPMNLIGVDRGENIPAVIALTDPEGCPLSRFKDSLGNPTHILRIGESYKEKQRTIQAKKEVEQRRAGGYSRKYASKAKNLADDMVRNTARDLLYYAVTQDAMLIFENLSRGFGRQGKRTFMAERQYTRMEDWLTAKLAYEGLPSKTYLSKTLAQYTSKTCSNCGFTITSADYDRVLEKLKKTATGWMTTINGKELKVEGQITYYNRYKRQNVVKDLSVELDRLSEESVNNDISSWTKGRSGEALSLLKKRFSHRPVQEKFVCLNCGFETHADEQAALNIARSWLFLRSQEYKKYQTNKTTGNTDKRAFVETWQSFYRKKLKEVWKPAV

SEQ ID NO: 34441 - protein, 978 aa, synthetic construct
  REGION 1..978: note = engineered CasX variant
QEIKRINKIRRRLVKDSNTKKAGKTGPMKTLLVRVMTPDLRERLENLRKKPENIPQPISNTSRANLNKLLTDYTEMKKAILHVYDEEFQKDPVGLMSRVAQPASKKIDQNKLKPEMDEKGNLTTAGFACSQCGQPLFVYKLEQVSEKGKAYTNYFGRCNVAEHEKLILLAQLKPEKDSDEAVTYSLGKFGQRALDFYSIHVTKESTHPVKPLAQIAGNRYASSPVGKALSDACMGTIASFLSKYQDIIIEHQKVVKGNQKRLESLRELAGKENLEYPSVTLPPQPHTKEGVDAYNEVIARVRMWVNLNLWQKLKLSRDDAKPLLRLKGFPSFPLVERQANEVDWWDMVCNVKKLINEKKEDGKVFWQNLAGYKRQEALRPYLSSEEDRKKGKKFARYQLGDLLLHLEKKHGEDWGKVYDEAWERIDKKVEGLSKHIKLEEERRSEDAQSKAALTDWLRAKASFVIEGLKEADKDEFCRCELKLQKWYGDLRGKPFAIEAENSILDISGFSKQYNCAFIWQKDGVKKLNLYLIINYFKGGKLRFKKIKPEAFEANRFYTVINKKSGEIVPMEVNFNFDDPNLIILPLAFGKRFGREFIWNDLLSLETGSLKLANGRVIEKTLYNRRTRQDEPALFVALTFERREVLDSSNIKPMNLIGVDRGENIPAVIALTDPEGCPLSRFKDSLGNPTHILRIGESYKEKQRTIQAKKEVEQRRAGGYSRKYASKAKNLADDMVRNTARDLLYYAVTQDAMLIFENLSRGFGRQGKRTFMAERQYTRMEDWLTAKLAYEGLPSKTYLSKTLAQYTSKTCSNCGFTITSADYDRVLEKLKKTATGWMTTINGKELKVEGQITYYNRYKRQNVVKDLSVELDRLSEESVNNDISSWTKGRSGEALSLLKKRFSHRPVQEKFVCLNCGFETHADEQAALNIARSWLFLRSQEYKKYQTNKTTGNTDKRAFVETWQSFYRKKLKEVWKPAV

SEQ ID NO: 34442 - protein, 978 aa, synthetic construct
  REGION 1..978: note = engineered CasX variant
QEIKRINKIRRRLVKDSNTKKAGKTGPMKTLLVRVMTPDLRERLENLRKKPENIPQPISNTSRANLNKLLTDYTEMKKAILHVYDEEFQKDPVGLMSRVAQPASKKIDQNKLKPEMDEKGNLTTAGFACSQCGQPLFVYKLEQVSEKGKAYTNYFGRCNVAEHEKLILLAQLKPEKDSDEAVTYSLGKFGQRALDFYSIHVTKESTHPVKPLAQIAGNRYASTPVGKALSDACMGTIASFLSKYQDIIIEHQKVVKGNQKRLESLRELAGKENLEYPSVTLPPQPHTKEGVDAYNEVIARVRMWVNLNLWQKLKLSRDDAKPLLRLKGFPSFPLVERQANEVDWWDMVCNVKKLINEKKEDGKVFWQNLAGYKRQEALRPYLSSEEDRKKGKKFARYQLGDLLLHLEKKHGEDWGKVYDEAWERIDKKVEGLSKHIKLEEERRSEDAQSKAALTDWLRAKASFVIEGLKEADKDEFCRCELKLQKWYGDLRGKPFAIEAENSILDISGFSKQYNCAFIWQKDGVKKLNLYLIINYFKGGKLRFKKIKPEAFEANRFYTVINKKSGEIVPMEVNFNFDDPNLIILPLAFGKRFGREFIWNDLLSLETGSLKLANGRVIEKTLYNRRTRQDEPALFVALTFERREVLDSSNIKPMNLIGVDRGENIPAVIALTDPEGCPLSRFKDSLGNPTHILRIGESYKEKQRTIQAKKEVEQRRAGGYSRKYASKAKNLADDMVRNTARDLLYYAVTQDAMLIFENLSRGFGRQGKRTFMAERQYTRMEDWLTAKLAYEGLPSKTYLSKTLAQYTSKTCSNCGFTITSADYDRVLEKLKKTATGWMTTINGKELKVEGQITYYNRYKRQNVVKDLSVELDRLSEESVNNDISSWTKGRSGEALSLLKKRFSHRPVQEKFVCLNCGFETHADEQAALNIARSWLFLRSQEYKKYQTNKTTGNTDKRAFVETWQSFYRKKLKEVWKPAV

SEQ ID NO: 34443 - protein, 978 aa, synthetic construct
  REGION 1..978: note = engineered CasX variant
QEIKRINKIRRRLVKDSNTKKAGKTGPMKTLLVRVMTPDLRERLENLRKKPENIPQPISNTSRANLNKLLTDYTEMKKAILHVYDEEFQKDPVGLMSRVAQPASKKIDQNKLKPEMDEKGNLTTAGFACSQCGQPLFVYKLEQVSEKGKAYTNYFGRCNVAEHEKLILLAQLKPEKDSDEAVTYSLGKFGQRALDFYSIHVTKESTHPVKPLAQIAGNRYASAPVGKALSDACMGTIASFLSKYQDIIIEHQKVVKGNQKRLESLRELAGKENLEYPSVTLPPQPHTKEGVDAYNEVIARVRMWVNLNLWQKLKLSRDDAKPLLRLKGFPSFPLVERQANEVDWWDMVCNVKKLINEKKEDGKVFWQNLAGYKRQEALRPYLSSEEDRKKGKKFARYQLGDLLLHLEKKHGEDWGKVYDEAWERIDKKVEGLSKHIKLEEERRSEDAQSKAALTDWLRAKASFVIEGLKEADKDEFCRCELKLQKWYGDLRGKPFAIEAENSILDISGFSKQYNCAFIWQKDGVKKLNLYLIINYFKGGKLRFKKIKPEAFEANRFYTVINKKSGEIVPMEVNFNFDDPNLIILPLAFGKRFGREFIWNDLLSLETGSLKLANGRVIEKTLYNRRTRQDEPALFVALTFERREVLDSSNIKPMNLIGVDRGENIPAVIALTDPEGCPLSRFKDSLGNPTHILRIGESYKEKQRTIQAKKEVEQRRAGGYSRKYASKAKNLADDMVRNTARDLLYYAVTQDAMLIFENLSRGFGRQGKRTFMAERQYTRMEDWLTAKLAYEGLPSKTYLSKTLAQYTSKTCSNCGFTITSADYDRVLEKLKKTATGWMTTINGKELKVEGQITYYNRYKRQNVVKDLSVELDRLSEESVNNDISSWTKGRSGEALSLLKKRFSHRPVQEKFVCLNCGFETHADEQAALNIARSWLFLRSQEYKKYQTNKTTGNTDKRAFVETWQSFYRKKLKEVWKPAV

SEQ ID NO: 34444 - protein, 978 aa, synthetic construct
  REGION 1..978: note = engineered CasX variant
QEIKRINKIRRRLVKDSNTKKAGKTGPMKTLLVRVMTPDLRERLENLRKKPENIPQPISNTSRANLNKLLTDYTEMKKAILHVYDEEFQKDPVGLMSRVAQPASKKIDQNKLKPEMDEKGNLTTAGFACSQCGQPLFVYKLEQVSEKGKAYTNYFGRCNVAEHEKLILLAQLKPEKDSDEAVTYSLGKFGQRALDFYSIHVTKESTHPVKPLAQIAGNRYASVPVGKALSDACMGTIASFLSKYQDIIIEHQKVVKGNQKRLESLRELAGKENLEYPSVTLPPQPHTKEGVDAYNEVIARVRMWVNLNLWQKLKLSRDDAKPLLRLKGFPSFPLVERQANEVDWWDMVCNVKKLINEKKEDGKVFWQNLAGYKRQEALRPYLSSEEDRKKGKKFARYQLGDLLLHLEKKHGEDWGKVYDEAWERIDKKVEGLSKHIKLEEERRSEDAQSKAALTDWLRAKASFVIEGLKEADKDEFCRCELKLQKWYGDLRGKPFAIEAENSILDISGFSKQYNCAFIWQKDGVKKLNLYLIINYFKGGKLRFKKIKPEAFEANRFYTVINKKSGEIVPMEVNFNFDDPNLIILPLAFGKRFGREFIWNDLLSLETGSLKLANGRVIEKTLYNRRTRQDEPALFVALTFERREVLDSSNIKPMNLIGVDRGENIPAVIALTDPEGCPLSRFKDSLGNPTHILRIGESYKEKQRTIQAKKEVEQRRAGGYSRKYASKAKNLADDMVRNTARDLLYYAVTQDAMLIFENLSRGFGRQGKRTFMAERQYTRMEDWLTAKLAYEGLPSKTYLSKTLAQYTSKTCSNCGFTITSADYDRVLEKLKKTATGWMTTINGKELKVEGQITYYNRYKRQNVVKDLSVELDRLSEESVNNDISSWTKGRSGEALSLLKKRFSHRPVQEKFVCLNCGFETHADEQAALNIARSWLFLRSQEYKKYQTNKTTGNTDKRAFVETWQSFYRKKLKEVWKPAV

SEQ ID NO: 34445 - protein, 978 aa, synthetic construct
  REGION 1..978: note = engineered CasX variant
QEIKRINKIRRRLVKDSNTKKAGKTGPMKTLLVRVMTPDLRERLENLRKKPENIPQPISNTSRANLNKLLTDYTEMKKAILHVYDEEFQKDPVGLMSRVAQPASKKIDQNKLKPEMDEKGNLTTAGFACSQCGQPLFVYKLEQVSEKGKAYTNYFGRCNVAEHEKLIKLAQLKPEKDSDEAVTYSLGKFGQRALDFYSIHVTKESTHPVKPLAQIAGNRYASGPVGKALSDACMGTIASFLSKYQDIIIEHQKVVKGNQKRLESLRELAGKENLEYPSVTLPPQPHTKEGVDAYNEVIARVRMWVNLNLWQKLKLSRDDAKPLLRLKGFPSFPLVERQANEVDWWDMVCNVKKLINEKKEDGKVFWQNLAGYKRQEALRPYLSSEEDRKKGKKFARYQLGDLLLHLEKKHGEDWGKVYDEAWERIDKKVEGLSKHIKLEEERRSEDAQSKAALTDWLRAKASFVIEGLKEADKDEFCRCELKLQKWYGDLRGKPFAIEAENSILDISGFSKQYNCAFIWQKDGVKKLNLYLIINYFKGGKLRFKKIKPEAFEANRFYTVINKKSGEIVPMEVNFNFDDPNLIILPLAFGKRFGREFIWNDLLSLETGSLKLANGRVIEKTLYNRRTRQDEPALFVALTFERREVLDSSNIKPMNLIGVDRGENIPAVIALTDPEGCPLSRFKDSLGNPTHILRIGESYKEKQRTIQAKKEVEQRRAGGYSRKYASKAKNLADDMVRNTARDLLYYAVTQDAMLIFENLSRGFGRQGKRTFMAERQYTRMEDWLTAKLAYEGLPSKTYLSKTLAQYTSKTCSNCGFTITSADYDRVLEKLKKTATGWMTTINGKELKVEGQITYYNRYKRQNVVKDLSVELDRLSEESVNNDISSWTKGRSGEALSLLKKRFSHRPVQEKFVCLNCGFETHADEQAALNIARSWLFLRSQEYKKYQTNKTTGNTDKRAFVETWQSFYRKKLKEVWKPAV

SEQ ID NO: 34446 - protein, 977 aa, synthetic construct
  REGION 1..977: note = engineered CasX variant
QEIKRINKIRRRLVKDSNTKKAGKTGPMKTLLVRVMTPDLRERLENLRKKPENIPQPISNTSRANLNKLLTDYTEMKKAILHVYDEEFQKDPVGLMSRVAQPASKKIDQNKLKPEMDEKGNLTTAGFACSQCGQPLFVYKLEQVSEKGKAYTNYFGRCNVAEHEKLILLAQLKPEKDSDEAVTYSLGKFGQRALDFYSIHVTKESTHPVKPLAQIAGNRYASPVGKALSDACMGTIASFLSKYQDIIIEHQKVVKGNQKRLESLRELAGKENLEYPSVTLPPQPHTKEGVDAYNEVIARVRMWVNLNLWQKLKLSRDDAKPLLRLKGFPSFPLVERQANEVDWWDMVCNVKKLINEKKEDGKVFWQNLAGYKRQEALRPYLSSEEDRKKGKKFARYQLGDLLLHLEKKHGEDWGKVYDEAWERIDKKVEGLSKHIKLEEERRSEDAQSKAALTDWLRAKASFVIEGLKEADKDEFCRCELKLQKWYGDLRGKPFAIEAENSILDISGFSKQYNCAFIWQKDGVKKLNLYLIINYFKGGKLRFKKIKPEAFEANRFYTVINKKSGEIVPMEVNFNFDDPNLIILPLAFGKRFGREFIWNDLLSLETGSLKLANGRVIEKTLYNRRTRQDEPALFVALTFERREVLDSSNIKPMNLIGVDRGENIPAVIALTDPEGCPLSRFKDSLGNPTHILRIGESYKEKQRTIQAKKEVEQRRAGGYSRKYASKAKNLADDMVRNTARDLLYYAVTQDAMLIFENLSRGFGRQGKRTFMAERQYTRMEDWLTAKLAYEGLPSKTYLSKTLAQYTSKTCSNCGFTITSADYDRVLEKLKKTATGWMTTINGKELKVEGQITYYNRYKRQNVVKDLSVELDRLSEESVNNDISSWTKGRSGEALSLLKKRFSHRPVQEKFVCLNCGFETHADEQAALNIARSWLFLRSQEYKKYQTNKTTGNTDKRAFVETWQSFYRKKLKEVWKPAV

SEQ ID NO: 34447 - protein, 978 aa, synthetic construct
  REGION 1..978: note = engineered CasX variant
QEIKRINKIRRRLVKDSNTKKAGKTGPMKTLLVRVMTPDLRERLENLRKKPENIPQPISNTSRANLNKLLTDYTEMKKAILHVYDEEFQKDPVGLMSRVAQPASKKIDQNKLKPEMDEKGNLTTAGFACSQCGQPLFVYKLEQVSEKGKAYTNYFGRCNVAEHEKLILLAQLKPEKDSDEAVTYSLGKFGQRALDFYSIHVTKESTHPVKPLAQIAGNRYASYPVGKALSDACMGTIASFLSKYQDIIIEHQKVVKGNQKRLESLRELAGKENLEYPSVTLPPQPHTKEGVDAYNEVIARVRMWVNLNLWQKLKLSRDDAKPLLRLKGFPSFPLVERQANEVDWWDMVCNVKKLINEKKEDGKVFWQNLAGYKRQEALRPYLSSEEDRKKGKKFARYQLGDLLLHLEKKHGEDWGKVYDEAWERIDKKVEGLSKHIKLEEERRSEDAQSKAALTDWLRAKASFVIEGLKEADKDEFCRCELKLQKWYGDLRGKPFAIEAENSILDISGFSKQYNCAFIWQKDGVKKLNLYLIINYFKGGKLRFKKIKPEAFEANRFYTVINKKSGEIVPMEVNFNFDDPNLIILPLAFGKRVGREFIWNDLLSLETGSLKLANGRVIEKTLYNRRTRQDEPALFVALTFERREVLDSSNIKPMNLIGVDRGENIPAVIALTDPEGCPLSRFKDSLGNPTHILRIGESYKEKQRTIQAKKEVEQRRAGGYSRKYASKAKNLADDMVRNTARDLLYYAVTQDAMLIFENLSRGFGRQGKRTFMAERQYTRMEDWLTAKLAYEGLPSKTYLSKTLAQYTSKTCSNCGFTITSADYDRVLEKLKKTATGWMTTINGKELKVEGQITYYNRYKRQNVVKDLSVELDRLSEESVNNDISSWTKGRSGEALSLLKKRFSHRPVQEKFVCLNCGFETHADEQAALNIARSWLFLRSQEYKKYQTNKTTGNTDKRAFVETWQSFYRKKLKEVWKPAV

SEQ ID NO: 34448 - protein, 978 aa, synthetic construct
  REGION 1..978: note = engineered CasX variant
QEIKRINKIRRRLVKDSNTKKAGKTGPMKTLLVRVMTPDLRERLENLRKKPENIPQPISNTSRANLNKLLTDYTEMKKAILHVYDEEFQKDPVGLMSRVAQPASKKIDQNKLKPEMDEKGNLTTAGFACSQCGQPLFVYKLEQVSEKGKAYTNYFGRCNVAEHEKLILLAQLKPEKDSDEAVTYSLGKFGQRALDFYSIHVTKESTHPVKPLAQIAGNRYASHPVGKALSDACMGTIASFLSKYQDIIIEHQKVVKGNQKRLESLRELAGKENLEYPSVTLPPQPHTKEGVDAYNEVIARVRMWVNLNLWQKLKLSRDDAKPLLRLKGFPSFPLVERQANEVDWWDMVCNVKKLINEKKEDGKVFWQNLAGYKRQEALRPYLSSEEDRKKGKKFARYQLGDLLLHLEKKHGEDWGKVYDEAWERIDKKVEGLSKHIKLEEERRSEDAQSKAALTDWLRAKASFVIEGLKEADKDEFCRCELKLQKWYGDLRGKPFAIEAENSILDISGFSKQYNCAFIWQKDGVKKLNLYLIINYFKGGKLRFKKIKPEAFEANRFYTVINKKSGEIVPMEVNFNFDDPNLIILPLAFGKRVGREFIWNDLLSLETGSLKLANGRVIEKTLYNRRTRQDEPALFVALTFERREVLDSSNIKPMNLIGVDRGENIPAVIALTDPEGCPLSRFKDSLGNPTHILRIGESYKEKQRTIQAKKEVEQRRAGGYSRKYASKAKNLADDMVRNTARDLLYYAVTQDAMLIFENLSRGFGRQGKRTFMAERQYTRMEDWLTAKLAYEGLPSKTYLSKTLAQYTSKTCSNCGFTITSADYDRVLEKLKKTATGWMTTINGKELKVEGQITYYNRYKRQNVVKDLSVELDRLSEESVNNDISSWTKGRSGEALSLLKKRFSHRPVQEKFVCLNCGFETHADEQAALNIARSWLFLRSQEYKKYQTNKTTGNTDKRAFVETWQSFYRKKLKEVWKPAV

SEQ ID NO: 34449 - protein, 978 aa, synthetic construct
  REGION 1..978: note = engineered CasX variant
QEIKRINKIRRRLVKDSNTKKAGKTGPMKTLLVRVMTPDLRERLENLRKKPENIPQPISNTSRANLNKLLTDYTEMKKAILHVYDEEFQKDPVGLMSRVAQPASKKIDQNKLKPEMDEKGNLTTAGFACSQCGQPLFVYKLEQVSEKGKAYTNYFGRCNVAEHEKLILLAQLKPEKDSDEAVTYSLGKFGQRALDFYSIHVTKESTHPVKPLAQIAGNRYASSPVGKALSDACMGTIASFLSKYQDIIIEHQKVVKGNQKRLESLRELAGKENLEYPSVTLPPQPHTKEGVDAYNEVIARVRMWVNLNLWQKLKLSRDDAKPLLRLKGFPSFPLVERQANEVDWWDMVCNVKKLINEKKEDGKVFWQNLAGYKRQEALRPYLSSEEDRKKGKKFARYQLGDLLLHLEKKHGEDWGKVYDEAWERIDKKVEGLSKHIKLEEERRSEDAQSKAALTDWLRAKASFVIEGLKEADKDEFCRCELKLQKWYGDLRGKPFAIEAENSILDISGFSKQYNCAFIWQKDGVKKLNLYLIINYFKGGKLRFKKIKPEAFEANRFYTVINKKSGEIVPMEVNFNFDDPNLIILPLAFGKRVGREFIWNDLLSLETGSLKLANGRVIEKTLYNRRTRQDEPALFVALTFERREVLDSSNIKPMNLIGVDRGENIPAVIALTDPEGCPLSRFKDSLGNPTHILRIGESYKEKQRTIQAKKEVEQRRAGGYSRKYASKAKNLADDMVRNTARDLLYYAVTQDAMLIFENLSRGFGRQGKRTFMAERQYTRMEDWLTAKLAYEGLPSKTYLSKTLAQYTSKTCSNCGFTITSADYDRVLEKLKKTATGWMTTINGKELKVEGQITYYNRYKRQNVVKDLSVELDRLSEESVNNDISSWTKGRSGEALSLLKKRFSHRPVQEKFVCLNCGFETHADEQAALNIARSWLFLRSQEYKKYQTNKTTGNTDKRAFVETWQSFYRKKLKEVWKPAV

SEQ ID NO: 34450 - protein, 978 aa, synthetic construct
  REGION 1..978: note = engineered CasX variant
QEIKRINKIRRRLVKDSNTKKAGKTGPMKTLLVRVMTPDLRERLENLRKKPENIPQPISNTSRANLNKLLTDYTEMKKAILHVYDEEFQKDPVGLMSRVAQPASKKIDQNKLKPEMDEKGNLTTAGFACSQCGQPLFVYKLEQVSEKGKAYTNYFGRCNVAEHEKLILLAQLKPEKDSDEAVTYSLGKFGQRALDFYSIHVTKESTHPVKPLAQIAGNRYASTPVGKALSDACMGTIASFLSKYQDIIIEHQKVVKGNQKRLESLRELAGKENLEYPSVTLPPQPHTKEGVDAYNEVIARVRMWVNLNLWQKLKLSRDDAKPLLRLKGFPSFPLVERQANEVDWWDMVCNVKKLINEKKEDGKVFWQNLAGYKRQEALRPYLSSEEDRKKGKKFARYQLGDLLLHLEKKHGEDWGKVYDEAWERIDKKVEGLSKHIKLEEERRSEDAQSKAALTDWLRAKASFVIEGLKEADKDEFCRCELKLQKWYGDLRGKPFAIEAENSILDISGFSKQYNCAFIWQKDGVKKLNLYLIINYFKGGKLRFKKIKPEAFEANRFYTVINKKSGEIVPMEVNFNFDDPNLIILPLAFGKRVGREFIWNDLLSLETGSLKLANGRVIEKTLYNRRTRQDEPALFVALTFERREVLDSSNIKPMNLIGVDRGENIPAVIALTDPEGCPLSRFKDSLGNPTHILRIGESYKEKQRTIQAKKEVEQRRAGGYSRKYASKAKNLADDMVRNTARDLLYYAVTQDAMLIFENLSRGFGRQGKRTFMAERQYTRMEDWLTAKLAYEGLPSKTYLSKTLAQYTSKTCSNCGFTITSADYDRVLEKLKKTATGWMTTINGKELKVEGQITYYNRYKRQNVVKDLSVELDRLSEESVNNDISSWTKGRSGEALSLLKKRFSHRPVQEKFVCLNCGFETHADEQAALNIARSWLFLRSQEYKKYQTNKTTGNTDKRAFVETWQSFYRKKLKEVWKPAV

SEQ ID NO: 34451 - protein, 978 aa, synthetic construct
  REGION 1..978: note = engineered CasX variant
QEIKRINKIRRRLVKDSNTKKAGKTGPMKTLLVRVMTPDLRERLENLRKKPENIPQPISNTSRANLNKLLTDYTEMKKAILHVYDEEFQKDPVGLMSRVAQPASKKIDQNKLKPEMDEKGNLTTAGFACSQCGQPLFVYKLEQVSEKGKAYTNYFGRCNVAEHEKLILLAQLKPEKDSDEAVTYSLGKFGQRALDFYSIHVTKESTHPVKPLAQIAGNRYASAPVGKALSDACMGTIASFLSKYQDIIIEHQKVVKGNQKRLESLRELAGKENLEYPSVTLPPQPHTKEGVDAYNEVIARVRMWVNLNLWQKLKLSRDDAKPLLRLKGFPSFPLVERQANEVDWWDMVCNVKKLINEKKEDGKVFWQNLAGYKRQEALRPYLSSEEDRKKGKKFARYQLGDLLLHLEKKHGEDWGKVYDEAWERIDKKVEGLSKHIKLEEERRSEDAQSKAALTDWLRAKASFVIEGLKEADKDEFCRCELKLQKWYGDLRGKPFAIEAENSILDISGFSKQYNCAFIWQKDGVKKLNLYLIINYFKGGKLRFKKIKPEAFEANRFYTVINKKSGEIVPMEVNFNFDDPNLIILPLAFGKRVGREFIWNDLLSLETGSLKLANGRVIEKTLYNRRTRQDEPALFVALTFERREVLDSSNIKPMNLIGVDRGENIPAVIALTDPEGCPLSRFKDSLGNPTHILRIGESYKEKQRTIQAKKEVEQRRAGGYSRKYASKAKNLADDMVRNTARDLLYYAVTQDAMLIFENLSRGFGRQGKRTFMAERQYTRMEDWLTAKLAYEGLPSKTYLSKTLAQYTSKTCSNCGFTITSADYDRVLEKLKKTATGWMTTINGKELKVEGQITYYNRYKRQNVVKDLSVELDRLSEESVNNDISSWTKGRSGEALSLLKKRFSHRPVQEKFVCLNCGFETHADEQAALNIARSWLFLRSQEYKKYQTNKTTGNTDKRAFVETWQSFYRKKLKEVWKPAV

SEQ ID NO: 34452 - protein, 978 aa, synthetic construct
  REGION 1..978: note = engineered CasX variant
QEIKRINKIRRRLVKDSNTKKAGKTGPMKTLLVRVMTPDLRERLENLRKKPENIPQPISNTSRANLNKLLTDYTEMKKAILHVYDEEFQKDPVGLMSRVAQPASKKIDQNKLKPEMDEKGNLTTAGFACSQCGQPLFVYKLEQVSEKGKAYTNYFGRCNVAEHEKLILLAQLKPEKDSDEAVTYSLGKFGQRALDFYSIHVTKESTHPVKPLAQIAGNRYASVPVGKALSDACMGTIASFLSKYQDIIIEHQKVVKGNQKRLESLRELAGKENLEYPSVTLPPQPHTKEGVDAYNEVIARVRMWVNLNLWQKLKLSRDDAKPLLRLKGFPSFPLVERQANEVDWWDMVCNVKKLINEKKEDGKVFWQNLAGYKRQEALRPYLSSEEDRKKGKKFARYQLGDLLLHLEKKHGEDWGKVYDEAWERIDKKVEGLSKHIKLEEERRSEDAQSKAALTDWLRAKASFVIEGLKEADKDEFCRCELKLQKWYGDLRGKPFAIEAENSILDISGFSKQYNCAFIWQKDGVKKLNLYLIINYFKGGKLRFKKIKPEAFEANRFYTVINKKSGEIVPMEVNFNFDDPNLIILPLAFGKRVGREFIWNDLLSLETGSLKLANGRVIEKTLYNRRTRQDEPALFVALTFERREVLDSSNIKPMNLIGVDRGENIPAVIALTDPEGCPLSRFKDSLGNPTHILRIGESYKEKQRTIQAKKEVEQRRAGGYSRKYASKAKNLADDMVRNTARDLLYYAVTQDAMLIFENLSRGFGRQGKRTFMAERQYTRMEDWLTAKLAYEGLPSKTYLSKTLAQYTSKTCSNCGFTITSADYDRVLEKLKKTATGWMTTINGKELKVEGQITYYNRYKRQNVVKDLSVELDRLSEESVNNDISSWTKGRSGEALSLLKKRFSHRPVQEKFVCLNCGFETHADEQAALNIARSWLFLRSQEYKKYQTNKTTGNTDKRAFVETWQSFYRKKLKEVWKPAV

SEQ ID NO: 34453 - protein, 978 aa, synthetic construct
  REGION 1..978: note = engineered CasX variant
QEIKRINKIRRRLVKDSNTKKAGKTGPMKTLLVRVMTPDLRERLENLRKKPENIPQPISNTSRANLNKLLTDYTEMKKAILHVYDEEFQKDPVGLMSRVAQPASKKIDQNKLKPEMDEKGNLTTAGFACSQCGQPLFVYKLEQVSEKGKAYTNYFGRCNVAEHEKLIKLAQLKPEKDSDEAVTYSLGKFGQRALDFYSIHVTKESTHPVKPLAQIAGNRYASGPVGKALSDACMGTIASFLSKYQDIIIEHQKVVKGNQKRLESLRELAGKENLEYPSVTLPPQPHTKEGVDAYNEVIARVRMWVNLNLWQKLKLSRDDAKPLLRLKGFPSFPLVERQANEVDWWDMVCNVKKLINEKKEDGKVFWQNLAGYKRQEALRPYLSSEEDRKKGKKFARYQLGDLLLHLEKKHGEDWGKVYDEAWERIDKKVEGLSKHIKLEEERRSEDAQSKAALTDWLRAKASFVIEGLKEADKDEFCRCELKLQKWYGDLRGKPFAIEAENSILDISGFSKQYNCAFIWQKDGVKKLNLYLIINYFKGGKLRFKKIKPEAFEANRFYTVINKKSGEIVPMEVNFNFDDPNLIILPLAFGKRVGREFIWNDLLSLETGSLKLANGRVIEKTLYNRRTRQDEPALFVALTFERREVLDSSNIKPMNLIGVDRGENIPAVIALTDPEGCPLSRFKDSLGNPTHILRIGESYKEKQRTIQAKKEVEQRRAGGYSRKYASKAKNLADDMVRNTARDLLYYAVTQDAMLIFENLSRGFGRQGKRTFMAERQYTRMEDWLTAKLAYEGLPSKTYLSKTLAQYTSKTCSNCGFTITSADYDRVLEKLKKTATGWMTTINGKELKVEGQITYYNRYKRQNVVKDLSVELDRLSEESVNNDISSWTKGRSGEALSLLKKRFSHRPVQEKFVCLNCGFETHADEQAALNIARSWLFLRSQEYKKYQTNKTTGNTDKRAFVETWQSFYRKKLKEVWKPAV

SEQ ID NO: 34454 - protein, 977 aa, synthetic construct
  REGION 1..977: note = engineered CasX variant
QEIKRINKIRRRLVKDSNTKKAGKTGPMKTLLVRVMTPDLRERLENLRKKPENIPQPISNTSRANLNKLLTDYTEMKKAILHVYDEEFQKDPVGLMSRVAQPASKKIDQNKLKPEMDEKGNLTTAGFACSQCGQPLFVYKLEQVSEKGKAYTNYFGRCNVAEHEKLILLAQLKPEKDSDEAVTYSLGKFGQRALDFYSIHVTKESTHPVKPLAQIAGNRYASPVGKALSDACMGTIASFLSKYQDIIIEHQKVVKGNQKRLESLRELAGKENLEYPSVTLPPQPHTKEGVDAYNEVIARVRMWVNLNLWQKLKLSRDDAKPLLRLKGFPSFPLVERQANEVDWWDMVCNVKKLINEKKEDGKVFWQNLAGYKRQEALRPYLSSEEDRKKGKKFARYQLGDLLLHLEKKHGEDWGKVYDEAWERIDKKVEGLSKHIKLEEERRSEDAQSKAALTDWLRAKASFVIEGLKEADKDEFCRCELKLQKWYGDLRGKPFAIEAENSILDISGFSKQYNCAFIWQKDGVKKLNLYLIINYFKGGKLRFKKIKPEAFEANRFYTVINKKSGEIVPMEVNFNFDDPNLIILPLAFGKRVGREFIWNDLLSLETGSLKLANGRVIEKTLYNRRTRQDEPALFVALTFERREVLDSSNIKPMNLIGVDRGENIPAVIALTDPEGCPLSRFKDSLGNPTHILRIGESYKEKQRTIQAKKEVEQRRAGGYSRKYASKAKNLADDMVRNTARDLLYYAVTQDAMLIFENLSRGFGRQGKRTFMAERQYTRMEDWLTAKLAYEGLPSKTYLSKTLAQYTSKTCSNCGFTITSADYDRVLEKLKKTATGWMTTINGKELKVEGQITYYNRYKRQNVVKDLSVELDRLSEESVNNDISSWTKGRSGEALSLLKKRFSHRPVQEKFVCLNCGFETHADEQAALNIARSWLFLRSQEYKKYQTNKTTGNTDKRAFVETWQSFYRKKLKEVWKPAV

SEQ ID NO: 34455 - protein, 979 aa, synthetic construct
  REGION 1..979: note = engineered CasX variant
QEIKRINKIRRRLVKDSNTKKAGKTGPMKTLLVRVMTPDLRERLENLRKKPENIPQPISNTSRANLNKLLTDYTEMKKAILHVYDEEFQKDPVGLMSRVAQPASKKIDQNKLKPEMDEKGNLTTAGFACSQCGQPLFVYKLEQVSEKGKAYTNYFGRCNVAEHEKLILLAQLKPEKDSDEAVTYSLGKFGQRALDFYSIHVTKESTHPVKPLAQIAGNRYASYPVGKALSDACMGTIASFLSKYQDIIIEHQKVVKGNQKRLESLRELAGKENLEYPSVTLPPQPHTKEGVDAYNEVIARVRMWVNLNLWQKLKLSRDDAKPLLRLKGFPSFPLVERQANEVDWWDMVCNVKKLINEKKEDGKVFWQNLAGYKRQEALRPYLSSEEDRKKGKKFARYQLGDLLLHLEKKHGEDWGKVYDEAWERIDKKVEGLSKHIKLEEERRSEDAQSKAALTDWLRAKASFVIEGLKEADKDEFCRCELKLQKWYGDLRGKPFAIEAENSILDISGFSKQYNCAFIWQKDGVKKLNLYLIINYFKGGKLRFKKIKPEAFEANRFYTVINKKSGEIVPMEVNFNFDDPNLIILPLAFGKRQGREFIWNDLLSLETGSLKLANGRVIEKTLYNRRTRQDEPALFVALTFERREVLDSSNIKTPMNLIGVDRGENIPAVIALTDPEGCPLSRFKDSLGNPTHILRIGESYKEKQRTIQAKKEVEQRRAGGYSRKYASKAKNLADDMVRNTARDLLYYAVTQDAMLIFENLSRGFGRQGKRTFMAERQYTRMEDWLTAKLAYEGLPSKTYLSKTLAQYTSKTCSNCGFTITSADYDRVLEKLKKTATGWMTTINGKELKVEGQITYYNRYKRQNVVKDLSVELDRLSEESVNNDISSWTKGRSGEALSLLKKRFSHRPVQEKFVCLNCGFETHADEQAALNIARSWLFLRSQEYKKYQTNKTTGNTDKRAFVETWQSFYRKKLKEVWKPAV

SEQ ID NO: 34456 - protein, 979 aa, synthetic construct
  REGION 1..979: note = engineered CasX variant
QEIKRINKIRRRLVKDSNTKKAGKTGPMKTLLVRVMTPDLRERLENLRKKPENIPQPISNTSRANLNKLLTDYTEMKKAILHVYDEEFQKDPVGLMSRVAQPASKKIDQNKLKPEMDEKGNLTTAGFACSQCGQPLFVYKLEQVSEKGKAYTNYFGRCNVAEHEKLILLAQLKPEKDSDEAVTYSLGKFGQRALDFYSIHVTKESTHPVKPLAQIAGNRYASHPVGKALSDACMGTIASFLSKYQDIIIEHQKVVKGNQKRLESLRELAGKENLEYPSVTLPPQPHTKEGVDAYNEVIARVRMWVNLNLWQKLKLSRDDAKPLLRLKGFPSFPLVERQANEVDWWDMVCNVKKLINEKKEDGKVFWQNLAGYKRQEALRPYLSSEEDRKKGKKFARYQLGDLLLHLEKKHGEDWGKVYDEAWERIDKKVEGLSKHIKLEEERRSEDAQSKAALTDWLRAKASFVIEGLKEADKDEFCRCELKLQKWYGDLRGKPFAIEAENSILDISGFSKQYNCAFIWQKDGVKKLNLYLIINYFKGGKLRFKKIKPEAFEANRFYTVINKKSGEIVPMEVNFNFDDPNLIILPLAFGKRQGREFIWNDLLSLETGSLKLANGRVIEKTLYNRRTRQDEPALFVALTFERREVLDSSNIKTPMNLIGVDRGENIPAVIALTDPEGCPLSRFKDSLGNPTHILRIGESYKEKQRTIQAKKEVEQRRAGGYSRKYASKAKNLADDMVRNTARDLLYYAVTQDAMLIFENLSRGFGRQGKRTFMAERQYTRMEDWLTAKLAYEGLPSKTYLSKTLAQYTSKTCSNCGFTITSADYDRVLEKLKKTATGWMTTINGKELKVEGQITYYNRYKRQNVVKDLSVELDRLSEESVNNDISSWTKGRSGEALSLLKKRFSHRPVQEKFVCLNCGFETHADEQAALNIARSWLFLRSQEYKKYQTNKTTGNTDKRAFVETWQSFYRKKLKEVWKPAV

SEQ ID NO: 34457 - protein, 979 aa, synthetic construct
  REGION 1..979: note = engineered CasX variant
QEIKRINKIRRRLVKDSNTKKAGKTGPMKTLLVRVMTPDLRERLENLRKKPENIPQPISNTSRANLNKLLTDYTEMKKAILHVYDEEFQKDPVGLMSRVAQPASKKIDQNKLKPEMDEKGNLTTAGFACSQCGQPLFVYKLEQVSEKGKAYTNYFGRCNVAEHEKLILLAQLKPEKDSDEAVTYSLGKFGQRALDFYSIHVTKESTHPVKPLAQIAGNRYASSPVGKALSDACMGTIASFLSKYQDIIIEHQKVVKGNQKRLESLRELAGKENLEYPSVTLPPQPHTKEGVDAYNEVIARVRMWVNLNLWQKLKLSRDDAKPLLRLKGFPSFPLVERQANEVDWWDMVCNVKKLINEKKEDGKVFWQNLAGYKRQEALRPYLSSEEDRKKGKKFARYQLGDLLLHLEKKHGEDWGKVYDEAWERIDKKVEGLSKHIKLEEERRSEDAQSKAALTDWLRAKASFVIEGLKEADKDEFCRCELKLQKWYGDLRGKPFAIEAENSILDISGFSKQYNCAFIWQKDGVKKLNLYLIINYFKGGKLRFKKIKPEAFEANRFYTVINKKSGEIVPMEVNFNFDDPNLIILPLAFGKRQGREFIWNDLLSLETGSLKLANGRVIEKTLYNRRTRQDEPALFVALTFERREVLDSSNIKTPMNLIGVDRGENIPAVIALTDPEGCPLSRFKDSLGNPTHILRIGESYKEKQRTIQAKKEVEQRRAGGYSRKYASKAKNLADDMVRNTARDLLYYAVTQDAMLIFENLSRGFGRQGKRTFMAERQYTRMEDWLTAKLAYEGLPSKTYLSKTLAQYTSKTCSNCGFTITSADYDRVLEKLKKTATGWMTTINGKELKVEGQITYYNRYKRQNVVKDLSVELDRLSEESVNNDISSWTKGRSGEALSLLKKRFSHRPVQEKFVCLNCGFETHADEQAALNIARSWLFLRSQEYKKYQTNKTTGNTDKRAFVETWQSFYRKKLKEVWKPAV

SEQ ID NO: 34458 - protein, 979 aa, synthetic construct
  REGION 1..979: note = engineered CasX variant
QEIKRINKIRRRLVKDSNTKKAGKTGPMKTLLVRVMTPDLRERLENLRKKPENIPQPISNTSRANLNKLLTDYTEMKKAILHVYDEEFQKDPVGLMSRVAQPASKKIDQNKLKPEMDEKGNLTTAGFACSQCGQPLFVYKLEQVSEKGKAYTNYFGRCNVAEHEKLILLAQLKPEKDSDEAVTYSLGKFGQRALDFYSIHVTKESTHPVKPLAQIAGNRYASTPVGKALSDACMGTIASFLSKYQDIIIEHQKVVKGNQKRLESLRELAGKENLEYPSVTLPPQPHTKEGVDAYNEVIARVRMWVNLNLWQKLKLSRDDAKPLLRLKGFPSFPLVERQANEVDWWDMVCNVKKLINEKKEDGKVFWQNLAGYKRQEALRPYLSSEEDRKKGKKFARYQLGDLLLHLEKKHGEDWGKVYDEAWERIDKKVEGLSKHIKLEEERRSEDAQSKAALTDWLRAKASFVIEGLKEADKDEFCRCELKLQKWYGDLRGKPFAIEAENSILDISGFSKQYNCAFIWQKDGVKKLNLYLIINYFKGGKLRFKKIKPEAFEANRFYTVINKKSGEIVPMEVNFNFDDPNLIILPLAFGKRQGREFIWNDLLSLETGSLKLANGRVIEKTLYNRRTRQDEPALFVALTFERREVLDSSNIKTPMNLIGVDRGENIPAVIALTDPEGCPLSRFKDSLGNPTHILRIGESYKEKQRTIQAKKEVEQRRAGGYSRKYASKAKNLADDMVRNTARDLLYYAVTQDAMLIFENLSRGFGRQGKRTFMAERQYTRMEDWLTAKLAYEGLPSKTYLSKTLAQYTSKTCSNCGFTITSADYDRVLEKLKKTATGWMTTINGKELKVEGQITYYNRYKRQNVVKDLSVELDRLSEESVNNDISSWTKGRSGEALSLLKKRFSHRPVQEKFVCLNCGFETHADEQAALNIARSWLFLRSQEYKKYQTNKTTGNTDKRAFVETWQSFYRKKLKEVWKPAV

SEQ ID NO: 34459 - protein, 979 aa, synthetic construct
  REGION 1..979: note = engineered CasX variant
QEIKRINKIRRRLVKDSNTKKAGKTGPMKTLLVRVMTPDLRERLENLRKKPENIPQPISNTSRANLNKLLTDYTEMKKAILHVYDEEFQKDPVGLMSRVAQPASKKIDQNKLKPEMDEKGNLTTAGFACSQCGQPLFVYKLEQVSEKGKAYTNYFGRCNVAEHEKLILLAQLKPEKDSDEAVTYSLGKFGQRALDFYSIHVTKESTHPVKPLAQIAGNRYASAPVGKALSDACMGTIASFLSKYQDIIIEHQKVVKGNQKRLESLRELAGKENLEYPSVTLPPQPHTKEGVDAYNEVIARVRMWVNLNLWQKLKLSRDDAKPLLRLKGFPSFPLVERQANEVDWWDMVCNVKKLINEKKEDGKVFWQNLAGYKRQEALRPYLSSEEDRKKGKKFARYQLGDLLLHLEKKHGEDWGKVYDEAWERIDKKVEGLSKHIKLEEERRSEDAQSKAALTDWLRAKASFVIEGLKEADKDEFCRCELKLQKWYGDLRGKPFAIEAENSILDISGFSKQYNCAFIWQKDGVKKLNLYLIINYFKGGKLRFKKIKPEAFEANRFYTVINKKSGEIVPMEVNFNFDDPNLIILPLAFGKRQGREFIWNDLLSLETGSLKLANGRVIEKTLYNRRTRQDEPALFVALTFERREVLDSSNIKTPMNLIGVDRGENIPAVIALTDPEGCPLSRFKDSLGNPTHILRIGESYKEKQRTIQAKKEVEQRRAGGYSRKYASKAKNLADDMVRNTARDLLYYAVTQDAMLIFENLSRGFGRQGKRTFMAERQYTRMEDWLTAKLAYEGLPSKTYLSKTLAQYTSKTCSNCGFTITSADYDRVLEKLKKTATGWMTTINGKELKVEGQITYYNRYKRQNVVKDLSVELDRLSEESVNNDISSWTKGRSGEALSLLKKRFSHRPVQEKFVCLNCGFETHADEQAALNIARSWLFLRSQEYKKYQTNKTTGNTDKRAFVETWQSFYRKKLKEVWKPAV

SEQ ID NO: 34460 - protein, 979 aa, synthetic construct
  REGION 1..979: note = engineered CasX variant
QEIKRINKIRRRLVKDSNTKKAGKTGPMKTLLVRVMTPDLRERLENLRKKPENIPQPISNTSRANLNKLLTDYTEMKKAILHVYDEEFQKDPVGLMSRVAQPASKKIDQNKLKPEMDEKGNLTTAGFACSQCGQPLFVYKLEQVSEKGKAYTNYFGRCNVAEHEKLILLAQLKPEKDSDEAVTYSLGKFGQRALDFYSIHVTKESTHPVKPLAQIAGNRYASVPVGKALSDACMGTIASFLSKYQDIIIEHQKVVKGNQKRLESLRELAGKENLEYPSVTLPPQPHTKEGVDAYNEVIARVRMWVNLNLWQKLKLSRDDAKPLLRLKGFPSFPLVERQANEVDWWDMVCNVKKLINEKKEDGKVFWQNLAGYKRQEALRPYLSSEEDRKKGKKFARYQLGDLLLHLEKKHGEDWGKVYDEAWERIDKKVEGLSKHIKLEEERRSEDAQSKAALTDWLRAKASFVIEGLKEADKDEFCRCELKLQKWYGDLRGKPFAIEAENSILDISGFSKQYNCAFIWQKDGVKKLNLYLIINYFKGGKLRFKKIKPEAFEANRFYTVINKKSGEIVPMEVNFNFDDPNLIILPLAFGKRQGREFIWNDLLSLETGSLKLANGRVIEKTLYNRRTRQDEPALFVALTFERREVLDSSNIKTPMNLIGVDRGENIPAVIALTDPEGCPLSRFKDSLGNPTHILRIGESYKEKQRTIQAKKEVEQRRAGGYSRKYASKAKNLADDMVRNTARDLLYYAVTQDAMLIFENLSRGFGRQGKRTFMAERQYTRMEDWLTAKLAYEGLPSKTYLSKTLAQYTSKTCSNCGFTITSADYDRVLEKLKKTATGWMTTINGKELKVEGQITYYNRYKRQNVVKDLSVELDRLSEESVNNDISSWTKGRSGEALSLLKKRFSHRPVQEKFVCLNCGFETHADEQAALNIARSWLFLRSQEYKKYQTNKTTGNTDKRAFVETWQSFYRKKLKEVWKPAV

SEQ ID NO: 34461 - protein, 979 aa, synthetic construct
  REGION 1..979: note = engineered CasX variant
QEIKRINKIRRRLVKDSNTKKAGKTGPMKTLLVRVMTPDLRERLENLRKKPENIPQPISNTSRANLNKLLTDYTEMKKAILHVYDEEFQKDPVGLMSRVAQPASKKIDQNKLKPEMDEKGNLTTAGFACSQCGQPLFVYKLEQVSEKGKAYTNYFGRCNVAEHEKLIKLAQLKPEKDSDEAVTYSLGKFGQRALDFYSIHVTKESTHPVKPLAQIAGNRYASGPVGKALSDACMGTIASFLSKYQDIIIEHQKVVKGNQKRLESLRELAGKENLEYPSVTLPPQPHTKEGVDAYNEVIARVRMWVNLNLWQKLKLSRDDAKPLLRLKGFPSFPLVERQANEVDWWDMVCNVKKLINEKKEDGKVFWQNLAGYKRQEALRPYLSSEEDRKKGKKFARYQLGDLLLHLEKKHGEDWGKVYDEAWERIDKKVEGLSKHIKLEEERRSEDAQSKAALTDWLRAKASFVIEGLKEADKDEFCRCELKLQKWYGDLRGKPFAIEAENSILDISGFSKQYNCAFIWQKDGVKKLNLYLIINYFKGGKLRFKKIKPEAFEANRFYTVINKKSGEIVPMEVNFNFDDPNLIILPLAFGKRQGREFIWNDLLSLETGSLKLANGRVIEKTLYNRRTRQDEPALFVALTFERREVLDSSNIKTPMNLIGVDRGENIPAVIALTDPEGCPLSRFKDSLGNPTHILRIGESYKEKQRTIQAKKEVEQRRAGGYSRKYASKAKNLADDMVRNTARDLLYYAVTQDAMLIFENLSRGFGRQGKRTFMAERQYTRMEDWLTAKLAYEGLPSKTYLSKTLAQYTSKTCSNCGFTITSADYDRVLEKLKKTATGWMTTINGKELKVEGQITYYNRYKRQNVVKDLSVELDRLSEESVNNDISSWTKGRSGEALSLLKKRFSHRPVQEKFVCLNCGFETHADEQAALNIARSWLFLRSQEYKKYQTNKTTGNTDKRAFVETWQSFYRKKLKEVWKPAV

SEQ ID NO: 34462 - protein, 978 aa, synthetic construct
  REGION 1..978: note = engineered CasX variant
QEIKRINKIRRRLVKDSNTKKAGKTGPMKTLLVRVMTPDLRERLENLRKKPENIPQPISNTSRANLNKLLTDYTEMKKAILHVYDEEFQKDPVGLMSRVAQPASKKIDQNKLKPEMDEKGNLTTAGFACSQCGQPLFVYKLEQVSEKGKAYTNYFGRCNVAEHEKLILLAQLKPEKDSDEAVTYSLGKFGQRALDFYSIHVTKESTHPVKPLAQIAGNRYASPVGKALSDACMGTIASFLSKYQDIIIEHQKVVKGNQKRLESLRELAGKENLEYPSVTLPPQPHTKEGVDAYNEVIARVRMWVNLNLWQKLKLSRDDAKPLLRLKGFPSFPLVERQANEVDWWDMVCNVKKLINEKKEDGKVFWQNLAGYKRQEALRPYLSSEEDRKKGKKFARYQLGDLLLHLEKKHGEDWGKVYDEAWERIDKKVEGLSKHIKLEEERRSEDAQSKAALTDWLRAKASFVIEGLKEADKDEFCRCELKLQKWYGDLRGKPFAIEAENSILDISGFSKQYNCAFIWQKDGVKKLNLYLIINYFKGGKLRFKKIKPEAFEANRFYTVINKKSGEIVPMEVNFNFDDPNLIILPLAFGKRQGREFIWNDLLSLETGSLKLANGRVIEKTLYNRRTRQDEPALFVALTFERREVLDSSNIKTPMNLIGVDRGENIPAVIALTDPEGCPLSRFKDSLGNPTHILRIGESYKEKQRTIQAKKEVEQRRAGGYSRKYASKAKNLADDMVRNTARDLLYYAVTQDAMLIFENLSRGFGRQGKRTFMAERQYTRMEDWLTAKLAYEGLPSKTYLSKTLAQYTSKTCSNCGFTITSADYDRVLEKLKKTATGWMTTINGKELKVEGQITYYNRYKRQNVVKDLSVELDRLSEESVNNDISSWTKGRSGEALSLLKKRFSHRPVQEKFVCLNCGFETHADEQAALNIARSWLFLRSQEYKKYQTNKTTGNTDKRAFVETWQSFYRKKLKEVWKPAV

SEQ ID NO: 34463 - protein, 979 aa, synthetic construct
  REGION 1..979: note = engineered CasX variant
QEIKRINKIRRRLVKDSNTKKAGKTGPMKTLLVRVMTPDLRERLENLRKKPENIPQPISNTSRANLNKLLTDYTEMKKAILHVYDEEFQKDPVGLMSRVAQPASKKIDQNKLKPEMDEKGNLTTAGFACSQCGQPLFVYKLEQVSEKGKAYTNYFGRCNVAEHEKLILLAQLKPEKDSDEAVTYSLGKFGQRALDFYSIHVTKESTHPVKPLAQIAGNRYASYPVGKALSDACMGTIASFLSKYQDIIIEHQKVVKGNQKRLESLRELAGKENLEYPSVTLPPQPHTKEGVDAYNEVIARVRMWVNLNLWQKLKLSRDDAKPLLRLKGFPSFPLVERQANEVDWWDMVCNVKKLINEKKEDGKVFWQNLAGYKRQEALRPYLSSEEDRKKGKKFARYQLGDLLLHLEKKHGEDWGKVYDEAWERIDKKVEGLSKHIKLEEERRSEDAQSKAALTDWLRAKASFVIEGLKEADKDEFCRCELKLQKWYGDLRGKPFAIEAENSILDISGFSKQYNCAFIWQKDGVKKLNLYLIINYFKGGKLRFKKIKPEAFEANRFYTVINKKSGEIVPMEVNFNFDDPNLIILPLAFGKRQGREFIWNDLLSLETGSLKLANGRVIEKTLYNRRTRQDEPALFVALTFERREVLDSSNIKPMSNLIGVDRGENIPAVIALTDPEGCPLSRFKDSLGNPTHILRIGESYKEKQRTIQAKKEVEQRRAGGYSRKYASKAKNLADDMVRNTARDLLYYAVTQDAMLIFENLSRGFGRQGKRTFMAERQYTRMEDWLTAKLAYEGLPSKTYLSKTLAQYTSKTCSNCGFTITSADYDRVLEKLKKTATGWMTTINGKELKVEGQITYYNRYKRQNVVKDLSVELDRLSEESVNNDISSWTKGRSGEALSLLKKRFSHRPVQEKFVCLNCGFETHADEQAALNIARSWLFLRSQEYKKYQTNKTTGNTDKRAFVETWQSFYRKKLKEVWKPAV

SEQ ID NO: 34464 - protein, 979 aa, synthetic construct
  REGION 1..979: note = engineered CasX variant
QEIKRINKIRRRLVKDSNTKKAGKTGPMKTLLVRVMTPDLRERLENLRKKPENIPQPISNTSRANLNKLLTDYTEMKKAILHVYDEEFQKDPVGLMSRVAQPASKKIDQNKLKPEMDEKGNLTTAGFACSQCGQPLFVYKLEQVSEKGKAYTNYFGRCNVAEHEKLILLAQLKPEKDSDEAVTYSLGKFGQRALDFYSIHVTKESTHPVKPLAQIAGNRYASHPVGKALSDACMGTIASFLSKYQDIIIEHQKVVKGNQKRLESLRELAGKENLEYPSVTLPPQPHTKEGVDAYNEVIARVRMWVNLNLWQKLKLSRDDAKPLLRLKGFPSFPLVERQANEVDWWDMVCNVKKLINEKKEDGKVFWQNLAGYKRQEALRPYLSSEEDRKKGKKFARYQLGDLLLHLEKKHGEDWGKVYDEAWERIDKKVEGLSKHIKLEEERRSEDAQSKAALTDWLRAKASFVIEGLKEADKDEFCRCELKLQKWYGDLRGKPFAIEAENSILDISGFSKQYNCAFIWQKDGVKKLNLYLIINYFKGGKLRFKKIKPEAFEANRFYTVINKKSGEIVPMEVNFNFDDPNLIILPLAFGKRQGREFIWNDLLSLETGSLKLANGRVIEKTLYNRRTRQDEPALFVALTFERREVLDSSNIKPMSNLIGVDRGENIPAVIALTDPEGCPLSRFKDSLGNPTHILRIGESYKEKQRTIQAKKEVEQRRAGGYSRKYASKAKNLADDMVRNTARDLLYYAVTQDAMLIFENLSRGFGRQGKRTFMAERQYTRMEDWLTAKLAYEGLPSKTYLSKTLAQYTSKTCSNCGFTITSADYDRVLEKLKKTATGWMTTINGKELKVEGQITYYNRYKRQNVVKDLSVELDRLSEESVNNDISSWTKGRSGEALSLLKKRFSHRPVQEKFVCLNCGFETHADEQAALNIARSWLFLRSQEYKKYQTNKTTGNTDKRAFVETWQSFYRKKLKEVWKPAV

SEQ ID NO: 34465 - protein, 979 aa, synthetic construct
  REGION 1..979: note = engineered CasX variant
QEIKRINKIRRRLVKDSNTKKAGKTGPMKTLLVRVMTPDLRERLENLRKKPENIPQPISNTSRANLNKLLTDYTEMKKAILHVYDEEFQKDPVGLMSRVAQPASKKIDQNKLKPEMDEKGNLTTAGFACSQCGQPLFVYKLEQVSEKGKAYTNYFGRCNVAEHEKLILLAQLKPEKDSDEAVTYSLGKFGQRALDFYSIHVTKESTHPVKPLAQIAGNRYASSPVGKALSDACMGTIASFLSKYQDIIIEHQKVVKGNQKRLESLRELAGKENLEYPSVTLPPQPHTKEGVDAYNEVIARVRMWVNLNLWQKLKLSRDDAKPLLRLKGFPSFPLVERQANEVDWWDMVCNVKKLINEKKEDGKVFWQNLAGYKRQEALRPYLSSEEDRKKGKKFARYQLGDLLLHLEKKHGEDWGKVYDEAWERIDKKVEGLSKHIKLEEERRSEDAQSKAALTDWLRAKASFVIEGLKEADKDEFCRCELKLQKWYGDLRGKPFAIEAENSILDISGFSKQYNCAFIWQKDGVKKLNLYLIINYFKGGKLRFKKIKPEAFEANRFYTVINKKSGEIVPMEVNFNFDDPNLIILPLAFGKRQGREFIWNDLLSLETGSLKLANGRVIEKTLYNRRTRQDEPALFVALTFERREVLDSSNIKPMSNLIGVDRGENIPAVIALTDPEGCPLSRFKDSLGNPTHILRIGESYKEKQRTIQAKKEVEQRRAGGYSRKYASKAKNLADDMVRNTARDLLYYAVTQDAMLIFENLSRGFGRQGKRTFMAERQYTRMEDWLTAKLAYEGLPSKTYLSKTLAQYTSKTCSNCGFTITSADYDRVLEKLKKTATGWMTTINGKELKVEGQITYYNRYKRQNVVKDLSVELDRLSEESVNNDISSWTKGRSGEALSLLKKRFSHRPVQEKFVCLNCGFETHADEQAALNIARSWLFLRSQEYKKYQTNKTTGNTDKRAFVETWQSFYRKKLKEVWKPAV

SEQ ID NO: 34466 - protein, 979 aa, synthetic construct
  REGION 1..979: note = engineered CasX variant
QEIKRINKIRRRLVKDSNTKKAGKTGPMKTLLVRVMTPDLRERLENLRKKPENIPQPISNTSRANLNKLLTDYTEMKKAILHVYDEEFQKDPVGLMSRVAQPASKKIDQNKLKPEMDEKGNLTTAGFACSQCGQPLFVYKLEQVSEKGKAYTNYFGRCNVAEHEKLILLAQLKPEKDSDEAVTYSLGKFGQRALDFYSIHVTKESTHPVKPLAQIAGNRYASTPVGKALSDACMGTIASFLSKYQDIIIEHQKVVKGNQKRLESLRELAGKENLEYPSVTLPPQPHTKEGVDAYNEVIARVRMWVNLNLWQKLKLSRDDAKPLLRLKGFPSFPLVERQANEVDWWDMVCNVKKLINEKKEDGKVFWQNLAGYKRQEALRPYLSSEEDRKKGKKFARYQLGDLLLHLEKKHGEDWGKVYDEAWERIDKKVEGLSKHIKLEEERRSEDAQSKAALTDWLRAKASFVIEGLKEADKDEFCRCELKLQKWYGDLRGKPFAIEAENSILDISGFSKQYNCAFIWQKDGVKKLNLYLIINYFKGGKLRFKKIKPEAFEANRFYTVINKKSGEIVPMEVNFNFDDPNLIILPLAFGKRQGREFIWNDLLSLETGSLKLANGRVIEKTLYNRRTRQDEPALFVALTFERREVLDSSNIKPMSNLIGVDRGENIPAVIALTDPEGCPLSRFKDSLGNPTHILRIGESYKEKQRTIQAKKEVEQRRAGGYSRKYASKAKNLADDMVRNTARDLLYYAVTQDAMLIFENLSRGFGRQGKRTFMAERQYTRMEDWLTAKLAYEGLPSKTYLSKTLAQYTSKTCSNCGFTITSADYDRVLEKLKKTATGWMTTINGKELKVEGQITYYNRYKRQNVVKDLSVELDRLSEESVNNDISSWTKGRSGEALSLLKKRFSHRPVQEKFVCLNCGFETHADEQAALNIARSWLFLRSQEYKKYQTNKTTGNTDKRAFVETWQSFYRKKLKEVWKPAV

SEQ ID NO: 34467 - protein, 979 aa, synthetic construct
  REGION 1..979: note = engineered CasX variant
QEIKRINKIRRRLVKDSNTKKAGKTGPMKTLLVRVMTPDLRERLENLRKKPENIPQPISNTSRANLNKLLTDYTEMKKAILHVYDEEFQKDPVGLMSRVAQPASKKIDQNKLKPEMDEKGNLTTAGFACSQCGQPLFVYKLEQVSEKGKAYTNYFGRCNVAEHEKLILLAQLKPEKDSDEAVTYSLGKFGQRALDFYSIHVTKESTHPVKPLAQIAGNRYASAPVGKALSDACMGTIASFLSKYQDIIIEHQKVVKGNQKRLESLRELAGKENLEYPSVTLPPQPHTKEGVDAYNEVIARVRMWVNLNLWQKLKLSRDDAKPLLRLKGFPSFPLVERQANEVDWWDMVCNVKKLINEKKEDGKVFWQNLAGYKRQEALRPYLSSEEDRKKGKKFARYQLGDLLLHLEKKHGEDWGKVYDEAWERIDKKVEGLSKHIKLEEERRSEDAQSKAALTDWLRAKASFVIEGLKEADKDEFCRCELKLQKWYGDLRGKPFAIEAENSILDISGFSKQYNCAFIWQKDGVKKLNLYLIINYFKGGKLRFKKIKPEAFEANRFYTVINKKSGEIVPMEVNFNFDDPNLIILPLAFGKRQGREFIWNDLLSLETGSLKLANGRVIEKTLYNRRTRQDEPALFVALTFERREVLDSSNIKPMSNLIGVDRGENIPAVIALTDPEGCPLSRFKDSLGNPTHILRIGESYKEKQRTIQAKKEVEQRRAGGYSRKYASKAKNLADDMVRNTARDLLYYAVTQDAMLIFENLSRGFGRQGKRTFMAERQYTRMEDWLTAKLAYEGLPSKTYLSKTLAQYTSKTCSNCGFTITSADYDRVLEKLKKTATGWMTTINGKELKVEGQITYYNRYKRQNVVKDLSVELDRLSEESVNNDISSWTKGRSGEALSLLKKRFSHRPVQEKFVCLNCGFETHADEQAALNIARSWLFLRSQEYKKYQTNKTTGNTDKRAFVETWQSFYRKKLKEVWKPAV

SEQ ID NO: 34468 - protein, 979 aa, synthetic construct
  REGION 1..979: note = engineered CasX variant
QEIKRINKIRRRLVKDSNTKKAGKTGPMKTLLVRVMTPDLRERLENLRKKPENIPQPISNTSRANLNKLLTDYTEMKKAILHVYDEEFQKDPVGLMSRVAQPASKKIDQNKLKPEMDEKGNLTTAGFACSQCGQPLFVYKLEQVSEKGKAYTNYFGRCNVAEHEKLILLAQLKPEKDSDEAVTYSLGKFGQRALDFYSIHVTKESTHPVKPLAQIAGNRYASVPVGKALSDACMGTIASFLSKYQDIIIEHQKVVKGNQKRLESLRELAGKENLEYPSVTLPPQPHTKEGVDAYNEVIARVRMWVNLNLWQKLKLSRDDAKPLLRLKGFPSFPLVERQANEVDWWDMVCNVKKLINEKKEDGKVFWQNLAGYKRQEALRPYLSSEEDRKKGKKFARYQLGDLLLHLEKKHGEDWGKVYDEAWERIDKKVEGLSKHIKLEEERRSEDAQSKAALTDWLRAKASFVIEGLKEADKDEFCRCELKLQKWYGDLRGKPFAIEAENSILDISGFSKQYNCAFIWQKDGVKKLNLYLIINYFKGGKLRFKKIKPEAFEANRFYTVINKKSGEIVPMEVNFNFDDPNLIILPLAFGKRQGREFIWNDLLSLETGSLKLANGRVIEKTLYNRRTRQDEPALFVALTFERREVLDSSNIKPMSNLIGVDRGENIPAVIALTDPEGCPLSRFKDSLGNPTHILRIGESYKEKQRTIQAKKEVEQRRAGGYSRKYASKAKNLADDMVRNTARDLLYYAVTQDAMLIFENLSRGFGRQGKRTFMAERQYTRMEDWLTAKLAYEGLPSKTYLSKTLAQYTSKTCSNCGFTITSADYDRVLEKLKKTATGWMTTINGKELKVEGQITYYNRYKRQNVVKDLSVELDRLSEESVNNDISSWTKGRSGEALSLLKKRFSHRPVQEKFVCLNCGFETHADEQAALNIARSWLFLRSQEYKKYQTNKTTGNTDKRAFVETWQSFYRKKLKEVWKPAV

SEQ ID NO: 34469 - protein, 979 aa, synthetic construct
  REGION 1..979: note = engineered CasX variant
QEIKRINKIRRRLVKDSNTKKAGKTGPMKTLLVRVMTPDLRERLENLRKKPENIPQPISNTSRANLNKLLTDYTEMKKAILHVYDEEFQKDPVGLMSRVAQPASKKIDQNKLKPEMDEKGNLTTAGFACSQCGQPLFVYKLEQVSEKGKAYTNYFGRCNVAEHEKLIKLAQLKPEKDSDEAVTYSLGKFGQRALDFYSIHVTKESTHPVKPLAQIAGNRYASGPVGKALSDACMGTIASFLSKYQDIIIEHQKVVKGNQKRLESLRELAGKENLEYPSVTLPPQPHTKEGVDAYNEVIARVRMWVNLNLWQKLKLSRDDAKPLLRLKGFPSFPLVERQANEVDWWDMVCNVKKLINEKKEDGKVFWQNLAGYKRQEALRPYLSSEEDRKKGKKFARYQLGDLLLHLEKKHGEDWGKVYDEAWERIDKKVEGLSKHIKLEEERRSEDAQSKAALTDWLRAKASFVIEGLKEADKDEFCRCELKLQKWYGDLRGKPFAIEAENSILDISGFSKQYNCAFIWQKDGVKKLNLYLIINYFKGGKLRFKKIKPEAFEANRFYTVINKKSGEIVPMEVNFNFDDPNLIILPLAFGKRQGREFIWNDLLSLETGSLKLANGRVIEKTLYNRRTRQDEPALFVALTFERREVLDSSNIKPMSNLIGVDRGENIPAVIALTDPEGCPLSRFKDSLGNPTHILRIGESYKEKQRTIQAKKEVEQRRAGGYSRKYASKAKNLADDMVRNTARDLLYYAVTQDAMLIFENLSRGFGRQGKRTFMAERQYTRMEDWLTAKLAYEGLPSKTYLSKTLAQYTSKTCSNCGFTITSADYDRVLEKLKKTATGWMTTINGKELKVEGQITYYNRYKRQNVVKDLSVELDRLSEESVNNDISSWTKGRSGEALSLLKKRFSHRPVQEKFVCLNCGFETHADEQAALNIARSWLFLRSQEYKKYQTNKTTGNTDKRAFVETWQSFYRKKLKEVWKPAV

SEQ ID NO: 34470 - protein, 978 aa, synthetic construct
  REGION 1..978: note = engineered CasX variant
QEIKRINKIRRRLVKDSNTKKAGKTGPMKTLLVRVMTPDLRERLENLRKKPENIPQPISNTSRANLNKLLTDYTEMKKAILHVYDEEFQKDPVGLMSRVAQPASKKIDQNKLKPEMDEKGNLTTAGFACSQCGQPLFVYKLEQVSEKGKAYTNYFGRCNVAEHEKLILLAQLKPEKDSDEAVTYSLGKFGQRALDFYSIHVTKESTHPVKPLAQIAGNRYASPVGKALSDACMGTIASFLSKYQDIIIEHQKVVKGNQKRLESLRELAGKENLEYPSVTLPPQPHTKEGVDAYNEVIARVRMWVNLNLWQKLKLSRDDAKPLLRLKGFPSFPLVERQANEVDWWDMVCNVKKLINEKKEDGKVFWQNLAGYKRQEALRPYLSSEEDRKKGKKFARYQLGDLLLHLEKKHGEDWGKVYDEAWERIDKKVEGLSKHIKLEEERRSEDAQSKAALTDWLRAKASFVIEGLKEADKDEFCRCELKLQKWYGDLRGKPFAIEAENSILDISGFSKQYNCAFIWQKDGVKKLNLYLIINYFKGGKLRFKKIKPEAFEANRFYTVINKKSGEIVPMEVNFNFDDPNLIILPLAFGKRQGREFIWNDLLSLETGSLKLANGRVIEKTLYNRRTRQDEPALFVALTFERREVLDSSNIKPMSNLIGVDRGENIPAVIALTDPEGCPLSRFKDSLGNPTHILRIGESYKEKQRTIQAKKEVEQRRAGGYSRKYASKAKNLADDMVRNTARDLLYYAVTQDAMLIFENLSRGFGRQGKRTFMAERQYTRMEDWLTAKLAYEGLPSKTYLSKTLAQYTSKTCSNCGFTITSADYDRVLEKLKKTATGWMTTINGKELKVEGQITYYNRYKRQNVVKDLSVELDRLSEESVNNDISSWTKGRSGEALSLLKKRFSHRPVQEKFVCLNCGFETHADEQAALNIARSWLFLRSQEYKKYQTNKTTGNTDKRAFVETWQSFYRKKLKEVWKPAV

SEQ ID NO: 34471 - protein, 978 aa, synthetic construct
  REGION 1..978: note = engineered CasX variant
QEIKRINKIRRRLVKDSNTKKAGKTGPMKTLLVRVMTPDLRERLENLRKKPENIPQPISNTSRANLNKLLTDYTEMKKAILHVYDEEFQKDPVGLMSRVAQPASKKIDQNKLKPEMDEKGNLTTAGFACSQCGQPLFVYKLEQVSEKGKAYTNYFGRCNVAEHEKLILLAQLKPEKDSDEAVTYSLGKFGQRALDFYSIHVTKESTHPVKPLAQIAGNRYASYPVGKALSDACMGTIASFLSKYQDIIIEHQKVVKGNQKRLESLRELAGKENLEYPSVTLPPQPHTKEGVDAYNEVIARVRMWVNLNLWQKLKLSRDDAKPLLRLKGFPSFPLVERQANEVDWWDMVCNVKKLINEKKEDGKVFWQNLAGYKRQEALRPYLSSEEDRKKGKKFARYQLGDLLLHLEKKHGEDWGKVYDEAWERIDKKVEGLSKHIKLEEERRSEDAQSKAALTDWLRAKASFVIEGLKEADKDEFCRCELKLQKWYGDLRGKPFAIEAENSILDISGFSKQYNCAFIWQKDGVKKLNLYLIINYFKGGKLRFKKIKPEAFEANRFYTVINKKSGEIVPMEVNFNFDDPNLIILPLAFGKRQGREFIWNDLLSLETGSLKLANGRVIEKTLYNRRTRQDEPALFVALTFERREVLDSSNIKPMNLIGVDRGENIPAVIALTDPEGCPLSRFKDSLGNPTHILRIRESYKEKQRTIQAKKEVEQRRAGGYSRKYASKAKNLADDMVRNTARDLLYYAVTQDAMLIFENLSRGFGRQGKRTFMAERQYTRMEDWLTAKLAYEGLPSKTYLSKTLAQYTSKTCSNCGFTITSADYDRVLEKLKKTATGWMTTINGKELKVEGQITYYNRYKRQNVVKDLSVELDRLSEESVNNDISSWTKGRSGEALSLLKKRFSHRPVQEKFVCLNCGFETHADEQAALNIARSWLFLRSQEYKKYQTNKTTGNTDKRAFVETWQSFYRKKLKEVWKPAV

SEQ ID NO: 34472 - protein, 978 aa, synthetic construct
  REGION 1..978: note = engineered CasX variant
QEIKRINKIRRRLVKDSNTKKAGKTGPMKTLLVRVMTPDLRERLENLRKKPENIPQPISNTSRANLNKLLTDYTEMKKAILHVYDEEFQKDPVGLMSRVAQPASKKIDQNKLKPEMDEKGNLTTAGFACSQCGQPLFVYKLEQVSEKGKAYTNYFGRCNVAEHEKLILLAQLKPEKDSDEAVTYSLGKFGQRALDFYSIHVTKESTHPVKPLAQIAGNRYASHPVGKALSDACMGTIASFLSKYQDIIIEHQKVVKGNQKRLESLRELAGKENLEYPSVTLPPQPHTKEGVDAYNEVIARVRMWVNLNLWQKLKLSRDDAKPLLRLKGFPSFPLVERQANEVDWWDMVCNVKKLINEKKEDGKVFWQNLAGYKRQEALRPYLSSEEDRKKGKKFARYQLGDLLLHLEKKHGEDWGKVYDEAWERIDKKVEGLSKHIKLEEERRSEDAQSKAALTDWLRAKASFVIEGLKEADKDEFCRCELKLQKWYGDLRGKPFAIEAENSILDISGFSKQYNCAFIWQKDGVKKLNLYLIINYFKGGKLRFKKIKPEAFEANRFYTVINKKSGEIVPMEVNFNFDDPNLIILPLAFGKRQGREFIWNDLLSLETGSLKLANGRVIEKTLYNRRTRQDEPALFVALTFERREVLDSSNIKPMNLIGVDRGENIPAVIALTDPEGCPLSRFKDSLGNPTHILRIRESYKEKQRTIQAKKEVEQRRAGGYSRKYASKAKNLADDMVRNTARDLLYYAVTQDAMLIFENLSRGFGRQGKRTFMAERQYTRMEDWLTAKLAYEGLPSKTYLSKTLAQYTSKTCSNCGFTITSADYDRVLEKLKKTATGWMTTINGKELKVEGQITYYNRYKRQNVVKDLSVELDRLSEESVNNDISSWTKGRSGEALSLLKKRFSHRPVQEKFVCLNCGFETHADEQAALNIARSWLFLRSQEYKKYQTNKTTGNTDKRAFVETWQSFYRKKLKEVWKPAV

SEQ ID NO: 34473 - protein, 978 aa, synthetic construct
  REGION 1..978: note = engineered CasX variant
QEIKRINKIRRRLVKDSNTKKAGKTGPMKTLLVRVMTPDLRERLENLRKKPENIPQPISNTSRANLNKLLTDYTEMKKAILHVYDEEFQKDPVGLMSRVAQPASKKIDQNKLKPEMDEKGNLTTAGFACSQCGQPLFVYKLEQVSEKGKAYTNYFGRCNVAEHEKLILLAQLKPEKDSDEAVTYSLGKFGQRALDFYSIHVTKESTHPVKPLAQIAGNRYASSPVGKALSDACMGTIASFLSKYQDIIIEHQKVVKGNQKRLESLRELAGKENLEYPSVTLPPQPHTKEGVDAYNEVIARVRMWVNLNLWQKLKLSRDDAKPLLRLKGFPSFPLVERQANEVDWWDMVCNVKKLINEKKEDGKVFWQNLAGYKRQEALRPYLSSEEDRKKGKKFARYQLGDLLLHLEKKHGEDWGKVYDEAWERIDKKVEGLSKHIKLEEERRSEDAQSKAALTDWLRAKASFVIEGLKEADKDEFCRCELKLQKWYGDLRGKPFAIEAENSILDISGFSKQYNCAFIWQKDGVKKLNLYLIINYFKGGKLRFKKIKPEAFEANRFYTVINKKSGEIVPMEVNFNFDDPNLIILPLAFGKRQGREFIWNDLLSLETGSLKLANGRVIEKTLYNRRTRQDEPALFVALTFERREVLDSSNIKPMNLIGVDRGENIPAVIALTDPEGCPLSRFKDSLGNPTHILRIRESYKEKQRTIQAKKEVEQRRAGGYSRKYASKAKNLADDMVRNTARDLLYYAVTQDAMLIFENLSRGFGRQGKRTFMAERQYTRMEDWLTAKLAYEGLPSKTYLSKTLAQYTSKTCSNCGFTITSADYDRVLEKLKKTATGWMTTINGKELKVEGQITYYNRYKRQNVVKDLSVELDRLSEESVNNDISSWTKGRSGEALSLLKKRFSHRPVQEKFVCLNCGFETHADEQAALNIARSWLFLRSQEYKKYQTNKTTGNTDKRAFVETWQSFYRKKLKEVWKPAV

SEQ ID NO: 34474 - protein, 978 aa, synthetic construct
  REGION 1..978: note = engineered CasX variant
QEIKRINKIRRRLVKDSNTKKAGKTGPMKTLLVRVMTPDLRERLENLRKKPENIPQPISNTSRANLNKLLTDYTEMKKAILHVYDEEFQKDPVGLMSRVAQPASKKIDQNKLKPEMDEKGNLTTAGFACSQCGQPLFVYKLEQVSEKGKAYTNYFGRCNVAEHEKLILLAQLKPEKDSDEAVTYSLGKFGQRALDFYSIHVTKESTHPVKPLAQIAGNRYASTPVGKALSDACMGTIASFLSKYQDIIIEHQKVVKGNQKRLESLRELAGKENLEYPSVTLPPQPHTKEGVDAYNEVIARVRMWVNLNLWQKLKLSRDDAKPLLRLKGFPSFPLVERQANEVDWWDMVCNVKKLINEKKEDGKVFWQNLAGYKRQEALRPYLSSEEDRKKGKKFARYQLGDLLLHLEKKHGEDWGKVYDEAWERIDKKVEGLSKHIKLEEERRSEDAQSKAALTDWLRAKASFVIEGLKEADKDEFCRCELKLQKWYGDLRGKPFAIEAENSILDISGFSKQYNCAFIWQKDGVKKLNLYLIINYFKGGKLRFKKIKPEAFEANRFYTVINKKSGEIVPMEVNFNFDDPNLIILPLAFGKRQGREFIWNDLLSLETGSLKLANGRVIEKTLYNRRTRQDEPALFVALTFERREVLDSSNIKPMNLIGVDRGENIPAVIALTDPEGCPLSRFKDSLGNPTHILRIRESYKEKQRTIQAKKEVEQRRAGGYSRKYASKAKNLADDMVRNTARDLLYYAVTQDAMLIFENLSRGFGRQGKRTFMAERQYTRMEDWLTAKLAYEGLPSKTYLSKTLAQYTSKTCSNCGFTITSADYDRVLEKLKKTATGWMTTINGKELKVEGQITYYNRYKRQNVVKDLSVELDRLSEESVNNDISSWTKGRSGEALSLLKKRFSHRPVQEKFVCLNCGFETHADEQAALNIARSWLFLRSQEYKKYQTNKTTGNTDKRAFVETWQSFYRKKLKEVWKPAV

SEQ ID NO: 34475 - protein, 978 aa, synthetic construct
  REGION 1..978: note = engineered CasX variant
QEIKRINKIRRRLVKDSNTKKAGKTGPMKTLLVRVMTPDLRERLENLRKKPENIPQPISNTSRANLNKLLTDYTEMKKAILHVYDEEFQKDPVGLMSRVAQPASKKIDQNKLKPEMDEKGNLTTAGFACSQCGQPLFVYKLEQVSEKGKAYTNYFGRCNVAEHEKLILLAQLKPEKDSDEAVTYSLGKFGQRALDFYSIHVTKESTHPVKPLAQIAGNRYASAPVGKALSDACMGTIASFLSKYQDIIIEHQKVVKGNQKRLESLRELAGKENLEYPSVTLPPQPHTKEGVDAYNEVIARVRMWVNLNLWQKLKLSRDDAKPLLRLKGFPSFPLVERQANEVDWWDMVCNVKKLINEKKEDGKVFWQNLAGYKRQEALRPYLSSEEDRKKGKKFARYQLGDLLLHLEKKHGEDWGKVYDEAWERIDKKVEGLSKHIKLEEERRSEDAQSKAALTDWLRAKASFVIEGLKEADKDEFCRCELKLQKWYGDLRGKPFAIEAENSILDISGFSKQYNCAFIWQKDGVKKLNLYLIINYFKGGKLRFKKIKPEAFEANRFYTVINKKSGEIVPMEVNFNFDDPNLIILPLAFGKRQGREFIWNDLLSLETGSLKLANGRVIEKTLYNRRTRQDEPALFVALTFERREVLDSSNIKPMNLIGVDRGENIPAVIALTDPEGCPLSRFKDSLGNPTHILRIRESYKEKQRTIQAKKEVEQRRAGGYSRKYASKAKNLADDMVRNTARDLLYYAVTQDAMLIFENLSRGFGRQGKRTFMAERQYTRMEDWLTAKLAYEGLPSKTYLSKTLAQYTSKTCSNCGFTITSADYDRVLEKLKKTATGWMTTINGKELKVEGQITYYNRYKRQNVVKDLSVELDRLSEESVNNDISSWTKGRSGEALSLLKKRFSHRPVQEKFVCLNCGFETHADEQAALNIARSWLFLRSQEYKKYQTNKTTGNTDKRAFVETWQSFYRKKLKEVWKPAV

SEQ ID NO: 34476 - protein, 978 aa, synthetic construct
  REGION 1..978: note = engineered CasX variant
QEIKRINKIRRRLVKDSNTKKAGKTGPMKTLLVRVMTPDLRERLENLRKKPENIPQPISNTSRANLNKLLTDYTEMKKAILHVYDEEFQKDPVGLMSRVAQPASKKIDQNKLKPEMDEKGNLTTAGFACSQCGQPLFVYKLEQVSEKGKAYTNYFGRCNVAEHEKLILLAQLKPEKDSDEAVTYSLGKFGQRALDFYSIHVTKESTHPVKPLAQIAGNRYASVPVGKALSDACMGTIASFLSKYQDIIIEHQKVVKGNQKRLESLRELAGKENLEYPSVTLPPQPHTKEGVDAYNEVIARVRMWVNLNLWQKLKLSRDDAKPLLRLKGFPSFPLVERQANEVDWWDMVCNVKKLINEKKEDGKVFWQNLAGYKRQEALRPYLSSEEDRKKGKKFARYQLGDLLLHLEKKHGEDWGKVYDEAWERIDKKVEGLSKHIKLEEERRSEDAQSKAALTDWLRAKASFVIEGLKEADKDEFCRCELKLQKWYGDLRGKPFAIEAENSILDISGFSKQYNCAFIWQKDGVKKLNLYLIINYFKGGKLRFKKIKPEAFEANRFYTVINKKSGEIVPMEVNFNFDDPNLIILPLAFGKRQGREFIWNDLLSLETGSLKLANGRVIEKTLYNRRTRQDEPALFVALTFERREVLDSSNIKPMNLIGVDRGENIPAVIALTDPEGCPLSRFKDSLGNPTHILRIRESYKEKQRTIQAKKEVEQRRAGGYSRKYASKAKNLADDMVRNTARDLLYYAVTQDAMLIFENLSRGFGRQGKRTFMAERQYTRMEDWLTAKLAYEGLPSKTYLSKTLAQYTSKTCSNCGFTITSADYDRVLEKLKKTATGWMTTINGKELKVEGQITYYNRYKRQNVVKDLSVELDRLSEESVNNDISSWTKGRSGEALSLLKKRFSHRPVQEKFVCLNCGFETHADEQAALNIARSWLFLRSQEYKKYQTNKTTGNTDKRAFVETWQSFYRKKLKEVWKPAV

SEQ ID NO: 34477 - protein, 978 aa, synthetic construct
  REGION 1..978: note = engineered CasX variant
QEIKRINKIRRRLVKDSNTKKAGKTGPMKTLLVRVMTPDLRERLENLRKKPENIPQPISNTSRANLNKLLTDYTEMKKAILHVYDEEFQKDPVGLMSRVAQPASKKIDQNKLKPEMDEKGNLTTAGFACSQCGQPLFVYKLEQVSEKGKAYTNYFGRCNVAEHEKLIKLAQLKPEKDSDEAVTYSLGKFGQRALDFYSIHVTKESTHPVKPLAQIAGNRYASGPVGKALSDACMGTIASFLSKYQDIIIEHQKVVKGNQKRLESLRELAGKENLEYPSVTLPPQPHTKEGVDAYNEVIARVRMWVNLNLWQKLKLSRDDAKPLLRLKGFPSFPLVERQANEVDWWDMVCNVKKLINEKKEDGKVFWQNLAGYKRQEALRPYLSSEEDRKKGKKFARYQLGDLLLHLEKKHGEDWGKVYDEAWERIDKKVEGLSKHIKLEEERRSEDAQSKAALTDWLRAKASFVIEGLKEADKDEFCRCELKLQKWYGDLRGKPFAIEAENSILDISGFSKQYNCAFIWQKDGVKKLNLYLIINYFKGGKLRFKKIKPEAFEANRFYTVINKKSGEIVPMEVNFNFDDPNLIILPLAFGKRQGREFIWNDLLSLETGSLKLANGRVIEKTLYNRRTRQDEPALFVALTFERREVLDSSNIKPMNLIGVDRGENIPAVIALTDPEGCPLSRFKDSLGNPTHILRIRESYKEKQRTIQAKKEVEQRRAGGYSRKYASKAKNLADDMVRNTARDLLYYAVTQDAMLIFENLSRGFGRQGKRTFMAERQYTRMEDWLTAKLAYEGLPSKTYLSKTLAQYTSKTCSNCGFTITSADYDRVLEKLKKTATGWMTTINGKELKVEGQITYYNRYKRQNVVKDLSVELDRLSEESVNNDISSWTKGRSGEALSLLKKRFSHRPVQEKFVCLNCGFETHADEQAALNIARSWLFLRSQEYKKYQTNKTTGNTDKRAFVETWQSFYRKKLKEVWKPAV

SEQ ID NO: 34478 - protein, 977 aa, synthetic construct
  REGION 1..977: note = engineered CasX variant
QEIKRINKIRRRLVKDSNTKKAGKTGPMKTLLVRVMTPDLRERLENLRKKPENIPQPISNTSRANLNKLLTDYTEMKKAILHVYDEEFQKDPVGLMSRVAQPASKKIDQNKLKPEMDEKGNLTTAGFACSQCGQPLFVYKLEQVSEKGKAYTNYFGRCNVAEHEKLILLAQLKPEKDSDEAVTYSLGKFGQRALDFYSIHVTKESTHPVKPLAQIAGNRYASPVGKALSDACMGTIASFLSKYQDIIIEHQKVVKGNQKRLESLRELAGKENLEYPSVTLPPQPHTKEGVDAYNEVIARVRMWVNLNLWQKLKLSRDDAKPLLRLKGFPSFPLVERQANEVDWWDMVCNVKKLINEKKEDGKVFWQNLAGYKRQEALRPYLSSEEDRKKGKKFARYQLGDLLLHLEKKHGEDWGKVYDEAWERIDKKVEGLSKHIKLEEERRSEDAQSKAALTDWLRAKASFVIEGLKEADKDEFCRCELKLQKWYGDLRGKPFAIEAENSILDISGFSKQYNCAFIWQKDGVKKLNLYLIINYFKGGKLRFKKIKPEAFEANRFYTVINKKSGEIVPMEVNFNFDDPNLIILPLAFGKRQGREFIWNDLLSLETGSLKLANGRVIEKTLYNRRTRQDEPALFVALTFERREVLDSSNIKPMNLIGVDRGENIPAVIALTDPEGCPLSRFKDSLGNPTHILRIRESYKEKQRTIQAKKEVEQRRAGGYSRKYASKAKNLADDMVRNTARDLLYYAVTQDAMLIFENLSRGFGRQGKRTFMAERQYTRMEDWLTAKLAYEGLPSKTYLSKTLAQYTSKTCSNCGFTITSADYDRVLEKLKKTATGWMTTINGKELKVEGQITYYNRYKRQNVVKDLSVELDRLSEESVNNDISSWTKGRSGEALSLLKKRFSHRPVQEKFVCLNCGFETHADEQAALNIARSWLFLRSQEYKKYQTNKTTGNTDKRAFVETWQSFYRKKLKEVWKPAV

SEQ ID NO: 34479 - protein, 978 aa, synthetic construct
  REGION 1..978: note = engineered CasX variant
QEIKRINKIRRRLVKDSNTKKAGKTGPMKTLLVRVMTPDLRERLENLRKKPENIPQPISNTSRANLNKLLTDYTEMKKAILHVYDEEFQKDPVGLMSRVAQPASKKIDQNKLKPEMDEKGNLTTAGFACSQCGQPLFVYKLEQVSEKGKAYTNYFGRCNVAEHEKLILLAQLKPEKDSDEAVTYSLGKFGQRALDFYSIHVTKESTHPVKPLAQIAGNRYASYPVGKALSDACMGTIASFLSKYQDIIIEHQKVVKGNQKRLESLRELAGKENLEYPSVTLPPQPHTKEGVDAYNEVIARVRMWVNLNLWQKLKLSRDDAKPLLRLKGFPSFPLVERQANEVDWWDMVCNVKKLINEKKEDGKVFWQNLAGYKRQEALRPYLSSEEDRKKGKKFARYQLGDLLLHLEKKHGEDWGKVYDEAWERIDKKVEGLSKHIKLEEERRSEDAQSKAALTDWLRAKASFVIEGLKEADKDEFCRCELKLQKWYGDLRGKPFAIEAENSILDISGFSKQYNCAFIWQKDGVKKLNLYLIINYFKGGKLRFKKIKPEAFEANRFYTVINKKSGEIVPMEVNFNFDDPNLIILPLAFGKRQGREFIWNDLLSLETGSLKLANGRVIEKTLYNRRTRQDEPALFVALTFERREVLDSSNIKPMNLIGVDRGENIPAVIALTDPEGCPLSRFKDSLGNPTHILRIGESYKEKQRTIQAKKEVEQRRAGGYSRKYASKAKNLADDMVRNTARDLLYYAVTQDAMLIFENLSRGFGRQGKRTFSAERQYTRMEDWLTAKLAYEGLPSKTYLSKTLAQYTSKTCSNCGFTITSADYDRVLEKLKKTATGWMTTINGKELKVEGQITYYNRYKRQNVVKDLSVELDRLSEESVNNDISSWTKGRSGEALSLLKKRFSHRPVQEKFVCLNCGFETHADEQAALNIARSWLFLRSQEYKKYQTNKTTGNTDKRAFVETWQSFYRKKLKEVWKPAV

SEQ ID NO: 34480 - protein, 978 aa, synthetic construct
  REGION 1..978: note = engineered CasX variant
QEIKRINKIRRRLVKDSNTKKAGKTGPMKTLLVRVMTPDLRERLENLRKKPENIPQPISNTSRANLNKLLTDYTEMKKAILHVYDEEFQKDPVGLMSRVAQPASKKIDQNKLKPEMDEKGNLTTAGFACSQCGQPLFVYKLEQVSEKGKAYTNYFGRCNVAEHEKLILLAQLKPEKDSDEAVTYSLGKFGQRALDFYSIHVTKESTHPVKPLAQIAGNRYASHPVGKALSDACMGTIASFLSKYQDIIIEHQKVVKGNQKRLESLRELAGKENLEYPSVTLPPQPHTKEGVDAYNEVIARVRMWVNLNLWQKLKLSRDDAKPLLRLKGFPSFPLVERQANEVDWWDMVCNVKKLINEKKEDGKVFWQNLAGYKRQEALRPYLSSEEDRKKGKKFARYQLGDLLLHLEKKHGEDWGKVYDEAWERIDKKVEGLSKHIKLEEERRSEDAQSKAALTDWLRAKASFVIEGLKEADKDEFCRCELKLQKWYGDLRGKPFAIEAENSILDISGFSKQYNCAFIWQKDGVKKLNLYLIINYFKGGKLRFKKIKPEAFEANRFYTVINKKSGEIVPMEVNFNFDDPNLIILPLAFGKRQGREFIWNDLLSLETGSLKLANGRVIEKTLYNRRTRQDEPALFVALTFERREVLDSSNIKPMNLIGVDRGENIPAVIALTDPEGCPLSRFKDSLGNPTHILRIGESYKEKQRTIQAKKEVEQRRAGGYSRKYASKAKNLADDMVRNTARDLLYYAVTQDAMLIFENLSRGFGRQGKRTFSAERQYTRMEDWLTAKLAYEGLPSKTYLSKTLAQYTSKTCSNCGFTITSADYDRVLEKLKKTATGWMTTINGKELKVEGQITYYNRYKRQNVVKDLSVELDRLSEESVNNDISSWTKGRSGEALSLLKKRFSHRPVQEKFVCLNCGFETHADEQAALNIARSWLFLRSQEYKKYQTNKTTGNTDKRAFVETWQSFYRKKLKEVWKPAV

SEQ ID NO: 34481 - protein, 978 aa, synthetic construct
  REGION 1..978: note = engineered CasX variant
QEIKRINKIRRRLVKDSNTKKAGKTGPMKTLLVRVMTPDLRERLENLRKKPENIPQPISNTSRANLNKLLTDYTEMKKAILHVYDEEFQKDPVGLMSRVAQPASKKIDQNKLKPEMDEKGNLTTAGFACSQCGQPLFVYKLEQVSEKGKAYTNYFGRCNVAEHEKLILLAQLKPEKDSDEAVTYSLGKFGQRALDFYSIHVTKESTHPVKPLAQIAGNRYASSPVGKALSDACMGTIASFLSKYQDIIIEHQKVVKGNQKRLESLRELAGKENLEYPSVTLPPQPHTKEGVDAYNEVIARVRMWVNLNLWQKLKLSRDDAKPLLRLKGFPSFPLVERQANEVDWWDMVCNVKKLINEKKEDGKVFWQNLAGYKRQEALRPYLSSEEDRKKGKKFARYQLGDLLLHLEKKHGEDWGKVYDEAWERIDKKVEGLSKHIKLEEERRSEDAQSKAALTDWLRAKASFVIEGLKEADKDEFCRCELKLQKWYGDLRGKPFAIEAENSILDISGFSKQYNCAFIWQKDGVKKLNLYLIINYFKGGKLRFKKIKPEAFEANRFYTVINKKSGEIVPMEVNFNFDDPNLIILPLAFGKRQGREFIWNDLLSLETGSLKLANGRVIEKTLYNRRTRQDEPALFVALTFERREVLDSSNIKPMNLIGVDRGENIPAVIALTDPEGCPLSRFKDSLGNPTHILRIGESYKEKQRTIQAKKEVEQRRAGGYSRKYASKAKNLADDMVRNTARDLLYYAVTQDAMLIFENLSRGFGRQGKRTFSAERQYTRMEDWLTAKLAYEGLPSKTYLSKTLAQYTSKTCSNCGFTITSADYDRVLEKLKKTATGWMTTINGKELKVEGQITYYNRYKRQNVVKDLSVELDRLSEESVNNDISSWTKGRSGEALSLLKKRFSHRPVQEKFVCLNCGFETHADEQAALNIARSWLFLRSQEYKKYQTNKTTGNTDKRAFVETWQSFYRKKLKEVWKPAV

SEQ ID NO: 34482 - protein, 978 aa, synthetic construct
  REGION 1..978: note = engineered CasX variant
QEIKRINKIRRRLVKDSNTKKAGKTGPMKTLLVRVMTPDLRERLENLRKKPENIPQPISNTSRANLNKLLTDYTEMKKAILHVYDEEFQKDPVGLMSRVAQPASKKIDQNKLKPEMDEKGNLTTAGFACSQCGQPLFVYKLEQVSEKGKAYTNYFGRCNVAEHEKLILLAQLKPEKDSDEAVTYSLGKFGQRALDFYSIHVTKESTHPVKPLAQIAGNRYASTPVGKALSDACMGTIASFLSKYQDIIIEHQKVVKGNQKRLESLRELAGKENLEYPSVTLPPQPHTKEGVDAYNEVIARVRMWVNLNLWQKLKLSRDDAKPLLRLKGFPSFPLVERQANEVDWWDMVCNVKKLINEKKEDGKVFWQNLAGYKRQEALRPYLSSEEDRKKGKKFARYQLGDLLLHLEKKHGEDWGKVYDEAWERIDKKVEGLSKHIKLEEERRSEDAQSKAALTDWLRAKASFVIEGLKEADKDEFCRCELKLQKWYGDLRGKPFAIEAENSILDISGFSKQYNCAFIWQKDGVKKLNLYLIINYFKGGKLRFKKIKPEAFEANRFYTVINKKSGEIVPMEVNFNFDDPNLIILPLAFGKRQGREFIWNDLLSLETGSLKLANGRVIEKTLYNRRTRQDEPALFVALTFERREVLDSSNIKPMNLIGVDRGENIPAVIALTDPEGCPLSRFKDSLGNPTHILRIGESYKEKQRTIQAKKEVEQRRAGGYSRKYASKAKNLADDMVRNTARDLLYYAVTQDAMLIFENLSRGFGRQGKRTFSAERQYTRMEDWLTAKLAYEGLPSKTYLSKTLAQYTSKTCSNCGFTITSADYDRVLEKLKKTATGWMTTINGKELKVEGQITYYNRYKRQNVVKDLSVELDRLSEESVNNDISSWTKGRSGEALSLLKKRFSHRPVQEKFVCLNCGFETHADEQAALNIARSWLFLRSQEYKKYQTNKTTGNTDKRAFVETWQSFYRKKLKEVWKPAV

SEQ ID NO: 34483 - protein, 978 aa, synthetic construct
  REGION 1..978: note = engineered CasX variant
QEIKRINKIRRRLVKDSNTKKAGKTGPMKTLLVRVMTPDLRERLENLRKKPENIPQPISNTSRANLNKLLTDYTEMKKAILHVYDEEFQKDPVGLMSRVAQPASKKIDQNKLKPEMDEKGNLTTAGFACSQCGQPLFVYKLEQVSEKGKAYTNYFGRCNVAEHEKLILLAQLKPEKDSDEAVTYSLGKFGQRALDFYSIHVTKESTHPVKPLAQIAGNRYASAPVGKALSDACMGTIASFLSKYQDIIIEHQKVVKGNQKRLESLRELAGKENLEYPSVTLPPQPHTKEGVDAYNEVIARVRMWVNLNLWQKLKLSRDDAKPLLRLKGFPSFPLVERQANEVDWWDMVCNVKKLINEKKEDGKVFWQNLAGYKRQEALRPYLSSEEDRKKGKKFARYQLGDLLLHLEKKHGEDWGKVYDEAWERIDKKVEGLSKHIKLEEERRSEDAQSKAALTDWLRAKASFVIEGLKEADKDEFCRCELKLQKWYGDLRGKPFAIEAENSILDISGFSKQYNCAFIWQKDGVKKLNLYLIINYFKGGKLRFKKIKPEAFEANRFYTVINKKSGEIVPMEVNFNFDDPNLIILPLAFGKRQGREFIWNDLLSLETGSLKLANGRVIEKTLYNRRTRQDEPALFVALTFERREVLDSSNIKPMNLIGVDRGENIPAVIALTDPEGCPLSRFKDSLGNPTHILRIGESYKEKQRTIQAKKEVEQRRAGGYSRKYASKAKNLADDMVRNTARDLLYYAVTQDAMLIFENLSRGFGRQGKRTFSAERQYTRMEDWLTAKLAYEGLPSKTYLSKTLAQYTSKTCSNCGFTITSADYDRVLEKLKKTATGWMTTINGKELKVEGQITYYNRYKRQNVVKDLSVELDRLSEESVNNDISSWTKGRSGEALSLLKKRFSHRPVQEKFVCLNCGFETHADEQAALNIARSWLFLRSQEYKKYQTNKTTGNTDKRAFVETWQSFYRKKLKEVWKPAV

SEQ ID NO: 34484 - protein, 978 aa, synthetic construct
  REGION 1..978: note = engineered CasX variant
QEIKRINKIRRRLVKDSNTKKAGKTGPMKTLLVRVMTPDLRERLENLRKKPENIPQPISNTSRANLNKLLTDYTEMKKAILHVYDEEFQKDPVGLMSRVAQPASKKIDQNKLKPEMDEKGNLTTAGFACSQCGQPLFVYKLEQVSEKGKAYTNYFGRCNVAEHEKLILLAQLKPEKDSDEAVTYSLGKFGQRALDFYSIHVTKESTHPVKPLAQIAGNRYASVPVGKALSDACMGTIASFLSKYQDIIIEHQKVVKGNQKRLESLRELAGKENLEYPSVTLPPQPHTKEGVDAYNEVIARVRMWVNLNLWQKLKLSRDDAKPLLRLKGFPSFPLVERQANEVDWWDMVCNVKKLINEKKEDGKVFWQNLAGYKRQEALRPYLSSEEDRKKGKKFARYQLGDLLLHLEKKHGEDWGKVYDEAWERIDKKVEGLSKHIKLEEERRSEDAQSKAALTDWLRAKASFVIEGLKEADKDEFCRCELKLQKWYGDLRGKPFAIEAENSILDISGFSKQYNCAFIWQKDGVKKLNLYLIINYFKGGKLRFKKIKPEAFEANRFYTVINKKSGEIVPMEVNFNFDDPNLIILPLAFGKRQGREFIWNDLLSLETGSLKLANGRVIEKTLYNRRTRQDEPALFVALTFERREVLDSSNIKPMNLIGVDRGENIPAVIALTDPEGCPLSRFKDSLGNPTHILRIGESYKEKQRTIQAKKEVEQRRAGGYSRKYASKAKNLADDMVRNTARDLLYYAVTQDAMLIFENLSRGFGRQGKRTFSAERQYTRMEDWLTAKLAYEGLPSKTYLSKTLAQYTSKTCSNCGFTITSADYDRVLEKLKKTATGWMTTINGKELKVEGQITYYNRYKRQNVVKDLSVELDRLSEESVNNDISSWTKGRSGEALSLLKKRFSHRPVQEKFVCLNCGFETHADEQAALNIARSWLFLRSQEYKKYQTNKTTGNTDKRAFVETWQSFYRKKLKEVWKPAV

SEQ ID NO: 34485 - protein, 978 aa, synthetic construct
  REGION 1..978: note = engineered CasX variant
QEIKRINKIRRRLVKDSNTKKAGKTGPMKTLLVRVMTPDLRERLENLRKKPENIPQPISNTSRANLNKLLTDYTEMKKAILHVYDEEFQKDPVGLMSRVAQPASKKIDQNKLKPEMDEKGNLTTAGFACSQCGQPLFVYKLEQVSEKGKAYTNYFGRCNVAEHEKLIKLAQLKPEKDSDEAVTYSLGKFGQRALDFYSIHVTKESTHPVKPLAQIAGNRYASGPVGKALSDACMGTIASFLSKYQDIIIEHQKVVKGNQKRLESLRELAGKENLEYPSVTLPPQPHTKEGVDAYNEVIARVRMWVNLNLWQKLKLSRDDAKPLLRLKGFPSFPLVERQANEVDWWDMVCNVKKLINEKKEDGKVFWQNLAGYKRQEALRPYLSSEEDRKKGKKFARYQLGDLLLHLEKKHGEDWGKVYDEAWERIDKKVEGLSKHIKLEEERRSEDAQSKAALTDWLRAKASFVIEGLKEADKDEFCRCELKLQKWYGDLRGKPFAIEAENSILDISGFSKQYNCAFIWQKDGVKKLNLYLIINYFKGGKLRFKKIKPEAFEANRFYTVINKKSGEIVPMEVNFNFDDPNLIILPLAFGKRQGREFIWNDLLSLETGSLKLANGRVIEKTLYNRRTRQDEPALFVALTFERREVLDSSNIKPMNLIGVDRGENIPAVIALTDPEGCPLSRFKDSLGNPTHILRIGESYKEKQRTIQAKKEVEQRRAGGYSRKYASKAKNLADDMVRNTARDLLYYAVTQDAMLIFENLSRGFGRQGKRTFSAERQYTRMEDWLTAKLAYEGLPSKTYLSKTLAQYTSKTCSNCGFTITSADYDRVLEKLKKTATGWMTTINGKELKVEGQITYYNRYKRQNVVKDLSVELDRLSEESVNNDISSWTKGRSGEALSLLKKRFSHRPVQEKFVCLNCGFETHADEQAALNIARSWLFLRSQEYKKYQTNKTTGNTDKRAFVETWQSFYRKKLKEVWKPAV

SEQ ID NO: 34486 - protein, 977 aa, synthetic construct
  REGION 1..977: note = engineered CasX variant
QEIKRINKIRRRLVKDSNTKKAGKTGPMKTLLVRVMTPDLRERLENLRKKPENIPQPISNTSRANLNKLLTDYTEMKKAILHVYDEEFQKDPVGLMSRVAQPASKKIDQNKLKPEMDEKGNLTTAGFACSQCGQPLFVYKLEQVSEKGKAYTNYFGRCNVAEHEKLILLAQLKPEKDSDEAVTYSLGKFGQRALDFYSIHVTKESTHPVKPLAQIAGNRYASPVGKALSDACMGTIASFLSKYQDIIIEHQKVVKGNQKRLESLRELAGKENLEYPSVTLPPQPHTKEGVDAYNEVIARVRMWVNLNLWQKLKLSRDDAKPLLRLKGFPSFPLVERQANEVDWWDMVCNVKKLINEKKEDGKVFWQNLAGYKRQEALRPYLSSEEDRKKGKKFARYQLGDLLLHLEKKHGEDWGKVYDEAWERIDKKVEGLSKHIKLEEERRSEDAQSKAALTDWLRAKASFVIEGLKEADKDEFCRCELKLQKWYGDLRGKPFAIEAENSILDISGFSKQYNCAFIWQKDGVKKLNLYLIINYFKGGKLRFKKIKPEAFEANRFYTVINKKSGEIVPMEVNFNFDDPNLIILPLAFGKRQGREFIWNDLLSLETGSLKLANGRVIEKTLYNRRTRQDEPALFVALTFERREVLDSSNIKPMNLIGVDRGENIPAVIALTDPEGCPLSRFKDSLGNPTHILRIGESYKEKQRTIQAKKEVEQRRAGGYSRKYASKAKNLADDMVRNTARDLLYYAVTQDAMLIFENLSRGFGRQGKRTFSAERQYTRMEDWLTAKLAYEGLPSKTYLSKTLAQYTSKTCSNCGFTITSADYDRVLEKLKKTATGWMTTINGKELKVEGQITYYNRYKRQNVVKDLSVELDRLSEESVNNDISSWTKGRSGEALSLLKKRFSHRPVQEKFVCLNCGFETHADEQAALNIARSWLFLRSQEYKKYQTNKTTGNTDKRAFVETWQSFYRKKLKEVWKPAV

SEQ ID NO: 34487 - protein, 978 aa, synthetic construct
  REGION 1..978: note = engineered CasX variant
QEIKRINKIRRRLVKDSNTKKAGKTGPMKTLLVRVMTPDLRERLENLRKKPENIPQPISNTSRANLNKLLTDYTEMKKAILHVYDEEFQKDPVGLMSRVAQPASKKIDQNKLKPEMDEKGNLTTAGFACSQCGQPLFVYKLEQVSEKGKAYTNYFGRCNVAEHEKLILLAQLKPEKDSDEAVTYSLGKFGQRALDFYSIHVTKESTHPVKPLAQIAGNRYASYPVGKALSDACMGTIASFLSKYQDIIIEHQKVVKGNQKRLESLRELAGKENLEYPSVTLPPQPHTKEGVDAYNEVIARVRMWVNLNLWQKLKLSRDDAKPLLRLKGFPSFPLVERQANEVDWWDMVCNVKKLINEKKEDGKVFWQNLAGYKRQEALRPYLSSEEDRKKGKKFARYQLGDLLLHLEKKHGEDWGKVYDEAWERIDKKVEGLSKHIKLEEERRSEDAQSKAALTDWLRAKASFVIEGLKEADKDEFCRCELKLQKWYGDLRGKPFAIEAENSILDISGFSKQYNCAFIWQKDGVKKLNLYLIINYFKGGKLRFKKIKPEAFEANRFYTVINKKSGEIVPMEVNFNFDDPNLIILPLAFGKRQGREFIWNDLLSLETGSLKLANGRVIEKTLYNRRTRQDEPALFVALTFERREVLDSSNIKPMNLIGVDRGENIPAVIALTDPEGCPLSRFKDSLGNPTHILRIGESYKEKQRTIQAKKEVEQRRAGGYSRKYASKAKNLADDMVRNTARDLLYYAVTQDAMLIFENLSRGFGRQGKRTFMAERQYTRMEDWLTAKLAYEGLPSKTYLSKTLAQYTSKTCSNCGFTITSADYDRVLEKLKKTATGWMTTINGKELKVEGQITYYNRYKRQNVVKDLSVELDRLSEESVNNDISSWDKGRSGEALSLLKKRFSHRPVQEKFVCLNCGFETHADEQAALNIARSWLFLRSQEYKKYQTNKTTGNTDKRAFVETWQSFYRKKLKEVWKPAV

SEQ ID NO: 34488 - protein, 978 aa, synthetic construct
  REGION 1..978: note = engineered CasX variant
QEIKRINKIRRRLVKDSNTKKAGKTGPMKTLLVRVMTPDLRERLENLRKKPENIPQPISNTSRANLNKLLTDYTEMKKAILHVYDEEFQKDPVGLMSRVAQPASKKIDQNKLKPEMDEKGNLTTAGFACSQCGQPLFVYKLEQVSEKGKAYTNYFGRCNVAEHEKLILLAQLKPEKDSDEAVTYSLGKFGQRALDFYSIHVTKESTHPVKPLAQIAGNRYASHPVGKALSDACMGTIASFLSKYQDIIIEHQKVVKGNQKRLESLRELAGKENLEYPSVTLPPQPHTKEGVDAYNEVIARVRMWVNLNLWQKLKLSRDDAKPLLRLKGFPSFPLVERQANEVDWWDMVCNVKKLINEKKEDGKVFWQNLAGYKRQEALRPYLSSEEDRKKGKKFARYQLGDLLLHLEKKHGEDWGKVYDEAWERIDKKVEGLSKHIKLEEERRSEDAQSKAALTDWLRAKASFVIEGLKEADKDEFCRCELKLQKWYGDLRGKPFAIEAENSILDISGFSKQYNCAFIWQKDGVKKLNLYLIINYFKGGKLRFKKIKPEAFEANRFYTVINKKSGEIVPMEVNFNFDDPNLIILPLAFGKRQGREFIWNDLLSLETGSLKLANGRVIEKTLYNRRTRQDEPALFVALTFERREVLDSSNIKPMNLIGVDRGENIPAVIALTDPEGCPLSRFKDSLGNPTHILRIGESYKEKQRTIQAKKEVEQRRAGGYSRKYASKAKNLADDMVRNTARDLLYYAVTQDAMLIFENLSRGFGRQGKRTFMAERQYTRMEDWLTAKLAYEGLPSKTYLSKTLAQYTSKTCSNCGFTITSADYDRVLEKLKKTATGWMTTINGKELKVEGQITYYNRYKRQNVVKDLSVELDRLSEESVNNDISSWDKGRSGEALSLLKKRFSHRPVQEKFVCLNCGFETHADEQAALNIARSWLFLRSQEYKKYQTNKTTGNTDKRAFVETWQSFYRKKLKEVWKPAV

SEQ ID NO: 34489 - protein, 978 aa, synthetic construct
  REGION 1..978: note = engineered CasX variant
QEIKRINKIRRRLVKDSNTKKAGKTGPMKTLLVRVMTPDLRERLENLRKKPENIPQPISNTSRANLNKLLTDYTEMKKAILHVYDEEFQKDPVGLMSRVAQPASKKIDQNKLKPEMDEKGNLTTAGFACSQCGQPLFVYKLEQVSEKGKAYTNYFGRCNVAEHEKLILLAQLKPEKDSDEAVTYSLGKFGQRALDFYSIHVTKESTHPVKPLAQIAGNRYASSPVGKALSDACMGTIASFLSKYQDIIIEHQKVVKGNQKRLESLRELAGKENLEYPSVTLPPQPHTKEGVDAYNEVIARVRMWVNLNLWQKLKLSRDDAKPLLRLKGFPSFPLVERQANEVDWWDMVCNVKKLINEKKEDGKVFWQNLAGYKRQEALRPYLSSEEDRKKGKKFARYQLGDLLLHLEKKHGEDWGKVYDEAWERIDKKVEGLSKHIKLEEERRSEDAQSKAALTDWLRAKASFVIEGLKEADKDEFCRCELKLQKWYGDLRGKPFAIEAENSILDISGFSKQYNCAFIWQKDGVKKLNLYLIINYFKGGKLRFKKIKPEAFEANRFYTVINKKSGEIVPMEVNFNFDDPNLIILPLAFGKRQGREFIWNDLLSLETGSLKLANGRVIEKTLYNRRTRQDEPALFVALTFERREVLDSSNIKPMNLIGVDRGENIPAVIALTDPEGCPLSRFKDSLGNPTHILRIGESYKEKQRTIQAKKEVEQRRAGGYSRKYASKAKNLADDMVRNTARDLLYYAVTQDAMLIFENLSRGFGRQGKRTFMAERQYTRMEDWLTAKLAYEGLPSKTYLSKTLAQYTSKTCSNCGFTITSADYDRVLEKLKKTATGWMTTINGKELKVEGQITYYNRYKRQNVVKDLSVELDRLSEESVNNDISSWDKGRSGEALSLLKKRFSHRPVQEKFVCLNCGFETHADEQAALNIARSWLFLRSQEYKKYQTNKTTGNTDKRAFVETWQSFYRKKLKEVWKPAV

SEQ ID NO: 34490 - protein, 978 aa, synthetic construct
  REGION 1..978: note = engineered CasX variant
QEIKRINKIRRRLVKDSNTKKAGKTGPMKTLLVRVMTPDLRERLENLRKKPENIPQPISNTSRANLNKLLTDYTEMKKAILHVYDEEFQKDPVGLMSRVAQPASKKIDQNKLKPEMDEKGNLTTAGFACSQCGQPLFVYKLEQVSEKGKAYTNYFGRCNVAEHEKLILLAQLKPEKDSDEAVTYSLGKFGQRALDFYSIHVTKESTHPVKPLAQIAGNRYASTPVGKALSDACMGTIASFLSKYQDIIIEHQKVVKGNQKRLESLRELAGKENLEYPSVTLPPQPHTKEGVDAYNEVIARVRMWVNLNLWQKLKLSRDDAKPLLRLKGFPSFPLVERQANEVDWWDMVCNVKKLINEKKEDGKVFWQNLAGYKRQEALRPYLSSEEDRKKGKKFARYQLGDLLLHLEKKHGEDWGKVYDEAWERIDKKVEGLSKHIKLEEERRSEDAQSKAALTDWLRAKASFVIEGLKEADKDEFCRCELKLQKWYGDLRGKPFAIEAENSILDISGFSKQYNCAFIWQKDGVKKLNLYLIINYFKGGKLRFKKIKPEAFEANRFYTVINKKSGEIVPMEVNFNFDDPNLIILPLAFGKRQGREFIWNDLLSLETGSLKLANGRVIEKTLYNRRTRQDEPALFVALTFERREVLDSSNIKPMNLIGVDRGENIPAVIALTDPEGCPLSRFKDSLGNPTHILRIGESYKEKQRTIQAKKEVEQRRAGGYSRKYASKAKNLADDMVRNTARDLLYYAVTQDAMLIFENLSRGFGRQGKRTFMAERQYTRMEDWLTAKLAYEGLPSKTYLSKTLAQYTSKTCSNCGFTITSADYDRVLEKLKKTATGWMTTINGKELKVEGQITYYNRYKRQNVVKDLSVELDRLSEESVNNDISSWDKGRSGEALSLLKKRFSHRPVQEKFVCLNCGFETHADEQAALNIARSWLFLRSQEYKKYQTNKTTGNTDKRAFVETWQSFYRKKLKEVWKPAV

SEQ ID NO: 34491 - protein, 978 aa, synthetic construct
  REGION 1..978: note = engineered CasX variant
QEIKRINKIRRRLVKDSNTKKAGKTGPMKTLLVRVMTPDLRERLENLRKKPENIPQPISNTSRANLNKLLTDYTEMKKAILHVYDEEFQKDPVGLMSRVAQPASKKIDQNKLKPEMDEKGNLTTAGFACSQCGQPLFVYKLEQVSEKGKAYTNYFGRCNVAEHEKLILLAQLKPEKDSDEAVTYSLGKFGQRALDFYSIHVTKESTHPVKPLAQIAGNRYASAPVGKALSDACMGTIASFLSKYQDIIIEHQKVVKGNQKRLESLRELAGKENLEYPSVTLPPQPHTKEGVDAYNEVIARVRMWVNLNLWQKLKLSRDDAKPLLRLKGFPSFPLVERQANEVDWWDMVCNVKKLINEKKEDGKVFWQNLAGYKRQEALRPYLSSEEDRKKGKKFARYQLGDLLLHLEKKHGEDWGKVYDEAWERIDKKVEGLSKHIKLEEERRSEDAQSKAALTDWLRAKASFVIEGLKEADKDEFCRCELKLQKWYGDLRGKPFAIEAENSILDISGFSKQYNCAFIWQKDGVKKLNLYLIINYFKGGKLRFKKIKPEAFEANRFYTVINKKSGEIVPMEVNFNFDDPNLIILPLAFGKRQGREFIWNDLLSLETGSLKLANGRVIEKTLYNRRTRQDEPALFVALTFERREVLDSSNIKPMNLIGVDRGENIPAVIALTDPEGCPLSRFKDSLGNPTHILRIGESYKEKQRTIQAKKEVEQRRAGGYSRKYASKAKNLADDMVRNTARDLLYYAVTQDAMLIFENLSRGFGRQGKRTFMAERQYTRMEDWLTAKLAYEGLPSKTYLSKTLAQYTSKTCSNCGFTITSADYDRVLEKLKKTATGWMTTINGKELKVEGQITYYNRYKRQNVVKDLSVELDRLSEESVNNDISSWDKGRSGEALSLLKKRFSHRPVQEKFVCLNCGFETHADEQAALNIARSWLFLRSQEYKKYQTNKTTGNTDKRAFVETWQSFYRKKLKEVWKPAV

SEQ ID NO: 34492 - protein, 978 aa, synthetic construct
  REGION 1..978: note = engineered CasX variant
QEIKRINKIRRRLVKDSNTKKAGKTGPMKTLLVRVMTPDLRERLENLRKKPENIPQPISNTSRANLNKLLTDYTEMKKAILHVYDEEFQKDPVGLMSRVAQPASKKIDQNKLKPEMDEKGNLTTAGFACSQCGQPLFVYKLEQVSEKGKAYTNYFGRCNVAEHEKLILLAQLKPEKDSDEAVTYSLGKFGQRALDFYSIHVTKESTHPVKPLAQIAGNRYASVPVGKALSDACMGTIASFLSKYQDIIIEHQKVVKGNQKRLESLRELAGKENLEYPSVTLPPQPHTKEGVDAYNEVIARVRMWVNLNLWQKLKLSRDDAKPLLRLKGFPSFPLVERQANEVDWWDMVCNVKKLINEKKEDGKVFWQNLAGYKRQEALRPYLSSEEDRKKGKKFARYQLGDLLLHLEKKHGEDWGKVYDEAWERIDKKVEGLSKHIKLEEERRSEDAQSKAALTDWLRAKASFVIEGLKEADKDEFCRCELKLQKWYGDLRGKPFAIEAENSILDISGFSKQYNCAFIWQKDGVKKLNLYLIINYFKGGKLRFKKIKPEAFEANRFYTVINKKSGEIVPMEVNFNFDDPNLIILPLAFGKRQGREFIWNDLLSLETGSLKLANGRVIEKTLYNRRTRQDEPALFVALTFERREVLDSSNIKPMNLIGVDRGENIPAVIALTDPEGCPLSRFKDSLGNPTHILRIGESYKEKQRTIQAKKEVEQRRAGGYSRKYASKAKNLADDMVRNTARDLLYYAVTQDAMLIFENLSRGFGRQGKRTFMAERQYTRMEDWLTAKLAYEGLPSKTYLSKTLAQYTSKTCSNCGFTITSADYDRVLEKLKKTATGWMTTINGKELKVEGQITYYNRYKRQNVVKDLSVELDRLSEESVNNDISSWDKGRSGEALSLLKKRFSHRPVQEKFVCLNCGFETHADEQAALNIARSWLFLRSQEYKKYQTNKTTGNTDKRAFVETWQSFYRKKLKEVWKPAV

SEQ ID NO: 34493 - protein, 978 aa, synthetic construct
  REGION 1..978: note = engineered CasX variant
QEIKRINKIRRRLVKDSNTKKAGKTGPMKTLLVRVMTPDLRERLENLRKKPENIPQPISNTSRANLNKLLTDYTEMKKAILHVYDEEFQKDPVGLMSRVAQPASKKIDQNKLKPEMDEKGNLTTAGFACSQCGQPLFVYKLEQVSEKGKAYTNYFGRCNVAEHEKLIKLAQLKPEKDSDEAVTYSLGKFGQRALDFYSIHVTKESTHPVKPLAQIAGNRYASGPVGKALSDACMGTIASFLSKYQDIIIEHQKVVKGNQKRLESLRELAGKENLEYPSVTLPPQPHTKEGVDAYNEVIARVRMWVNLNLWQKLKLSRDDAKPLLRLKGFPSFPLVERQANEVDWWDMVCNVKKLINEKKEDGKVFWQNLAGYKRQEALRPYLSSEEDRKKGKKFARYQLGDLLLHLEKKHGEDWGKVYDEAWERIDKKVEGLSKHIKLEEERRSEDAQSKAALTDWLRAKASFVIEGLKEADKDEFCRCELKLQKWYGDLRGKPFAIEAENSILDISGFSKQYNCAFIWQKDGVKKLNLYLIINYFKGGKLRFKKIKPEAFEANRFYTVINKKSGEIVPMEVNFNFDDPNLIILPLAFGKRQGREFIWNDLLSLETGSLKLANGRVIEKTLYNRRTRQDEPALFVALTFERREVLDSSNIKPMNLIGVDRGENIPAVIALTDPEGCPLSRFKDSLGNPTHILRIGESYKEKQRTIQAKKEVEQRRAGGYSRKYASKAKNLADDMVRNTARDLLYYAVTQDAMLIFENLSRGFGRQGKRTFMAERQYTRMEDWLTAKLAYEGLPSKTYLSKTLAQYTSKTCSNCGFTITSADYDRVLEKLKKTATGWMTTINGKELKVEGQITYYNRYKRQNVVKDLSVELDRLSEESVNNDISSWDKGRSGEALSLLKKRFSHRPVQEKFVCLNCGFETHADEQAALNIARSWLFLRSQEYKKYQTNKTTGNTDKRAFVETWQSFYRKKLKEVWKPAV

SEQ ID NO: 34494 - protein, 977 aa, synthetic construct
  REGION 1..977: note = engineered CasX variant
QEIKRINKIRRRLVKDSNTKKAGKTGPMKTLLVRVMTPDLRERLENLRKKPENIPQPISNTSRANLNKLLTDYTEMKKAILHVYDEEFQKDPVGLMSRVAQPASKKIDQNKLKPEMDEKGNLTTAGFACSQCGQPLFVYKLEQVSEKGKAYTNYFGRCNVAEHEKLILLAQLKPEKDSDEAVTYSLGKFGQRALDFYSIHVTKESTHPVKPLAQIAGNRYASPVGKALSDACMGTIASFLSKYQDIIIEHQKVVKGNQKRLESLRELAGKENLEYPSVTLPPQPHTKEGVDAYNEVIARVRMWVNLNLWQKLKLSRDDAKPLLRLKGFPSFPLVERQANEVDWWDMVCNVKKLINEKKEDGKVFWQNLAGYKRQEALRPYLSSEEDRKKGKKFARYQLGDLLLHLEKKHGEDWGKVYDEAWERIDKKVEGLSKHIKLEEERRSEDAQSKAALTDWLRAKASFVIEGLKEADKDEFCRCELKLQKWYGDLRGKPFAIEAENSILDISGFSKQYNCAFIWQKDGVKKLNLYLIINYFKGGKLRFKKIKPEAFEANRFYTVINKKSGEIVPMEVNFNFDDPNLIILPLAFGKRQGREFIWNDLLSLETGSLKLANGRVIEKTLYNRRTRQDEPALFVALTFERREVLDSSNIKPMNLIGVDRGENIPAVIALTDPEGCPLSRFKDSLGNPTHILRIGESYKEKQRTIQAKKEVEQRRAGGYSRKYASKAKNLADDMVRNTARDLLYYAVTQDAMLIFENLSRGFGRQGKRTFMAERQYTRMEDWLTAKLAYEGLPSKTYLSKTLAQYTSKTCSNCGFTITSADYDRVLEKLKKTATGWMTTINGKELKVEGQITYYNRYKRQNVVKDLSVELDRLSEESVNNDISSWDKGRSGEALSLLKKRFSHRPVQEKFVCLNCGFETHADEQAALNIARSWLFLRSQEYKKYQTNKTTGNTDKRAFVETWQSFYRKKLKEVWKPAV

SEQ ID NO: 34495 - protein, 978 aa, synthetic construct
  REGION 1..978: note = engineered CasX variant
QEIKRINKIRRRLVKDSNTKKAGKTGPMKTLLVRVMTPDLRERLENLRKKPENIPQPISNTSRANLNKLLTDYTEMKKAILHVYDEEFQVDPVGLMSRVAQPASKKIDQNKLKPEMDEKGNLTTAGFACSQCGQPLFVYKLEQVSEKGKAYTNYFGRCNVAEHEKLILLAQLKPEKDSDEAVTYSLGKFGQRALDFYSIHVTKESTHPVKPLAQIAGNRYASYPVGKALSDACMGTIASFLSKYQDIIIEHQKVVKGNQKRLESLRELAGKENLEYPSVTLPPQPHTKEGVDAYNEVIARVRMWVNLNLWQKLKLSRDDAKPLLRLKGFPSFPLVERQANEVDWWDMVCNVKKLINEKKEDGKVFWQNLAGYKRQEALRPYLSSEEDRKKGKKFARYQLGDLLLHLEKKHGEDWGKVYDEAWERIDKKVEGLSKHIKLEEERRSEDAQSKAALTDWLRAKASFVIEGLKEADKDEFCRCELKLQKWYGDLRGKPFAIEAENSILDISGFSKQYNCAFIWQKDGVKKLNLYLIINYFKGGKLRFKKIKPEAFEANRFYTVINKKSGEIVPMEVNFNFDDPNLIILPLAFGKRQGREFIWNDLLSLETGSLKLANGRVIEKTLYNRRTRQDEPALFVALTFERREVLDSSNIKPMNLIGVDRGENIPAVIALTDPEGCPLSRFKDSLGNPTHILRIGESYKEKQRTIQAKKEVEQRRAGGYSRKYASKAKNLADDMVRNTARDLLYYAVTQDAMLIFENLSRGFGRQGKRTFMAERQYTRMEDWLTAKLAYEGLPSKTYLSKTLAQYTSKTCSNCGFTITSADYDRVLEKLKKTATGWMTTINGKELKVEGQITYYNRYKRQNVVKDLSVELDRLSEESVNNDISSWTKGRSGEALSLLKKRFSHRPVQEKFVCLNCGFETHADEQAALNIARSWLFLRSQEYKKYQTNKTTGNTDKRAFVETWQSFYRKKLKEVWKPAV

SEQ ID NO: 34496 - protein, 978 aa, synthetic construct
  REGION 1..978: note = engineered CasX variant
QEIKRINKIRRRLVKDSNTKKAGKTGPMKTLLVRVMTPDLRERLENLRKKPENIPQPISNTSRANLNKLLTDYTEMKKAILHVYDEEFQVDPVGLMSRVAQPASKKIDQNKLKPEMDEKGNLTTAGFACSQCGQPLFVYKLEQVSEKGKAYTNYFGRCNVAEHEKLILLAQLKPEKDSDEAVTYSLGKFGQRALDFYSIHVTKESTHPVKPLAQIAGNRYASHPVGKALSDACMGTIASFLSKYQDIIIEHQKVVKGNQKRLESLRELAGKENLEYPSVTLPPQPHTKEGVDAYNEVIARVRMWVNLNLWQKLKLSRDDAKPLLRLKGFPSFPLVERQANEVDWWDMVCNVKKLINEKKEDGKVFWQNLAGYKRQEALRPYLSSEEDRKKGKKFARYQLGDLLLHLEKKHGEDWGKVYDEAWERIDKKVEGLSKHIKLEEERRSEDAQSKAALTDWLRAKASFVIEGLKEADKDEFCRCELKLQKWYGDLRGKPFAIEAENSILDISGFSKQYNCAFIWQKDGVKKLNLYLIINYFKGGKLRFKKIKPEAFEANRFYTVINKKSGEIVPMEVNFNFDDPNLIILPLAFGKRQGREFIWNDLLSLETGSLKLANGRVIEKTLYNRRTRQDEPALFVALTFERREVLDSSNIKPMNLIGVDRGENIPAVIALTDPEGCPLSRFKDSLGNPTHILRIGESYKEKQRTIQAKKEVEQRRAGGYSRKYASKAKNLADDMVRNTARDLLYYAVTQDAMLIFENLSRGFGRQGKRTFMAERQYTRMEDWLTAKLAYEGLPSKTYLSKTLAQYTSKTCSNCGFTITSADYDRVLEKLKKTATGWMTTINGKELKVEGQITYYNRYKRQNVVKDLSVELDRLSEESVNNDISSWTKGRSGEALSLLKKRFSHRPVQEKFVCLNCGFETHADEQAALNIARSWLFLRSQEYKKYQTNKTTGNTDKRAFVETWQSFYRKKLKEVWKPAV

SEQ ID NO: 34497 - protein, 978 aa, synthetic construct
  REGION 1..978: note = engineered CasX variant
QEIKRINKIRRRLVKDSNTKKAGKTGPMKTLLVRVMTPDLRERLENLRKKPENIPQPISNTSRANLNKLLTDYTEMKKAILHVYDEEFQVDPVGLMSRVAQPASKKIDQNKLKPEMDEKGNLTTAGFACSQCGQPLFVYKLEQVSEKGKAYTNYFGRCNVAEHEKLILLAQLKPEKDSDEAVTYSLGKFGQRALDFYSIHVTKESTHPVKPLAQIAGNRYASSPVGKALSDACMGTIASFLSKYQDIIIEHQKVVKGNQKRLESLRELAGKENLEYPSVTLPPQPHTKEGVDAYNEVIARVRMWVNLNLWQKLKLSRDDAKPLLRLKGFPSFPLVERQANEVDWWDMVCNVKKLINEKKEDGKVFWQNLAGYKRQEALRPYLSSEEDRKKGKKFARYQLGDLLLHLEKKHGEDWGKVYDEAWERIDKKVEGLSKHIKLEEERRSEDAQSKAALTDWLRAKASFVIEGLKEADKDEFCRCELKLQKWYGDLRGKPFAIEAENSILDISGFSKQYNCAFIWQKDGVKKLNLYLIINYFKGGKLRFKKIKPEAFEANRFYTVINKKSGEIVPMEVNFNFDDPNLIILPLAFGKRQGREFIWNDLLSLETGSLKLANGRVIEKTLYNRRTRQDEPALFVALTFERREVLDSSNIKPMNLIGVDRGENIPAVIALTDPEGCPLSRFKDSLGNPTHILRIGESYKEKQRTIQAKKEVEQRRAGGYSRKYASKAKNLADDMVRNTARDLLYYAVTQDAMLIFENLSRGFGRQGKRTFMAERQYTRMEDWLTAKLAYEGLPSKTYLSKTLAQYTSKTCSNCGFTITSADYDRVLEKLKKTATGWMTTINGKELKVEGQITYYNRYKRQNVVKDLSVELDRLSEESVNNDISSWTKGRSGEALSLLKKRFSHRPVQEKFVCLNCGFETHADEQAALNIARSWLFLRSQEYKKYQTNKTTGNTDKRAFVETWQSFYRKKLKEVWKPAV

SEQ ID NO: 34498 - protein, 978 aa, synthetic construct
  REGION 1..978: note = engineered CasX variant
QEIKRINKIRRRLVKDSNTKKAGKTGPMKTLLVRVMTPDLRERLENLRKKPENIPQPISNTSRANLNKLLTDYTEMKKAILHVYDEEFQVDPVGLMSRVAQPASKKIDQNKLKPEMDEKGNLTTAGFACSQCGQPLFVYKLEQVSEKGKAYTNYFGRCNVAEHEKLILLAQLKPEKDSDEAVTYSLGKFGQRALDFYSIHVTKESTHPVKPLAQIAGNRYASTPVGKALSDACMGTIASFLSKYQDIIIEHQKVVKGNQKRLESLRELAGKENLEYPSVTLPPQPHTKEGVDAYNEVIARVRMWVNLNLWQKLKLSRDDAKPLLRLKGFPSFPLVERQANEVDWWDMVCNVKKLINEKKEDGKVFWQNLAGYKRQEALRPYLSSEEDRKKGKKFARYQLGDLLLHLEKKHGEDWGKVYDEAWERIDKKVEGLSKHIKLEEERRSEDAQSKAALTDWLRAKASFVIEGLKEADKDEFCRCELKLQKWYGDLRGKPFAIEAENSILDISGFSKQYNCAFIWQKDGVKKLNLYLIINYFKGGKLRFKKIKPEAFEANRFYTVINKKSGEIVPMEVNFNFDDPNLIILPLAFGKRQGREFIWNDLLSLETGSLKLANGRVIEKTLYNRRTRQDEPALFVALTFERREVLDSSNIKPMNLIGVDRGENIPAVIALTDPEGCPLSRFKDSLGNPTHILRIGESYKEKQRTIQAKKEVEQRRAGGYSRKYASKAKNLADDMVRNTARDLLYYAVTQDAMLIFENLSRGFGRQGKRTFMAERQYTRMEDWLTAKLAYEGLPSKTYLSKTLAQYTSKTCSNCGFTITSADYDRVLEKLKKTATGWMTTINGKELKVEGQITYYNRYKRQNVVKDLSVELDRLSEESVNNDISSWTKGRSGEALSLLKKRFSHRPVQEKFVCLNCGFETHADEQAALNIARSWLFLRSQEYKKYQTNKTTGNTDKRAFVETWQSFYRKKLKEVWKPAV

SEQ ID NO: 34499 - protein, 978 aa, synthetic construct
  REGION 1..978: note = engineered CasX variant
QEIKRINKIRRRLVKDSNTKKAGKTGPMKTLLVRVMTPDLRERLENLRKKPENIPQPISNTSRANLNKLLTDYTEMKKAILHVYDEEFQVDPVGLMSRVAQPASKKIDQNKLKPEMDEKGNLTTAGFACSQCGQPLFVYKLEQVSEKGKAYTNYFGRCNVAEHEKLILLAQLKPEKDSDEAVTYSLGKFGQRALDFYSIHVTKESTHPVKPLAQIAGNRYASAPVGKALSDACMGTIASFLSKYQDIIIEHQKVVKGNQKRLESLRELAGKENLEYPSVTLPPQPHTKEGVDAYNEVIARVRMWVNLNLWQKLKLSRDDAKPLLRLKGFPSFPLVERQANEVDWWDMVCNVKKLINEKKEDGKVFWQNLAGYKRQEALRPYLSSEEDRKKGKKFARYQLGDLLLHLEKKHGEDWGKVYDEAWERIDKKVEGLSKHIKLEEERRSEDAQSKAALTDWLRAKASFVIEGLKEADKDEFCRCELKLQKWYGDLRGKPFAIEAENSILDISGFSKQYNCAFIWQKDGVKKLNLYLIINYFKGGKLRFKKIKPEAFEANRFYTVINKKSGEIVPMEVNFNFDDPNLIILPLAFGKRQGREFIWNDLLSLETGSLKLANGRVIEKTLYNRRTRQDEPALFVALTFERREVLDSSNIKPMNLIGVDRGENIPAVIALTDPEGCPLSRFKDSLGNPTHILRIGESYKEKQRTIQAKKEVEQRRAGGYSRKYASKAKNLADDMVRNTARDLLYYAVTQDAMLIFENLSRGFGRQGKRTFMAERQYTRMEDWLTAKLAYEGLPSKTYLSKTLAQYTSKTCSNCGFTITSADYDRVLEKLKKTATGWMTTINGKELKVEGQITYYNRYKRQNVVKDLSVELDRLSEESVNNDISSWTKGRSGEALSLLKKRFSHRPVQEKFVCLNCGFETHADEQAALNIARSWLFLRSQEYKKYQTNKTTGNTDKRAFVETWQSFYRKKLKEVWKPAV

SEQ ID NO: 34500 - protein, 978 aa, synthetic construct
  REGION 1..978: note = engineered CasX variant
QEIKRINKIRRRLVKDSNTKKAGKTGPMKTLLVRVMTPDLRERLENLRKKPENIPQPISNTSRANLNKLLTDYTEMKKAILHVYDEEFQVDPVGLMSRVAQPASKKIDQNKLKPEMDEKGNLTTAGFACSQCGQPLFVYKLEQVSEKGKAYTNYFGRCNVAEHEKLILLAQLKPEKDSDEAVTYSLGKFGQRALDFYSIHVTKESTHPVKPLAQIAGNRYASVPVGKALSDACMGTIASFLSKYQDIIIEHQKVVKGNQKRLESLRELAGKENLEYPSVTLPPQPHTKEGVDAYNEVIARVRMWVNLNLWQKLKLSRDDAKPLLRLKGFPSFPLVERQANEVDWWDMVCNVKKLINEKKEDGKVFWQNLAGYKRQEALRPYLSSEEDRKKGKKFARYQLGDLLLHLEKKHGEDWGKVYDEAWERIDKKVEGLSKHIKLEEERRSEDAQSKAALTDWLRAKASFVIEGLKEADKDEFCRCELKLQKWYGDLRGKPFAIEAENSILDISGFSKQYNCAFIWQKDGVKKLNLYLIINYFKGGKLRFKKIKPEAFEANRFYTVINKKSGEIVPMEVNFNFDDPNLIILPLAFGKRQGREFIWNDLLSLETGSLKLANGRVIEKTLYNRRTRQDEPALFVALTFERREVLDSSNIKPMNLIGVDRGENIPAVIALTDPEGCPLSRFKDSLGNPTHILRIGESYKEKQRTIQAKKEVEQRRAGGYSRKYASKAKNLADDMVRNTARDLLYYAVTQDAMLIFENLSRGFGRQGKRTFMAERQYTRMEDWLTAKLAYEGLPSKTYLSKTLAQYTSKTCSNCGFTITSADYDRVLEKLKKTATGWMTTINGKELKVEGQITYYNRYKRQNVVKDLSVELDRLSEESVNNDISSWTKGRSGEALSLLKKRFSHRPVQEKFVCLNCGFETHADEQAALNIARSWLFLRSQEYKKYQTNKTTGNTDKRAFVETWQSFYRKKLKEVWKPAV

SEQ ID NO: 34501 - protein, 978 aa, synthetic construct
  REGION 1..978: note = engineered CasX variant
QEIKRINKIRRRLVKDSNTKKAGKTGPMKTLLVRVMTPDLRERLENLRKKPENIPQPISNTSRANLNKLLTDYTEMKKAILHVYDEEFQVDPVGLMSRVAQPASKKIDQNKLKPEMDEKGNLTTAGFACSQCGQPLFVYKLEQVSEKGKAYTNYFGRCNVAEHEKLIKLAQLKPEKDSDEAVTYSLGKFGQRALDFYSIHVTKESTHPVKPLAQIAGNRYASGPVGKALSDACMGTIASFLSKYQDIIIEHQKVVKGNQKRLESLRELAGKENLEYPSVTLPPQPHTKEGVDAYNEVIARVRMWVNLNLWQKLKLSRDDAKPLLRLKGFPSFPLVERQANEVDWWDMVCNVKKLINEKKEDGKVFWQNLAGYKRQEALRPYLSSEEDRKKGKKFARYQLGDLLLHLEKKHGEDWGKVYDEAWERIDKKVEGLSKHIKLEEERRSEDAQSKAALTDWLRAKASFVIEGLKEADKDEFCRCELKLQKWYGDLRGKPFAIEAENSILDISGFSKQYNCAFIWQKDGVKKLNLYLIINYFKGGKLRFKKIKPEAFEANRFYTVINKKSGEIVPMEVNFNFDDPNLIILPLAFGKRQGREFIWNDLLSLETGSLKLANGRVIEKTLYNRRTRQDEPALFVALTFERREVLDSSNIKPMNLIGVDRGENIPAVIALTDPEGCPLSRFKDSLGNPTHILRIGESYKEKQRTIQAKKEVEQRRAGGYSRKYASKAKNLADDMVRNTARDLLYYAVTQDAMLIFENLSRGFGRQGKRTFMAERQYTRMEDWLTAKLAYEGLPSKTYLSKTLAQYTSKTCSNCGFTITSADYDRVLEKLKKTATGWMTTINGKELKVEGQITYYNRYKRQNVVKDLSVELDRLSEESVNNDISSWTKGRSGEALSLLKKRFSHRPVQEKFVCLNCGFETHADEQAALNIARSWLFLRSQEYKKYQTNKTTGNTDKRAFVETWQSFYRKKLKEVWKPAV

SEQ ID NO: 34502 - protein, 977 aa, synthetic construct
  REGION 1..977: note = engineered CasX variant
QEIKRINKIRRRLVKDSNTKKAGKTGPMKTLLVRVMTPDLRERLENLRKKPENIPQPISNTSRANLNKLLTDYTEMKKAILHVYDEEFQVDPVGLMSRVAQPASKKIDQNKLKPEMDEKGNLTTAGFACSQCGQPLFVYKLEQVSEKGKAYTNYFGRCNVAEHEKLILLAQLKPEKDSDEAVTYSLGKFGQRALDFYSIHVTKESTHPVKPLAQIAGNRYASPVGKALSDACMGTIASFLSKYQDIIIEHQKVVKGNQKRLESLRELAGKENLEYPSVTLPPQPHTKEGVDAYNEVIARVRMWVNLNLWQKLKLSRDDAKPLLRLKGFPSFPLVERQANEVDWWDMVCNVKKLINEKKEDGKVFWQNLAGYKRQEALRPYLSSEEDRKKGKKFARYQLGDLLLHLEKKHGEDWGKVYDEAWERIDKKVEGLSKHIKLEEERRSEDAQSKAALTDWLRAKASFVIEGLKEADKDEFCRCELKLQKWYGDLRGKPFAIEAENSILDISGFSKQYNCAFIWQKDGVKKLNLYLIINYFKGGKLRFKKIKPEAFEANRFYTVINKKSGEIVPMEVNFNFDDPNLIILPLAFGKRQGREFIWNDLLSLETGSLKLANGRVIEKTLYNRRTRQDEPALFVALTFERREVLDSSNIKPMNLIGVDRGENIPAVIALTDPEGCPLSRFKDSLGNPTHILRIGESYKEKQRTIQAKKEVEQRRAGGYSRKYASKAKNLADDMVRNTARDLLYYAVTQDAMLIFENLSRGFGRQGKRTFMAERQYTRMEDWLTAKLAYEGLPSKTYLSKTLAQYTSKTCSNCGFTITSADYDRVLEKLKKTATGWMTTINGKELKVEGQITYYNRYKRQNVVKDLSVELDRLSEESVNNDISSWTKGRSGEALSLLKKRFSHRPVQEKFVCLNCGFETHADEQAALNIARSWLFLRSQEYKKYQTNKTTGNTDKRAFVETWQSFYRKKLKEVWKPAV

SEQ ID NO: 34503 - protein, 978 aa, synthetic construct
  REGION 1..978: note = engineered CasX variant
QEIKRLNKIRRRLVKDSNTKKAGKTGPMKTLLVRVMTPDLRERLENLRKKPENIPQPISNTSRANLNKLLTDYTEMKKAILHVYDEEFQKDPVGLMSRVAQPASKKIDQNKLKPEMDEKGNLTTAGFACSQCGQPLFVYKLEQVSEKGKAYTNYFGRCNVAEHEKLILLAQLKPEKDSDEAVTYSLGKFGQRALDFYSIHVTKESTHPVKPLAQIAGNRYASYPVGKALSDACMGTIASFLSKYQDIIIEHQKVVKGNQKRLESLRELAGKENLEYPSVTLPPQPHTKEGVDAYNEVIARVRMWVNLNLWQKLKLSRDDAKPLLRLKGFPSFPLVERQANEVDWWDMVCNVKKLINEKKEDGKVFWQNLAGYKRQEALRPYLSSEEDRKKGKKFARYQLGDLLLHLEKKHGEDWGKVYDEAWERIDKKVEGLSKHIKLEEERRSEDAQSKAALTDWLRAKASFVIEGLKEADKDEFCRCELKLQKWYGDLRGKPFAIEAENSILDISGFSKQYNCAFIWQKDGVKKLNLYLIINYFKGGKLRFKKIKPEAFEANRFYTVINKKSGEIVPMEVNFNFDDPNLIILPLAFGKRQGREFIWNDLLSLETGSLKLANGRVIEKTLYNRRTRQDEPALFVALTFERREVLDSSNIKPMNLIGVDRGENIPAVIALTDPEGCPLSRFKDSLGNPTHILRIGESYKEKQRTIQAKKEVEQRRAGGYSRKYASKAKNLADDMVRNTARDLLYYAVTQDAMLIFENLSRGFGRQGKRTFMAERQYTRMEDWLTAKLAYEGLPSKTYLSKTLAQYTSKTCSNCGFTITSADYDRVLEKLKKTATGWMTTINGKELKVEGQITYYNRYKRQNVVKDLSVELDRLSEESVNNDISSWTKGRSGEALSLLKKRFSHRPVQEKFVCLNCGFETHADEQAALNIARSWLFLRSQEYKKYQTNKTTGNTDKRAFVETWQSFYRKKLKEVWKPAV

SEQ ID NO: 34504 - protein, 978 aa, synthetic construct
  REGION 1..978: note = engineered CasX variant
QEIKRLNKIRRRLVKDSNTKKAGKTGPMKTLLVRVMTPDLRERLENLRKKPENIPQPISNTSRANLNKLLTDYTEMKKAILHVYDEEFQKDPVGLMSRVAQPASKKIDQNKLKPEMDEKGNLTTAGFACSQCGQPLFVYKLEQVSEKGKAYTNYFGRCNVAEHEKLILLAQLKPEKDSDEAVTYSLGKFGQRALDFYSIHVTKESTHPVKPLAQIAGNRYASHPVGKALSDACMGTIASFLSKYQDIIIEHQKVVKGNQKRLESLRELAGKENLEYPSVTLPPQPHTKEGVDAYNEVIARVRMWVNLNLWQKLKLSRDDAKPLLRLKGFPSFPLVERQANEVDWWDMVCNVKKLINEKKEDGKVFWQNLAGYKRQEALRPYLSSEEDRKKGKKFARYQLGDLLLHLEKKHGEDWGKVYDEAWERIDKKVEGLSKHIKLEEERRSEDAQSKAALTDWLRAKASFVIEGLKEADKDEFCRCELKLQKWYGDLRGKPFAIEAENSILDISGFSKQYNCAFIWQKDGVKKLNLYLIINYFKGGKLRFKKIKPEAFEANRFYTVINKKSGEIVPMEVNFNFDDPNLIILPLAFGKRQGREFIWNDLLSLETGSLKLANGRVIEKTLYNRRTRQDEPALFVALTFERREVLDSSNIKPMNLIGVDRGENIPAVIALTDPEGCPLSRFKDSLGNPTHILRIGESYKEKQRTIQAKKEVEQRRAGGYSRKYASKAKNLADDMVRNTARDLLYYAVTQDAMLIFENLSRGFGRQGKRTFMAERQYTRMEDWLTAKLAYEGLPSKTYLSKTLAQYTSKTCSNCGFTITSADYDRVLEKLKKTATGWMTTINGKELKVEGQITYYNRYKRQNVVKDLSVELDRLSEESVNNDISSWTKGRSGEALSLLKKRFSHRPVQEKFVCLNCGFETHADEQAALNIARSWLFLRSQEYKKYQTNKTTGNTDKRAFVETWQSFYRKKLKEVWKPAV

SEQ ID NO: 34505 - protein, 978 aa, synthetic construct
  REGION 1..978: note = engineered CasX variant
QEIKRLNKIRRRLVKDSNTKKAGKTGPMKTLLVRVMTPDLRERLENLRKKPENIPQPISNTSRANLNKLLTDYTEMKKAILHVYDEEFQKDPVGLMSRVAQPASKKIDQNKLKPEMDEKGNLTTAGFACSQCGQPLFVYKLEQVSEKGKAYTNYFGRCNVAEHEKLILLAQLKPEKDSDEAVTYSLGKFGQRALDFYSIHVTKESTHPVKPLAQIAGNRYASSPVGKALSDACMGTIASFLSKYQDIIIEHQKVVKGNQKRLESLRELAGKENLEYPSVTLPPQPHTKEGVDAYNEVIARVRMWVNLNLWQKLKLSRDDAKPLLRLKGFPSFPLVERQANEVDWWDMVCNVKKLINEKKEDGKVFWQNLAGYKRQEALRPYLSSEEDRKKGKKFARYQLGDLLLHLEKKHGEDWGKVYDEAWERIDKKVEGLSKHIKLEEERRSEDAQSKAALTDWLRAKASFVIEGLKEADKDEFCRCELKLQKWYGDLRGKPFAIEAENSILDISGFSKQYNCAFIWQKDGVKKLNLYLIINYFKGGKLRFKKIKPEAFEANRFYTVINKKSGEIVPMEVNFNFDDPNLIILPLAFGKRQGREFIWNDLLSLETGSLKLANGRVIEKTLYNRRTRQDEPALFVALTFERREVLDSSNIKPMNLIGVDRGENIPAVIALTDPEGCPLSRFKDSLGNPTHILRIGESYKEKQRTIQAKKEVEQRRAGGYSRKYASKAKNLADDMVRNTARDLLYYAVTQDAMLIFENLSRGFGRQGKRTFMAERQYTRMEDWLTAKLAYEGLPSKTYLSKTLAQYTSKTCSNCGFTITSADYDRVLEKLKKTATGWMTTINGKELKVEGQITYYNRYKRQNVVKDLSVELDRLSEESVNNDISSWTKGRSGEALSLLKKRFSHRPVQEKFVCLNCGFETHADEQAALNIARSWLFLRSQEYKKYQTNKTTGNTDKRAFVETWQSFYRKKLKEVWKPAV

SEQ ID NO: 34506 - protein, 978 aa, synthetic construct
  REGION 1..978: note = engineered CasX variant
QEIKRLNKIRRRLVKDSNTKKAGKTGPMKTLLVRVMTPDLRERLENLRKKPENIPQPISNTSRANLNKLLTDYTEMKKAILHVYDEEFQKDPVGLMSRVAQPASKKIDQNKLKPEMDEKGNLTTAGFACSQCGQPLFVYKLEQVSEKGKAYTNYFGRCNVAEHEKLILLAQLKPEKDSDEAVTYSLGKFGQRALDFYSIHVTKESTHPVKPLAQIAGNRYASTPVGKALSDACMGTIASFLSKYQDIIIEHQKVVKGNQKRLESLRELAGKENLEYPSVTLPPQPHTKEGVDAYNEVIARVRMWVNLNLWQKLKLSRDDAKPLLRLKGFPSFPLVERQANEVDWWDMVCNVKKLINEKKEDGKVFWQNLAGYKRQEALRPYLSSEEDRKKGKKFARYQLGDLLLHLEKKHGEDWGKVYDEAWERIDKKVEGLSKHIKLEEERRSEDAQSKAALTDWLRAKASFVIEGLKEADKDEFCRCELKLQKWYGDLRGKPFAIEAENSILDISGFSKQYNCAFIWQKDGVKKLNLYLIINYFKGGKLRFKKIKPEAFEANRFYTVINKKSGEIVPMEVNFNFDDPNLIILPLAFGKRQGREFIWNDLLSLETGSLKLANGRVIEKTLYNRRTRQDEPALFVALTFERREVLDSSNIKPMNLIGVDRGENIPAVIALTDPEGCPLSRFKDSLGNPTHILRIGESYKEKQRTIQAKKEVEQRRAGGYSRKYASKAKNLADDMVRNTARDLLYYAVTQDAMLIFENLSRGFGRQGKRTFMAERQYTRMEDWLTAKLAYEGLPSKTYLSKTLAQYTSKTCSNCGFTITSADYDRVLEKLKKTATGWMTTINGKELKVEGQITYYNRYKRQNVVKDLSVELDRLSEESVNNDISSWTKGRSGEALSLLKKRFSHRPVQEKFVCLNCGFETHADEQAALNIARSWLFLRSQEYKKYQTNKTTGNTDKRAFVETWQSFYRKKLKEVWKPAV

SEQ ID NO: 34507 - protein, 978 aa, synthetic construct
  REGION 1..978: note = engineered CasX variant
QEIKRLNKIRRRLVKDSNTKKAGKTGPMKTLLVRVMTPDLRERLENLRKKPENIPQPISNTSRANLNKLLTDYTEMKKAILHVYDEEFQKDPVGLMSRVAQPASKKIDQNKLKPEMDEKGNLTTAGFACSQCGQPLFVYKLEQVSEKGKAYTNYFGRCNVAEHEKLILLAQLKPEKDSDEAVTYSLGKFGQRALDFYSIHVTKESTHPVKPLAQIAGNRYASAPVGKALSDACMGTIASFLSKYQDIIIEHQKVVKGNQKRLESLRELAGKENLEYPSVTLPPQPHTKEGVDAYNEVIARVRMWVNLNLWQKLKLSRDDAKPLLRLKGFPSFPLVERQANEVDWWDMVCNVKKLINEKKEDGKVFWQNLAGYKRQEALRPYLSSEEDRKKGKKFARYQLGDLLLHLEKKHGEDWGKVYDEAWERIDKKVEGLSKHIKLEEERRSEDAQSKAALTDWLRAKASFVIEGLKEADKDEFCRCELKLQKWYGDLRGKPFAIEAENSILDISGFSKQYNCAFIWQKDGVKKLNLYLIINYFKGGKLRFKKIKPEAFEANRFYTVINKKSGEIVPMEVNFNFDDPNLIILPLAFGKRQGREFIWNDLLSLETGSLKLANGRVIEKTLYNRRTRQDEPALFVALTFERREVLDSSNIKPMNLIGVDRGENIPAVIALTDPEGCPLSRFKDSLGNPTHILRIGESYKEKQRTIQAKKEVEQRRAGGYSRKYASKAKNLADDMVRNTARDLLYYAVTQDAMLIFENLSRGFGRQGKRTFMAERQYTRMEDWLTAKLAYEGLPSKTYLSKTLAQYTSKTCSNCGFTITSADYDRVLEKLKKTATGWMTTINGKELKVEGQITYYNRYKRQNVVKDLSVELDRLSEESVNNDISSWTKGRSGEALSLLKKRFSHRPVQEKFVCLNCGFETHADEQAALNIARSWLFLRSQEYKKYQTNKTTGNTDKRAFVETWQSFYRKKLKEVWKPAV

SEQ ID NO: 34508 - protein, 978 aa, synthetic construct
  REGION 1..978: note = engineered CasX variant
QEIKRLNKIRRRLVKDSNTKKAGKTGPMKTLLVRVMTPDLRERLENLRKKPENIPQPISNTSRANLNKLLTDYTEMKKAILHVYDEEFQKDPVGLMSRVAQPASKKIDQNKLKPEMDEKGNLTTAGFACSQCGQPLFVYKLEQVSEKGKAYTNYFGRCNVAEHEKLILLAQLKPEKDSDEAVTYSLGKFGQRALDFYSIHVTKESTHPVKPLAQIAGNRYASVPVGKALSDACMGTIASFLSKYQDIIIEHQKVVKGNQKRLESLRELAGKENLEYPSVTLPPQPHTKEGVDAYNEVIARVRMWVNLNLWQKLKLSRDDAKPLLRLKGFPSFPLVERQANEVDWWDMVCNVKKLINEKKEDGKVFWQNLAGYKRQEALRPYLSSEEDRKKGKKFARYQLGDLLLHLEKKHGEDWGKVYDEAWERIDKKVEGLSKHIKLEEERRSEDAQSKAALTDWLRAKASFVIEGLKEADKDEFCRCELKLQKWYGDLRGKPFAIEAENSILDISGFSKQYNCAFIWQKDGVKKLNLYLIINYFKGGKLRFKKIKPEAFEANRFYTVINKKSGEIVPMEVNFNFDDPNLIILPLAFGKRQGREFIWNDLLSLETGSLKLANGRVIEKTLYNRRTRQDEPALFVALTFERREVLDSSNIKPMNLIGVDRGENIPAVIALTDPEGCPLSRFKDSLGNPTHILRIGESYKEKQRTIQAKKEVEQRRAGGYSRKYASKAKNLADDMVRNTARDLLYYAVTQDAMLIFENLSRGFGRQGKRTFMAERQYTRMEDWLTAKLAYEGLPSKTYLSKTLAQYTSKTCSNCGFTITSADYDRVLEKLKKTATGWMTTINGKELKVEGQITYYNRYKRQNVVKDLSVELDRLSEESVNNDISSWTKGRSGEALSLLKKRFSHRPVQEKFVCLNCGFETHADEQAALNIARSWLFLRSQEYKKYQTNKTTGNTDKRAFVETWQSFYRKKLKEVWKPAV

SEQ ID NO: 34509 - protein, 978 aa, synthetic construct
  REGION 1..978: note = engineered CasX variant
QEIKRLNKIRRRLVKDSNTKKAGKTGPMKTLLVRVMTPDLRERLENLRKKPENIPQPISNTSRANLNKLLTDYTEMKKAILHVYDEEFQKDPVGLMSRVAQPASKKIDQNKLKPEMDEKGNLTTAGFACSQCGQPLFVYKLEQVSEKGKAYTNYFGRCNVAEHEKLIKLAQLKPEKDSDEAVTYSLGKFGQRALDFYSIHVTKESTHPVKPLAQIAGNRYASGPVGKALSDACMGTIASFLSKYQDIIIEHQKVVKGNQKRLESLRELAGKENLEYPSVTLPPQPHTKEGVDAYNEVIARVRMWVNLNLWQKLKLSRDDAKPLLRLKGFPSFPLVERQANEVDWWDMVCNVKKLINEKKEDGKVFWQNLAGYKRQEALRPYLSSEEDRKKGKKFARYQLGDLLLHLEKKHGEDWGKVYDEAWERIDKKVEGLSKHIKLEEERRSEDAQSKAALTDWLRAKASFVIEGLKEADKDEFCRCELKLQKWYGDLRGKPFAIEAENSILDISGFSKQYNCAFIWQKDGVKKLNLYLIINYFKGGKLRFKKIKPEAFEANRFYTVINKKSGEIVPMEVNFNFDDPNLIILPLAFGKRQGREFIWNDLLSLETGSLKLANGRVIEKTLYNRRTRQDEPALFVALTFERREVLDSSNIKPMNLIGVDRGENIPAVIALTDPEGCPLSRFKDSLGNPTHILRIGESYKEKQRTIQAKKEVEQRRAGGYSRKYASKAKNLADDMVRNTARDLLYYAVTQDAMLIFENLSRGFGRQGKRTFMAERQYTRMEDWLTAKLAYEGLPSKTYLSKTLAQYTSKTCSNCGFTITSADYDRVLEKLKKTATGWMTTINGKELKVEGQITYYNRYKRQNVVKDLSVELDRLSEESVNNDISSWTKGRSGEALSLLKKRFSHRPVQEKFVCLNCGFETHADEQAALNIARSWLFLRSQEYKKYQTNKTTGNTDKRAFVETWQSFYRKKLKEVWKPAV

SEQ ID NO: 34510 - protein, 977 aa, synthetic construct
  REGION 1..977: note = engineered CasX variant
QEIKRLNKIRRRLVKDSNTKKAGKTGPMKTLLVRVMTPDLRERLENLRKKPENIPQPISNTSRANLNKLLTDYTEMKKAILHVYDEEFQKDPVGLMSRVAQPASKKIDQNKLKPEMDEKGNLTTAGFACSQCGQPLFVYKLEQVSEKGKAYTNYFGRCNVAEHEKLILLAQLKPEKDSDEAVTYSLGKFGQRALDFYSIHVTKESTHPVKPLAQIAGNRYASPVGKALSDACMGTIASFLSKYQDIIIEHQKVVKGNQKRLESLRELAGKENLEYPSVTLPPQPHTKEGVDAYNEVIARVRMWVNLNLWQKLKLSRDDAKPLLRLKGFPSFPLVERQANEVDWWDMVCNVKKLINEKKEDGKVFWQNLAGYKRQEALRPYLSSEEDRKKGKKFARYQLGDLLLHLEKKHGEDWGKVYDEAWERIDKKVEGLSKHIKLEEERRSEDAQSKAALTDWLRAKASFVIEGLKEADKDEFCRCELKLQKWYGDLRGKPFAIEAENSILDISGFSKQYNCAFIWQKDGVKKLNLYLIINYFKGGKLRFKKIKPEAFEANRFYTVINKKSGEIVPMEVNFNFDDPNLIILPLAFGKRQGREFIWNDLLSLETGSLKLANGRVIEKTLYNRRTRQDEPALFVALTFERREVLDSSNIKPMNLIGVDRGENIPAVIALTDPEGCPLSRFKDSLGNPTHILRIGESYKEKQRTIQAKKEVEQRRAGGYSRKYASKAKNLADDMVRNTARDLLYYAVTQDAMLIFENLSRGFGRQGKRTFMAERQYTRMEDWLTAKLAYEGLPSKTYLSKTLAQYTSKTCSNCGFTITSADYDRVLEKLKKTATGWMTTINGKELKVEGQITYYNRYKRQNVVKDLSVELDRLSEESVNNDISSWTKGRSGEALSLLKKRFSHRPVQEKFVCLNCGFETHADEQAALNIARSWLFLRSQEYKKYQTNKTTGNTDKRAFVETWQSFYRKKLKEVWKPAV

SEQ ID NO: 34511 - protein, 978 aa, synthetic construct
  REGION 1..978: note = engineered CasX variant
QEIKRINKIRRRLVKDSNTKKAGKTGPMKTLLVRVMTPDLRERLENLRKKPENIPQPISNTSRANLNKLLTDYTEMKKAILHVYDEEFQKDPVGLMSRVAQPASKKIDQNKLKPEMDEKGNLTTAGFACSQCGQPLFVYKLEQVSEKGKAYTNYVGRCNVAEHEKLILLAQLKPEKDSDEAVTYSLGKFGQRALDFYSIHVTKESTHPVKPLAQIAGNRYASYPVGKALSDACMGTIASFLSKYQDIIIEHQKVVKGNQKRLESLRELAGKENLEYPSVTLPPQPHTKEGVDAYNEVIARVRMWVNLNLWQKLKLSRDDAKPLLRLKGFPSFPLVERQANEVDWWDMVCNVKKLINEKKEDGKVFWQNLAGYKRQEALRPYLSSEEDRKKGKKFARYQLGDLLLHLEKKHGEDWGKVYDEAWERIDKKVEGLSKHIKLEEERRSEDAQSKAALTDWLRAKASFVIEGLKEADKDEFCRCELKLQKWYGDLRGKPFAIEAENSILDISGFSKQYNCAFIWQKDGVKKLNLYLIINYFKGGKLRFKKIKPEAFEANRFYTVINKKSGEIVPMEVNFNFDDPNLIILPLAFGKRQGREFIWNDLLSLETGSLKLANGRVIEKTLYNRRTRQDEPALFVALTFERREVLDSSNIKPMNLIGVDRGENIPAVIALTDPEGCPLSRFKDSLGNPTHILRIGESYKEKQRTIQAKKEVEQRRAGGYSRKYASKAKNLADDMVRNTARDLLYYAVTQDAMLIFENLSRGFGRQGKRTFMAERQYTRMEDWLTAKLAYEGLPSKTYLSKTLAQYTSKTCSNCGFTITSADYDRVLEKLKKTATGWMTTINGKELKVEGQITYYNRYKRQNVVKDLSVELDRLSEESVNNDISSWTKGRSGEALSLLKKRFSHRPVQEKFVCLNCGFETHADEQAALNIARSWLFLRSQEYKKYQTNKTTGNTDKRAFVETWQSFYRKKLKEVWKPAV

SEQ ID NO: 34512 - protein, 978 aa, synthetic construct
  REGION 1..978: note = engineered CasX variant
QEIKRINKIRRRLVKDSNTKKAGKTGPMKTLLVRVMTPDLRERLENLRKKPENIPQPISNTSRANLNKLLTDYTEMKKAILHVYDEEFQKDPVGLMSRVAQPASKKIDQNKLKPEMDEKGNLTTAGFACSQCGQPLFVYKLEQVSEKGKAYTNYVGRCNVAEHEKLILLAQLKPEKDSDEAVTYSLGKFGQRALDFYSIHVTKESTHPVKPLAQIAGNRYASHPVGKALSDACMGTIASFLSKYQDIIIEHQKVVKGNQKRLESLRELAGKENLEYPSVTLPPQPHTKEGVDAYNEVIARVRMWVNLNLWQKLKLSRDDAKPLLRLKGFPSFPLVERQANEVDWWDMVCNVKKLINEKKEDGKVFWQNLAGYKRQEALRPYLSSEEDRKKGKKFARYQLGDLLLHLEKKHGEDWGKVYDEAWERIDKKVEGLSKHIKLEEERRSEDAQSKAALTDWLRAKASFVIEGLKEADKDEFCRCELKLQKWYGDLRGKPFAIEAENSILDISGFSKQYNCAFIWQKDGVKKLNLYLIINYFKGGKLRFKKIKPEAFEANRFYTVINKKSGEIVPMEVNFNFDDPNLIILPLAFGKRQGREFIWNDLLSLETGSLKLANGRVIEKTLYNRRTRQDEPALFVALTFERREVLDSSNIKPMNLIGVDRGENIPAVIALTDPEGCPLSRFKDSLGNPTHILRIGESYKEKQRTIQAKKEVEQRRAGGYSRKYASKAKNLADDMVRNTARDLLYYAVTQDAMLIFENLSRGFGRQGKRTFMAERQYTRMEDWLTAKLAYEGLPSKTYLSKTLAQYTSKTCSNCGFTITSADYDRVLEKLKKTATGWMTTINGKELKVEGQITYYNRYKRQNVVKDLSVELDRLSEESVNNDISSWTKGRSGEALSLLKKRFSHRPVQEKFVCLNCGFETHADEQAALNIARSWLFLRSQEYKKYQTNKTTGNTDKRAFVETWQSFYRKKLKEVWKPAV

SEQ ID NO: 34513 - protein, 978 aa, synthetic construct
  REGION 1..978: note = engineered CasX variant
QEIKRINKIRRRLVKDSNTKKAGKTGPMKTLLVRVMTPDLRERLENLRKKPENIPQPISNTSRANLNKLLTDYTEMKKAILHVYDEEFQKDPVGLMSRVAQPASKKIDQNKLKPEMDEKGNLTTAGFACSQCGQPLFVYKLEQVSEKGKAYTNYVGRCNVAEHEKLILLAQLKPEKDSDEAVTYSLGKFGQRALDFYSIHVTKESTHPVKPLAQIAGNRYASSPVGKALSDACMGTIASFLSKYQDIIIEHQKVVKGNQKRLESLRELAGKENLEYPSVTLPPQPHTKEGVDAYNEVIARVRMWVNLNLWQKLKLSRDDAKPLLRLKGFPSFPLVERQANEVDWWDMVCNVKKLINEKKEDGKVFWQNLAGYKRQEALRPYLSSEEDRKKGKKFARYQLGDLLLHLEKKHGEDWGKVYDEAWERIDKKVEGLSKHIKLEEERRSEDAQSKAALTDWLRAKASFVIEGLKEADKDEFCRCELKLQKWYGDLRGKPFAIEAENSILDISGFSKQYNCAFIWQKDGVKKLNLYLIINYFKGGKLRFKKIKPEAFEANRFYTVINKKSGEIVPMEVNFNFDDPNLIILPLAFGKRQGREFIWNDLLSLETGSLKLANGRVIEKTLYNRRTRQDEPALFVALTFERREVLDSSNIKPMNLIGVDRGENIPAVIALTDPEGCPLSRFKDSLGNPTHILRIGESYKEKQRTIQAKKEVEQRRAGGYSRKYASKAKNLADDMVRNTARDLLYYAVTQDAMLIFENLSRGFGRQGKRTFMAERQYTRMEDWLTAKLAYEGLPSKTYLSKTLAQYTSKTCSNCGFTITSADYDRVLEKLKKTATGWMTTINGKELKVEGQITYYNRYKRQNVVKDLSVELDRLSEESVNNDISSWTKGRSGEALSLLKKRFSHRPVQEKFVCLNCGFETHADEQAALNIARSWLFLRSQEYKKYQTNKTTGNTDKRAFVETWQSFYRKKLKEVWKPAV

SEQ ID NO: 34514 - protein, 978 aa, synthetic construct
  REGION 1..978: note = engineered CasX variant
QEIKRINKIRRRLVKDSNTKKAGKTGPMKTLLVRVMTPDLRERLENLRKKPENIPQPISNTSRANLNKLLTDYTEMKKAILHVYDEEFQKDPVGLMSRVAQPASKKIDQNKLKPEMDEKGNLTTAGFACSQCGQPLFVYKLEQVSEKGKAYTNYVGRCNVAEHEKLILLAQLKPEKDSDEAVTYSLGKFGQRALDFYSIHVTKESTHPVKPLAQIAGNRYASTPVGKALSDACMGTIASFLSKYQDIIIEHQKVVKGNQKRLESLRELAGKENLEYPSVTLPPQPHTKEGVDAYNEVIARVRMWVNLNLWQKLKLSRDDAKPLLRLKGFPSFPLVERQANEVDWWDMVCNVKKLINEKKEDGKVFWQNLAGYKRQEALRPYLSSEEDRKKGKKFARYQLGDLLLHLEKKHGEDWGKVYDEAWERIDKKVEGLSKHIKLEEERRSEDAQSKAALTDWLRAKASFVIEGLKEADKDEFCRCELKLQKWYGDLRGKPFAIEAENSILDISGFSKQYNCAFIWQKDGVKKLNLYLIINYFKGGKLRFKKIKPEAFEANRFYTVINKKSGEIVPMEVNFNFDDPNLIILPLAFGKRQGREFIWNDLLSLETGSLKLANGRVIEKTLYNRRTRQDEPALFVALTFERREVLDSSNIKPMNLIGVDRGENIPAVIALTDPEGCPLSRFKDSLGNPTHILRIGESYKEKQRTIQAKKEVEQRRAGGYSRKYASKAKNLADDMVRNTARDLLYYAVTQDAMLIFENLSRGFGRQGKRTFMAERQYTRMEDWLTAKLAYEGLPSKTYLSKTLAQYTSKTCSNCGFTITSADYDRVLEKLKKTATGWMTTINGKELKVEGQITYYNRYKRQNVVKDLSVELDRLSEESVNNDISSWTKGRSGEALSLLKKRFSHRPVQEKFVCLNCGFETHADEQAALNIARSWLFLRSQEYKKYQTNKTTGNTDKRAFVETWQSFYRKKLKEVWKPAV

SEQ ID NO: 34515 - protein, 978 aa, synthetic construct
  REGION 1..978: note = engineered CasX variant
QEIKRINKIRRRLVKDSNTKKAGKTGPMKTLLVRVMTPDLRERLENLRKKPENIPQPISNTSRANLNKLLTDYTEMKKAILHVYDEEFQKDPVGLMSRVAQPASKKIDQNKLKPEMDEKGNLTTAGFACSQCGQPLFVYKLEQVSEKGKAYTNYVGRCNVAEHEKLILLAQLKPEKDSDEAVTYSLGKFGQRALDFYSIHVTKESTHPVKPLAQIAGNRYASAPVGKALSDACMGTIASFLSKYQDIIIEHQKVVKGNQKRLESLRELAGKENLEYPSVTLPPQPHTKEGVDAYNEVIARVRMWVNLNLWQKLKLSRDDAKPLLRLKGFPSFPLVERQANEVDWWDMVCNVKKLINEKKEDGKVFWQNLAGYKRQEALRPYLSSEEDRKKGKKFARYQLGDLLLHLEKKHGEDWGKVYDEAWERIDKKVEGLSKHIKLEEERRSEDAQSKAALTDWLRAKASFVIEGLKEADKDEFCRCELKLQKWYGDLRGKPFAIEAENSILDISGFSKQYNCAFIWQKDGVKKLNLYLIINYFKGGKLRFKKIKPEAFEANRFYTVINKKSGEIVPMEVNFNFDDPNLIILPLAFGKRQGREFIWNDLLSLETGSLKLANGRVIEKTLYNRRTRQDEPALFVALTFERREVLDSSNIKPMNLIGVDRGENIPAVIALTDPEGCPLSRFKDSLGNPTHILRIGESYKEKQRTIQAKKEVEQRRAGGYSRKYASKAKNLADDMVRNTARDLLYYAVTQDAMLIFENLSRGFGRQGKRTFMAERQYTRMEDWLTAKLAYEGLPSKTYLSKTLAQYTSKTCSNCGFTITSADYDRVLEKLKKTATGWMTTINGKELKVEGQITYYNRYKRQNVVKDLSVELDRLSEESVNNDISSWTKGRSGEALSLLKKRFSHRPVQEKFVCLNCGFETHADEQAALNIARSWLFLRSQEYKKYQTNKTTGNTDKRAFVETWQSFYRKKLKEVWKPAV

SEQ ID NO: 34516 - protein, 978 aa, synthetic construct
  REGION 1..978: note = engineered CasX variant
QEIKRINKIRRRLVKDSNTKKAGKTGPMKTLLVRVMTPDLRERLENLRKKPENIPQPISNTSRANLNKLLTDYTEMKKAILHVYDEEFQKDPVGLMSRVAQPASKKIDQNKLKPEMDEKGNLTTAGFACSQCGQPLFVYKLEQVSEKGKAYTNYVGRCNVAEHEKLILLAQLKPEKDSDEAVTYSLGKFGQRALDFYSIHVTKESTHPVKPLAQIAGNRYASVPVGKALSDACMGTIASFLSKYQDIIIEHQKVVKGNQKRLESLRELAGKENLEYPSVTLPPQPHTKEGVDAYNEVIARVRMWVNLNLWQKLKLSRDDAKPLLRLKGFPSFPLVERQANEVDWWDMVCNVKKLINEKKEDGKVFWQNLAGYKRQEALRPYLSSEEDRKKGKKFARYQLGDLLLHLEKKHGEDWGKVYDEAWERIDKKVEGLSKHIKLEEERRSEDAQSKAALTDWLRAKASFVIEGLKEADKDEFCRCELKLQKWYGDLRGKPFAIEAENSILDISGFSKQYNCAFIWQKDGVKKLNLYLIINYFKGGKLRFKKIKPEAFEANRFYTVINKKSGEIVPMEVNFNFDDPNLIILPLAFGKRQGREFIWNDLLSLETGSLKLANGRVIEKTLYNRRTRQDEPALFVALTFERREVLDSSNIKPMNLIGVDRGENIPAVIALTDPEGCPLSRFKDSLGNPTHILRIGESYKEKQRTIQAKKEVEQRRAGGYSRKYASKAKNLADDMVRNTARDLLYYAVTQDAMLIFENLSRGFGRQGKRTFMAERQYTRMEDWLTAKLAYEGLPSKTYLSKTLAQYTSKTCSNCGFTITSADYDRVLEKLKKTATGWMTTINGKELKVEGQITYYNRYKRQNVVKDLSVELDRLSEESVNNDISSWTKGRSGEALSLLKKRFSHRPVQEKFVCLNCGFETHADEQAALNIARSWLFLRSQEYKKYQTNKTTGNTDKRAFVETWQSFYRKKLKEVWKPAV

SEQ ID NO: 34517 - protein, 978 aa, synthetic construct
  REGION 1..978: note = engineered CasX variant
QEIKRINKIRRRLVKDSNTKKAGKTGPMKTLLVRVMTPDLRERLENLRKKPENIPQPISNTSRANLNKLLTDYTEMKKAILHVYDEEFQKDPVGLMSRVAQPASKKIDQNKLKPEMDEKGNLTTAGFACSQCGQPLFVYKLEQVSEKGKAYTNYVGRCNVAEHEKLIKLAQLKPEKDSDEAVTYSLGKFGQRALDFYSIHVTKESTHPVKPLAQIAGNRYASGPVGKALSDACMGTIASFLSKYQDIIIEHQKVVKGNQKRLESLRELAGKENLEYPSVTLPPQPHTKEGVDAYNEVIARVRMWVNLNLWQKLKLSRDDAKPLLRLKGFPSFPLVERQANEVDWWDMVCNVKKLINEKKEDGKVFWQNLAGYKRQEALRPYLSSEEDRKKGKKFARYQLGDLLLHLEKKHGEDWGKVYDEAWERIDKKVEGLSKHIKLEEERRSEDAQSKAALTDWLRAKASFVIEGLKEADKDEFCRCELKLQKWYGDLRGKPFAIEAENSILDISGFSKQYNCAFIWQKDGVKKLNLYLIINYFKGGKLRFKKIKPEAFEANRFYTVINKKSGEIVPMEVNFNFDDPNLIILPLAFGKRQGREFIWNDLLSLETGSLKLANGRVIEKTLYNRRTRQDEPALFVALTFERREVLDSSNIKPMNLIGVDRGENIPAVIALTDPEGCPLSRFKDSLGNPTHILRIGESYKEKQRTIQAKKEVEQRRAGGYSRKYASKAKNLADDMVRNTARDLLYYAVTQDAMLIFENLSRGFGRQGKRTFMAERQYTRMEDWLTAKLAYEGLPSKTYLSKTLAQYTSKTCSNCGFTITSADYDRVLEKLKKTATGWMTTINGKELKVEGQITYYNRYKRQNVVKDLSVELDRLSEESVNNDISSWTKGRSGEALSLLKKRFSHRPVQEKFVCLNCGFETHADEQAALNIARSWLFLRSQEYKKYQTNKTTGNTDKRAFVETWQSFYRKKLKEVWKPAV

SEQ ID NO: 34518 - protein, 977 aa, synthetic construct
  REGION 1..977: note = engineered CasX variant
QEIKRINKIRRRLVKDSNTKKAGKTGPMKTLLVRVMTPDLRERLENLRKKPENIPQPISNTSRANLNKLLTDYTEMKKAILHVYDEEFQKDPVGLMSRVAQPASKKIDQNKLKPEMDEKGNLTTAGFACSQCGQPLFVYKLEQVSEKGKAYTNYVGRCNVAEHEKLILLAQLKPEKDSDEAVTYSLGKFGQRALDFYSIHVTKESTHPVKPLAQIAGNRYASPVGKALSDACMGTIASFLSKYQDIIIEHQKVVKGNQKRLESLRELAGKENLEYPSVTLPPQPHTKEGVDAYNEVIARVRMWVNLNLWQKLKLSRDDAKPLLRLKGFPSFPLVERQANEVDWWDMVCNVKKLINEKKEDGKVFWQNLAGYKRQEALRPYLSSEEDRKKGKKFARYQLGDLLLHLEKKHGEDWGKVYDEAWERIDKKVEGLSKHIKLEEERRSEDAQSKAALTDWLRAKASFVIEGLKEADKDEFCRCELKLQKWYGDLRGKPFAIEAENSILDISGFSKQYNCAFIWQKDGVKKLNLYLIINYFKGGKLRFKKIKPEAFEANRFYTVINKKSGEIVPMEVNFNFDDPNLIILPLAFGKRQGREFIWNDLLSLETGSLKLANGRVIEKTLYNRRTRQDEPALFVALTFERREVLDSSNIKPMNLIGVDRGENIPAVIALTDPEGCPLSRFKDSLGNPTHILRIGESYKEKQRTIQAKKEVEQRRAGGYSRKYASKAKNLADDMVRNTARDLLYYAVTQDAMLIFENLSRGFGRQGKRTFMAERQYTRMEDWLTAKLAYEGLPSKTYLSKTLAQYTSKTCSNCGFTITSADYDRVLEKLKKTATGWMTTINGKELKVEGQITYYNRYKRQNVVKDLSVELDRLSEESVNNDISSWTKGRSGEALSLLKKRFSHRPVQEKFVCLNCGFETHADEQAALNIARSWLFLRSQEYKKYQTNKTTGNTDKRAFVETWQSFYRKKLKEVWKPAV

SEQ ID NO: 34519 - protein, 978 aa, synthetic construct
  REGION 1..978: note = engineered CasX variant
QEIKRINKIRRRLVKDSNTKKAGKTGPMKTLLVRVMTPDLRERLENLRKKPENIPQPISNTSRANLNKLLTDYTEMKKAILHVYDEEFQKDPVGLMSRVAQPASKKIDQNKLKPEMDEKGNLTTAGFACSQCGQPLFVYKLEQVSEKGKAYTNYFGRCNVAEHEKLILLAQLKPEKDSDEAVTYSLGKFGQRALDFYSIHVTKESTHPVKPLAQIAGNRYASYPVGKALSDACMGTIASFLSKYQDIIIEHQKVVKGNQKRLESLRELAGKENLEYPSVTLPPQPHTKEGVDAYNEVIARVRMWVNLNLWQKLKLSRDDAKPLLRLKGFPSFPLVERQANEVDWWDMVCNVKKLINEKKEDGKVFWQNLAGYKRQEALRPYLSSEEDRKKGKKFARYQLGDLLLHLEKKHGEDWGKVYDEAWERIDKKVEGLSKHIKLEEERRSEDAQSKAALTDWLRAKASFVIEGLKEADKDEFCRCELKLQKWYGDLRGKPFAIEAENSILDISGFSKQYNCAFIWQKDGVKKLNLYLIINYFKGGKLRFKKIKPEAFEANRFYTVINKKSGEIVPMEVNFNFDDPNLIILPLAFGKRQGREFIWNDLLSLETGSLKLANGRVIEKTLYNRRTRQDEPALFVALTFERREVLDSSNIKPMNLIGVDRGENIPAVIALTDPEGCPLSRFKDSLGNPTHILRIGESYKEKQRTIQAKKEVEQRRAGGYSRKYASKAKNLADDMVRNTARDLLYYAVTQDAMLIFENLSRGFGRQGKRTFMAERQYTRMEDWLTAKLAYEGLASKTYLSKTLAQYTSKTCSNCGFTITSADYDRVLEKLKKTATGWMTTINGKELKVEGQITYYNRYKRQNVVKDLSVELDRLSEESVNNDISSWTKGRSGEALSLLKKRFSHRPVQEKFVCLNCGFETHADEQAALNIARSWLFLRSQEYKKYQTNKTTGNTDKRAFVETWQSFYRKKLKEVWKPAV

SEQ ID NO: 34520 - protein, 978 aa, synthetic construct
  REGION 1..978: note = engineered CasX variant
QEIKRINKIRRRLVKDSNTKKAGKTGPMKTLLVRVMTPDLRERLENLRKKPENIPQPISNTSRANLNKLLTDYTEMKKAILHVYDEEFQKDPVGLMSRVAQPASKKIDQNKLKPEMDEKGNLTTAGFACSQCGQPLFVYKLEQVSEKGKAYTNYFGRCNVAEHEKLILLAQLKPEKDSDEAVTYSLGKFGQRALDFYSIHVTKESTHPVKPLAQIAGNRYASHPVGKALSDACMGTIASFLSKYQDIIIEHQKVVKGNQKRLESLRELAGKENLEYPSVTLPPQPHTKEGVDAYNEVIARVRMWVNLNLWQKLKLSRDDAKPLLRLKGFPSFPLVERQANEVDWWDMVCNVKKLINEKKEDGKVFWQNLAGYKRQEALRPYLSSEEDRKKGKKFARYQLGDLLLHLEKKHGEDWGKVYDEAWERIDKKVEGLSKHIKLEEERRSEDAQSKAALTDWLRAKASFVIEGLKEADKDEFCRCELKLQKWYGDLRGKPFAIEAENSILDISGFSKQYNCAFIWQKDGVKKLNLYLIINYFKGGKLRFKKIKPEAFEANRFYTVINKKSGEIVPMEVNFNFDDPNLIILPLAFGKRQGREFIWNDLLSLETGSLKLANGRVIEKTLYNRRTRQDEPALFVALTFERREVLDSSNIKPMNLIGVDRGENIPAVIALTDPEGCPLSRFKDSLGNPTHILRIGESYKEKQRTIQAKKEVEQRRAGGYSRKYASKAKNLADDMVRNTARDLLYYAVTQDAMLIFENLSRGFGRQGKRTFMAERQYTRMEDWLTAKLAYEGLASKTYLSKTLAQYTSKTCSNCGFTITSADYDRVLEKLKKTATGWMTTINGKELKVEGQITYYNRYKRQNVVKDLSVELDRLSEESVNNDISSWTKGRSGEALSLLKKRFSHRPVQEKFVCLNCGFETHADEQAALNIARSWLFLRSQEYKKYQTNKTTGNTDKRAFVETWQSFYRKKLKEVWKPAV

SEQ ID NO: 34521 - protein, 978 aa, synthetic construct
  REGION 1..978: note = engineered CasX variant
QEIKRINKIRRRLVKDSNTKKAGKTGPMKTLLVRVMTPDLRERLENLRKKPENIPQPISNTSRANLNKLLTDYTEMKKAILHVYDEEFQKDPVGLMSRVAQPASKKIDQNKLKPEMDEKGNLTTAGFACSQCGQPLFVYKLEQVSEKGKAYTNYFGRCNVAEHEKLILLAQLKPEKDSDEAVTYSLGKFGQRALDFYSIHVTKESTHPVKPLAQIAGNRYASSPVGKALSDACMGTIASFLSKYQDIIIEHQKVVKGNQKRLESLRELAGKENLEYPSVTLPPQPHTKEGVDAYNEVIARVRMWVNLNLWQKLKLSRDDAKPLLRLKGFPSFPLVERQANEVDWWDMVCNVKKLINEKKEDGKVFWQNLAGYKRQEALRPYLSSEEDRKKGKKFARYQLGDLLLHLEKKHGEDWGKVYDEAWERIDKKVEGLSKHIKLEEERRSEDAQSKAALTDWLRAKASFVIEGLKEADKDEFCRCELKLQKWYGDLRGKPFAIEAENSILDISGFSKQYNCAFIWQKDGVKKLNLYLIINYFKGGKLRFKKIKPEAFEANRFYTVINKKSGEIVPMEVNFNFDDPNLIILPLAFGKRQGREFIWNDLLSLETGSLKLANGRVIEKTLYNRRTRQDEPALFVALTFERREVLDSSNIKPMNLIGVDRGENIPAVIALTDPEGCPLSRFKDSLGNPTHILRIGESYKEKQRTIQAKKEVEQRRAGGYSRKYASKAKNLADDMVRNTARDLLYYAVTQDAMLIFENLSRGFGRQGKRTFMAERQYTRMEDWLTAKLAYEGLASKTYLSKTLAQYTSKTCSNCGFTITSADYDRVLEKLKKTATGWMTTINGKELKVEGQITYYNRYKRQNVVKDLSVELDRLSEESVNNDISSWTKGRSGEALSLLKKRFSHRPVQEKFVCLNCGFETHADEQAALNIARSWLFLRSQEYKKYQTNKTTGNTDKRAFVETWQSFYRKKLKEVWKPAV

SEQ ID NO: 34522 - protein, 978 aa, synthetic construct
  REGION 1..978: note = engineered CasX variant
QEIKRINKIRRRLVKDSNTKKAGKTGPMKTLLVRVMTPDLRERLENLRKKPENIPQPISNTSRANLNKLLTDYTEMKKAILHVYDEEFQKDPVGLMSRVAQPASKKIDQNKLKPEMDEKGNLTTAGFACSQCGQPLFVYKLEQVSEKGKAYTNYFGRCNVAEHEKLILLAQLKPEKDSDEAVTYSLGKFGQRALDFYSIHVTKESTHPVKPLAQIAGNRYASTPVGKALSDACMGTIASFLSKYQDIIIEHQKVVKGNQKRLESLRELAGKENLEYPSVTLPPQPHTKEGVDAYNEVIARVRMWVNLNLWQKLKLSRDDAKPLLRLKGFPSFPLVERQANEVDWWDMVCNVKKLINEKKEDGKVFWQNLAGYKRQEALRPYLSSEEDRKKGKKFARYQLGDLLLHLEKKHGEDWGKVYDEAWERIDKKVEGLSKHIKLEEERRSEDAQSKAALTDWLRAKASFVIEGLKEADKDEFCRCELKLQKWYGDLRGKPFAIEAENSILDISGFSKQYNCAFIWQKDGVKKLNLYLIINYFKGGKLRFKKIKPEAFEANRFYTVINKKSGEIVPMEVNFNFDDPNLIILPLAFGKRQGREFIWNDLLSLETGSLKLANGRVIEKTLYNRRTRQDEPALFVALTFERREVLDSSNIKPMNLIGVDRGENIPAVIALTDPEGCPLSRFKDSLGNPTHILRIGESYKEKQRTIQAKKEVEQRRAGGYSRKYASKAKNLADDMVRNTARDLLYYAVTQDAMLIFENLSRGFGRQGKRTFMAERQYTRMEDWLTAKLAYEGLASKTYLSKTLAQYTSKTCSNCGFTITSADYDRVLEKLKKTATGWMTTINGKELKVEGQITYYNRYKRQNVVKDLSVELDRLSEESVNNDISSWTKGRSGEALSLLKKRFSHRPVQEKFVCLNCGFETHADEQAALNIARSWLFLRSQEYKKYQTNKTTGNTDKRAFVETWQSFYRKKLKEVWKPAV

SEQ ID NO: 34523 - protein, 978 aa, synthetic construct
  REGION 1..978: note = engineered CasX variant
QEIKRINKIRRRLVKDSNTKKAGKTGPMKTLLVRVMTPDLRERLENLRKKPENIPQPISNTSRANLNKLLTDYTEMKKAILHVYDEEFQKDPVGLMSRVAQPASKKIDQNKLKPEMDEKGNLTTAGFACSQCGQPLFVYKLEQVSEKGKAYTNYFGRCNVAEHEKLILLAQLKPEKDSDEAVTYSLGKFGQRALDFYSIHVTKESTHPVKPLAQIAGNRYASAPVGKALSDACMGTIASFLSKYQDIIIEHQKVVKGNQKRLESLRELAGKENLEYPSVTLPPQPHTKEGVDAYNEVIARVRMWVNLNLWQKLKLSRDDAKPLLRLKGFPSFPLVERQANEVDWWDMVCNVKKLINEKKEDGKVFWQNLAGYKRQEALRPYLSSEEDRKKGKKFARYQLGDLLLHLEKKHGEDWGKVYDEAWERIDKKVEGLSKHIKLEEERRSEDAQSKAALTDWLRAKASFVIEGLKEADKDEFCRCELKLQKWYGDLRGKPFAIEAENSILDISGFSKQYNCAFIWQKDGVKKLNLYLIINYFKGGKLRFKKIKPEAFEANRFYTVINKKSGEIVPMEVNFNFDDPNLIILPLAFGKRQGREFIWNDLLSLETGSLKLANGRVIEKTLYNRRTRQDEPALFVALTFERREVLDSSNIKPMNLIGVDRGENIPAVIALTDPEGCPLSRFKDSLGNPTHILRIGESYKEKQRTIQAKKEVEQRRAGGYSRKYASKAKNLADDMVRNTARDLLYYAVTQDAMLIFENLSRGFGRQGKRTFMAERQYTRMEDWLTAKLAYEGLASKTYLSKTLAQYTSKTCSNCGFTITSADYDRVLEKLKKTATGWMTTINGKELKVEGQITYYNRYKRQNVVKDLSVELDRLSEESVNNDISSWTKGRSGEALSLLKKRFSHRPVQEKFVCLNCGFETHADEQAALNIARSWLFLRSQEYKKYQTNKTTGNTDKRAFVETWQSFYRKKLKEVWKPAV

SEQ ID NO: 34524 - protein, 978 aa, synthetic construct
  REGION 1..978: note = engineered CasX variant
QEIKRINKIRRRLVKDSNTKKAGKTGPMKTLLVRVMTPDLRERLENLRKKPENIPQPISNTSRANLNKLLTDYTEMKKAILHVYDEEFQKDPVGLMSRVAQPASKKIDQNKLKPEMDEKGNLTTAGFACSQCGQPLFVYKLEQVSEKGKAYTNYFGRCNVAEHEKLILLAQLKPEKDSDEAVTYSLGKFGQRALDFYSIHVTKESTHPVKPLAQIAGNRYASVPVGKALSDACMGTIASFLSKYQDIIIEHQKVVKGNQKRLESLRELAGKENLEYPSVTLPPQPHTKEGVDAYNEVIARVRMWVNLNLWQKLKLSRDDAKPLLRLKGFPSFPLVERQANEVDWWDMVCNVKKLINEKKEDGKVFWQNLAGYKRQEALRPYLSSEEDRKKGKKFARYQLGDLLLHLEKKHGEDWGKVYDEAWERIDKKVEGLSKHIKLEEERRSEDAQSKAALTDWLRAKASFVIEGLKEADKDEFCRCELKLQKWYGDLRGKPFAIEAENSILDISGFSKQYNCAFIWQKDGVKKLNLYLIINYFKGGKLRFKKIKPEAFEANRFYTVINKKSGEIVPMEVNFNFDDPNLIILPLAFGKRQGREFIWNDLLSLETGSLKLANGRVIEKTLYNRRTRQDEPALFVALTFERREVLDSSNIKPMNLIGVDRGENIPAVIALTDPEGCPLSRFKDSLGNPTHILRIGESYKEKQRTIQAKKEVEQRRAGGYSRKYASKAKNLADDMVRNTARDLLYYAVTQDAMLIFENLSRGFGRQGKRTFMAERQYTRMEDWLTAKLAYEGLASKTYLSKTLAQYTSKTCSNCGFTITSADYDRVLEKLKKTATGWMTTINGKELKVEGQITYYNRYKRQNVVKDLSVELDRLSEESVNNDISSWTKGRSGEALSLLKKRFSHRPVQEKFVCLNCGFETHADEQAALNIARSWLFLRSQEYKKYQTNKTTGNTDKRAFVETWQSFYRKKLKEVWKPAV

SEQ ID NO: 34525 - protein, 978 aa, synthetic construct
  REGION 1..978: note = engineered CasX variant
QEIKRINKIRRRLVKDSNTKKAGKTGPMKTLLVRVMTPDLRERLENLRKKPENIPQPISNTSRANLNKLLTDYTEMKKAILHVYDEEFQKDPVGLMSRVAQPASKKIDQNKLKPEMDEKGNLTTAGFACSQCGQPLFVYKLEQVSEKGKAYTNYFGRCNVAEHEKLIKLAQLKPEKDSDEAVTYSLGKFGQRALDFYSIHVTKESTHPVKPLAQIAGNRYASGPVGKALSDACMGTIASFLSKYQDIIIEHQKVVKGNQKRLESLRELAGKENLEYPSVTLPPQPHTKEGVDAYNEVIARVRMWVNLNLWQKLKLSRDDAKPLLRLKGFPSFPLVERQANEVDWWDMVCNVKKLINEKKEDGKVFWQNLAGYKRQEALRPYLSSEEDRKKGKKFARYQLGDLLLHLEKKHGEDWGKVYDEAWERIDKKVEGLSKHIKLEEERRSEDAQSKAALTDWLRAKASFVIEGLKEADKDEFCRCELKLQKWYGDLRGKPFAIEAENSILDISGFSKQYNCAFIWQKDGVKKLNLYLIINYFKGGKLRFKKIKPEAFEANRFYTVINKKSGEIVPMEVNFNFDDPNLIILPLAFGKRQGREFIWNDLLSLETGSLKLANGRVIEKTLYNRRTRQDEPALFVALTFERREVLDSSNIKPMNLIGVDRGENIPAVIALTDPEGCPLSRFKDSLGNPTHILRIGESYKEKQRTIQAKKEVEQRRAGGYSRKYASKAKNLADDMVRNTARDLLYYAVTQDAMLIFENLSRGFGRQGKRTFMAERQYTRMEDWLTAKLAYEGLASKTYLSKTLAQYTSKTCSNCGFTITSADYDRVLEKLKKTATGWMTTINGKELKVEGQITYYNRYKRQNVVKDLSVELDRLSEESVNNDISSWTKGRSGEALSLLKKRFSHRPVQEKFVCLNCGFETHADEQAALNIARSWLFLRSQEYKKYQTNKTTGNTDKRAFVETWQSFYRKKLKEVWKPAV

SEQ ID NO: 34526 - protein, 977 aa, synthetic construct
  REGION 1..977: note = engineered CasX variant
QEIKRINKIRRRLVKDSNTKKAGKTGPMKTLLVRVMTPDLRERLENLRKKPENIPQPISNTSRANLNKLLTDYTEMKKAILHVYDEEFQKDPVGLMSRVAQPASKKIDQNKLKPEMDEKGNLTTAGFACSQCGQPLFVYKLEQVSEKGKAYTNYFGRCNVAEHEKLILLAQLKPEKDSDEAVTYSLGKFGQRALDFYSIHVTKESTHPVKPLAQIAGNRYASPVGKALSDACMGTIASFLSKYQDIIIEHQKVVKGNQKRLESLRELAGKENLEYPSVTLPPQPHTKEGVDAYNEVIARVRMWVNLNLWQKLKLSRDDAKPLLRLKGFPSFPLVERQANEVDWWDMVCNVKKLINEKKEDGKVFWQNLAGYKRQEALRPYLSSEEDRKKGKKFARYQLGDLLLHLEKKHGEDWGKVYDEAWERIDKKVEGLSKHIKLEEERRSEDAQSKAALTDWLRAKASFVIEGLKEADKDEFCRCELKLQKWYGDLRGKPFAIEAENSILDISGFSKQYNCAFIWQKDGVKKLNLYLIINYFKGGKLRFKKIKPEAFEANRFYTVINKKSGEIVPMEVNFNFDDPNLIILPLAFGKRQGREFIWNDLLSLETGSLKLANGRVIEKTLYNRRTRQDEPALFVALTFERREVLDSSNIKPMNLIGVDRGENIPAVIALTDPEGCPLSRFKDSLGNPTHILRIGESYKEKQRTIQAKKEVEQRRAGGYSRKYASKAKNLADDMVRNTARDLLYYAVTQDAMLIFENLSRGFGRQGKRTFMAERQYTRMEDWLTAKLAYEGLASKTYLSKTLAQYTSKTCSNCGFTITSADYDRVLEKLKKTATGWMTTINGKELKVEGQITYYNRYKRQNVVKDLSVELDRLSEESVNNDISSWTKGRSGEALSLLKKRFSHRPVQEKFVCLNCGFETHADEQAALNIARSWLFLRSQEYKKYQTNKTTGNTDKRAFVETWQSFYRKKLKEVWKPAV

SEQ ID NO: 34527 - protein, 978 aa, synthetic construct
  REGION 1..978: note = engineered CasX variant
QEIKRINKIRRRLVKDSNTKKAGKTGPMKTLLVRVMTPDLRERLENLRKKPENIPQPISNTSRANLNKLLTDYTEMKKAILHVYDEEFQKDPVGLMSRVAQPASKKIDQNKLKPEMDEKGNLTTAGFACSQCGQPLFVYKLEQVSEKGKAYTNYFGRCNVAEHEKLILLAQLKPEKDSDEAVTYSLGKFGQRALDFYSIHVTKESTHPVKPLAQIAGNRYASYPVGKALSDACMGTIASFLSKYQDIIIEHQKVVKGNQKRLESLRELAGKENLEYPSVTLPPQPHTKEGVDAYNEVIARVRMWVNLNLWQKLKLSRDDAKPLLRLKGFPSFPLVERQANEVDWWDMVCNVKKLINEKKEDGKVFWQNLAGYKRQEALRPYLSSEEDRKKGKKFARYQLGDLLLHLEKKHGEDWGKVYDEAWERIDKKVEGLSKHIKLEEERRSEDAQSKAALTDWLRAKASFVIEGLKEADKDEFCRCELKLQKWYGDLRGKPFAIEAENSILDISGFSKQYNCAFIWQKDGVKKLNLYLIINYFKGGKLRFKKIKPEAFEANRFYTVINKKSGEIVPMEVNFNFDDPNLIILPLAFGKRQGREFIWNDLLSLETGSLKLANGRVIEKTLYNRRTRQDEPALFVALTFERREVLDSSNIKPMNLIGVDRGENIPAVIALTDPEGCPLSRFKDSLGNPTHILRIGESYKEKQRTIQAKKEVEQRRAGGYSRKYASKAKNLADDMVRNTARDLLYYAVTQDAMLIFENLSRGFGRQGKRTFMAERQYTRMEDWLTAKLAYEGLPSKVYLSKTLAQYTSKTCSNCGFTITSADYDRVLEKLKKTATGWMTTINGKELKVEGQITYYNRYKRQNVVKDLSVELDRLSEESVNNDISSWTKGRSGEALSLLKKRFSHRPVQEKFVCLNCGFETHADEQAALNIARSWLFLRSQEYKKYQTNKTTGNTDKRAFVETWQSFYRKKLKEVWKPAV

SEQ ID NO: 34528 - protein, 978 aa, synthetic construct
  REGION 1..978: note = engineered CasX variant
QEIKRINKIRRRLVKDSNTKKAGKTGPMKTLLVRVMTPDLRERLENLRKKPENIPQPISNTSRANLNKLLTDYTEMKKAILHVYDEEFQKDPVGLMSRVAQPASKKIDQNKLKPEMDEKGNLTTAGFACSQCGQPLFVYKLEQVSEKGKAYTNYFGRCNVAEHEKLILLAQLKPEKDSDEAVTYSLGKFGQRALDFYSIHVTKESTHPVKPLAQIAGNRYASHPVGKALSDACMGTIASFLSKYQDIIIEHQKVVKGNQKRLESLRELAGKENLEYPSVTLPPQPHTKEGVDAYNEVIARVRMWVNLNLWQKLKLSRDDAKPLLRLKGFPSFPLVERQANEVDWWDMVCNVKKLINEKKEDGKVFWQNLAGYKRQEALRPYLSSEEDRKKGKKFARYQLGDLLLHLEKKHGEDWGKVYDEAWERIDKKVEGLSKHIKLEEERRSEDAQSKAALTDWLRAKASFVIEGLKEADKDEFCRCELKLQKWYGDLRGKPFAIEAENSILDISGFSKQYNCAFIWQKDGVKKLNLYLIINYFKGGKLRFKKIKPEAFEANRFYTVINKKSGEIVPMEVNFNFDDPNLIILPLAFGKRQGREFIWNDLLSLETGSLKLANGRVIEKTLYNRRTRQDEPALFVALTFERREVLDSSNIKPMNLIGVDRGENIPAVIALTDPEGCPLSRFKDSLGNPTHILRIGESYKEKQRTIQAKKEVEQRRAGGYSRKYASKAKNLADDMVRNTARDLLYYAVTQDAMLIFENLSRGFGRQGKRTFMAERQYTRMEDWLTAKLAYEGLPSKVYLSKTLAQYTSKTCSNCGFTITSADYDRVLEKLKKTATGWMTTINGKELKVEGQITYYNRYKRQNVVKDLSVELDRLSEESVNNDISSWTKGRSGEALSLLKKRFSHRPVQEKFVCLNCGFETHADEQAALNIARSWLFLRSQEYKKYQTNKTTGNTDKRAFVETWQSFYRKKLKEVWKPAV

SEQ ID NO: 34529 - protein, 978 aa, synthetic construct
  REGION 1..978: note = engineered CasX variant
QEIKRINKIRRRLVKDSNTKKAGKTGPMKTLLVRVMTPDLRERLENLRKKPENIPQPISNTSRANLNKLLTDYTEMKKAILHVYDEEFQKDPVGLMSRVAQPASKKIDQNKLKPEMDEKGNLTTAGFACSQCGQPLFVYKLEQVSEKGKAYTNYFGRCNVAEHEKLILLAQLKPEKDSDEAVTYSLGKFGQRALDFYSIHVTKESTHPVKPLAQIAGNRYASSPVGKALSDACMGTIASFLSKYQDIIIEHQKVVKGNQKRLESLRELAGKENLEYPSVTLPPQPHTKEGVDAYNEVIARVRMWVNLNLWQKLKLSRDDAKPLLRLKGFPSFPLVERQANEVDWWDMVCNVKKLINEKKEDGKVFWQNLAGYKRQEALRPYLSSEEDRKKGKKFARYQLGDLLLHLEKKHGEDWGKVYDEAWERIDKKVEGLSKHIKLEEERRSEDAQSKAALTDWLRAKASFVIEGLKEADKDEFCRCELKLQKWYGDLRGKPFAIEAENSILDISGFSKQYNCAFIWQKDGVKKLNLYLIINYFKGGKLRFKKIKPEAFEANRFYTVINKKSGEIVPMEVNFNFDDPNLIILPLAFGKRQGREFIWNDLLSLETGSLKLANGRVIEKTLYNRRTRQDEPALFVALTFERREVLDSSNIKPMNLIGVDRGENIPAVIALTDPEGCPLSRFKDSLGNPTHILRIGESYKEKQRTIQAKKEVEQRRAGGYSRKYASKAKNLADDMVRNTARDLLYYAVTQDAMLIFENLSRGFGRQGKRTFMAERQYTRMEDWLTAKLAYEGLPSKVYLSKTLAQYTSKTCSNCGFTITSADYDRVLEKLKKTATGWMTTINGKELKVEGQITYYNRYKRQNVVKDLSVELDRLSEESVNNDISSWTKGRSGEALSLLKKRFSHRPVQEKFVCLNCGFETHADEQAALNIARSWLFLRSQEYKKYQTNKTTGNTDKRAFVETWQSFYRKKLKEVWKPAV

SEQ ID NO: 34530 - protein, 978 aa, synthetic construct
  REGION 1..978: note = engineered CasX variant
QEIKRINKIRRRLVKDSNTKKAGKTGPMKTLLVRVMTPDLRERLENLRKKPENIPQPISNTSRANLNKLLTDYTEMKKAILHVYDEEFQKDPVGLMSRVAQPASKKIDQNKLKPEMDEKGNLTTAGFACSQCGQPLFVYKLEQVSEKGKAYTNYFGRCNVAEHEKLILLAQLKPEKDSDEAVTYSLGKFGQRALDFYSIHVTKESTHPVKPLAQIAGNRYASTPVGKALSDACMGTIASFLSKYQDIIIEHQKVVKGNQKRLESLRELAGKENLEYPSVTLPPQPHTKEGVDAYNEVIARVRMWVNLNLWQKLKLSRDDAKPLLRLKGFPSFPLVERQANEVDWWDMVCNVKKLINEKKEDGKVFWQNLAGYKRQEALRPYLSSEEDRKKGKKFARYQLGDLLLHLEKKHGEDWGKVYDEAWERIDKKVEGLSKHIKLEEERRSEDAQSKAALTDWLRAKASFVIEGLKEADKDEFCRCELKLQKWYGDLRGKPFAIEAENSILDISGFSKQYNCAFIWQKDGVKKLNLYLIINYFKGGKLRFKKIKPEAFEANRFYTVINKKSGEIVPMEVNFNFDDPNLIILPLAFGKRQGREFIWNDLLSLETGSLKLANGRVIEKTLYNRRTRQDEPALFVALTFERREVLDSSNIKPMNLIGVDRGENIPAVIALTDPEGCPLSRFKDSLGNPTHILRIGESYKEKQRTIQAKKEVEQRRAGGYSRKYASKAKNLADDMVRNTARDLLYYAVTQDAMLIFENLSRGFGRQGKRTFMAERQYTRMEDWLTAKLAYEGLPSKVYLSKTLAQYTSKTCSNCGFTITSADYDRVLEKLKKTATGWMTTINGKELKVEGQITYYNRYKRQNVVKDLSVELDRLSEESVNNDISSWTKGRSGEALSLLKKRFSHRPVQEKFVCLNCGFETHADEQAALNIARSWLFLRSQEYKKYQTNKTTGNTDKRAFVETWQSFYRKKLKEVWKPAV

SEQ ID NO: 34531 - protein, 978 aa, synthetic construct
  REGION 1..978: note = engineered CasX variant
QEIKRINKIRRRLVKDSNTKKAGKTGPMKTLLVRVMTPDLRERLENLRKKPENIPQPISNTSRANLNKLLTDYTEMKKAILHVYDEEFQKDPVGLMSRVAQPASKKIDQNKLKPEMDEKGNLTTAGFACSQCGQPLFVYKLEQVSEKGKAYTNYFGRCNVAEHEKLILLAQLKPEKDSDEAVTYSLGKFGQRALDFYSIHVTKESTHPVKPLAQIAGNRYASAPVGKALSDACMGTIASFLSKYQDIIIEHQKVVKGNQKRLESLRELAGKENLEYPSVTLPPQPHTKEGVDAYNEVIARVRMWVNLNLWQKLKLSRDDAKPLLRLKGFPSFPLVERQANEVDWWDMVCNVKKLINEKKEDGKVFWQNLAGYKRQEALRPYLSSEEDRKKGKKFARYQLGDLLLHLEKKHGEDWGKVYDEAWERIDKKVEGLSKHIKLEEERRSEDAQSKAALTDWLRAKASFVIEGLKEADKDEFCRCELKLQKWYGDLRGKPFAIEAENSILDISGFSKQYNCAFIWQKDGVKKLNLYLIINYFKGGKLRFKKIKPEAFEANRFYTVINKKSGEIVPMEVNFNFDDPNLIILPLAFGKRQGREFIWNDLLSLETGSLKLANGRVIEKTLYNRRTRQDEPALFVALTFERREVLDSSNIKPMNLIGVDRGENIPAVIALTDPEGCPLSRFKDSLGNPTHILRIGESYKEKQRTIQAKKEVEQRRAGGYSRKYASKAKNLADDMVRNTARDLLYYAVTQDAMLIFENLSRGFGRQGKRTFMAERQYTRMEDWLTAKLAYEGLPSKVYLSKTLAQYTSKTCSNCGFTITSADYDRVLEKLKKTATGWMTTINGKELKVEGQITYYNRYKRQNVVKDLSVELDRLSEESVNNDISSWTKGRSGEALSLLKKRFSHRPVQEKFVCLNCGFETHADEQAALNIARSWLFLRSQEYKKYQTNKTTGNTDKRAFVETWQSFYRKKLKEVWKPAV

SEQ ID NO: 34532 - protein, 978 aa, synthetic construct
  REGION 1..978: note = engineered CasX variant
QEIKRINKIRRRLVKDSNTKKAGKTGPMKTLLVRVMTPDLRERLENLRKKPENIPQPISNTSRANLNKLLTDYTEMKKAILHVYDEEFQKDPVGLMSRVAQPASKKIDQNKLKPEMDEKGNLTTAGFACSQCGQPLFVYKLEQVSEKGKAYTNYFGRCNVAEHEKLILLAQLKPEKDSDEAVTYSLGKFGQRALDFYSIHVTKESTHPVKPLAQIAGNRYASVPVGKALSDACMGTIASFLSKYQDIIIEHQKVVKGNQKRLESLRELAGKENLEYPSVTLPPQPHTKEGVDAYNEVIARVRMWVNLNLWQKLKLSRDDAKPLLRLKGFPSFPLVERQANEVDWWDMVCNVKKLINEKKEDGKVFWQNLAGYKRQEALRPYLSSEEDRKKGKKFARYQLGDLLLHLEKKHGEDWGKVYDEAWERIDKKVEGLSKHIKLEEERRSEDAQSKAALTDWLRAKASFVIEGLKEADKDEFCRCELKLQKWYGDLRGKPFAIEAENSILDISGFSKQYNCAFIWQKDGVKKLNLYLIINYFKGGKLRFKKIKPEAFEANRFYTVINKKSGEIVPMEVNFNFDDPNLIILPLAFGKRQGREFIWNDLLSLETGSLKLANGRVIEKTLYNRRTRQDEPALFVALTFERREVLDSSNIKPMNLIGVDRGENIPAVIALTDPEGCPLSRFKDSLGNPTHILRIGESYKEKQRTIQAKKEVEQRRAGGYSRKYASKAKNLADDMVRNTARDLLYYAVTQDAMLIFENLSRGFGRQGKRTFMAERQYTRMEDWLTAKLAYEGLPSKVYLSKTLAQYTSKTCSNCGFTITSADYDRVLEKLKKTATGWMTTINGKELKVEGQITYYNRYKRQNVVKDLSVELDRLSEESVNNDISSWTKGRSGEALSLLKKRFSHRPVQEKFVCLNCGFETHADEQAALNIARSWLFLRSQEYKKYQTNKTTGNTDKRAFVETWQSFYRKKLKEVWKPAV

SEQ ID NO: 34533 - protein, 978 aa, synthetic construct
  REGION 1..978: note = engineered CasX variant
QEIKRINKIRRRLVKDSNTKKAGKTGPMKTLLVRVMTPDLRERLENLRKKPENIPQPISNTSRANLNKLLTDYTEMKKAILHVYDEEFQKDPVGLMSRVAQPASKKIDQNKLKPEMDEKGNLTTAGFACSQCGQPLFVYKLEQVSEKGKAYTNYFGRCNVAEHEKLIKLAQLKPEKDSDEAVTYSLGKFGQRALDFYSIHVTKESTHPVKPLAQIAGNRYASGPVGKALSDACMGTIASFLSKYQDIIIEHQKVVKGNQKRLESLRELAGKENLEYPSVTLPPQPHTKEGVDAYNEVIARVRMWVNLNLWQKLKLSRDDAKPLLRLKGFPSFPLVERQANEVDWWDMVCNVKKLINEKKEDGKVFWQNLAGYKRQEALRPYLSSEEDRKKGKKFARYQLGDLLLHLEKKHGEDWGKVYDEAWERIDKKVEGLSKHIKLEEERRSEDAQSKAALTDWLRAKASFVIEGLKEADKDEFCRCELKLQKWYGDLRGKPFAIEAENSILDISGFSKQYNCAFIWQKDGVKKLNLYLIINYFKGGKLRFKKIKPEAFEANRFYTVINKKSGEIVPMEVNFNFDDPNLIILPLAFGKRQGREFIWNDLLSLETGSLKLANGRVIEKTLYNRRTRQDEPALFVALTFERREVLDSSNIKPMNLIGVDRGENIPAVIALTDPEGCPLSRFKDSLGNPTHILRIGESYKEKQRTIQAKKEVEQRRAGGYSRKYASKAKNLADDMVRNTARDLLYYAVTQDAMLIFENLSRGFGRQGKRTFMAERQYTRMEDWLTAKLAYEGLPSKVYLSKTLAQYTSKTCSNCGFTITSADYDRVLEKLKKTATGWMTTINGKELKVEGQITYYNRYKRQNVVKDLSVELDRLSEESVNNDISSWTKGRSGEALSLLKKRFSHRPVQEKFVCLNCGFETHADEQAALNIARSWLFLRSQEYKKYQTNKTTGNTDKRAFVETWQSFYRKKLKEVWKPAV

SEQ ID NO: 34534 - protein, 977 aa, synthetic construct
  REGION 1..977: note = engineered CasX variant
QEIKRINKIRRRLVKDSNTKKAGKTGPMKTLLVRVMTPDLRERLENLRKKPENIPQPISNTSRANLNKLLTDYTEMKKAILHVYDEEFQKDPVGLMSRVAQPASKKIDQNKLKPEMDEKGNLTTAGFACSQCGQPLFVYKLEQVSEKGKAYTNYFGRCNVAEHEKLILLAQLKPEKDSDEAVTYSLGKFGQRALDFYSIHVTKESTHPVKPLAQIAGNRYASPVGKALSDACMGTIASFLSKYQDIIIEHQKVVKGNQKRLESLRELAGKENLEYPSVTLPPQPHTKEGVDAYNEVIARVRMWVNLNLWQKLKLSRDDAKPLLRLKGFPSFPLVERQANEVDWWDMVCNVKKLINEKKEDGKVFWQNLAGYKRQEALRPYLSSEEDRKKGKKFARYQLGDLLLHLEKKHGEDWGKVYDEAWERIDKKVEGLSKHIKLEEERRSEDAQSKAALTDWLRAKASFVIEGLKEADKDEFCRCELKLQKWYGDLRGKPFAIEAENSILDISGFSKQYNCAFIWQKDGVKKLNLYLIINYFKGGKLRFKKIKPEAFEANRFYTVINKKSGEIVPMEVNFNFDDPNLIILPLAFGKRQGREFIWNDLLSLETGSLKLANGRVIEKTLYNRRTRQDEPALFVALTFERREVLDSSNIKPMNLIGVDRGENIPAVIALTDPEGCPLSRFKDSLGNPTHILRIGESYKEKQRTIQAKKEVEQRRAGGYSRKYASKAKNLADDMVRNTARDLLYYAVTQDAMLIFENLSRGFGRQGKRTFMAERQYTRMEDWLTAKLAYEGLPSKVYLSKTLAQYTSKTCSNCGFTITSADYDRVLEKLKKTATGWMTTINGKELKVEGQITYYNRYKRQNVVKDLSVELDRLSEESVNNDISSWTKGRSGEALSLLKKRFSHRPVQEKFVCLNCGFETHADEQAALNIARSWLFLRSQEYKKYQTNKTTGNTDKRAFVETWQSFYRKKLKEVWKPAV

SEQ ID NO: 34535 - protein, 979 aa, synthetic construct
  REGION 1..979: note = engineered CasX variant
QEIKRINKIRRRLVKDSNTKKAGKTGPMKTLLVRVMTPDLRERLENLRKKPENIPQPISNTSRANLNKLLTDYTEMKKAILHVYDEEFQKDPVGLMSRVAQPASKKIDQNKLKPEMDEKGNLTTAGFACSQCGQPLFVYKLEQVSEKGKAYTNYFGRCNVAEHEKLILLAQLKPEKDSDEAVTYSLGKFGQRALDFYSIHVTKESTHPVKPLAQIAGNRYASYPVGKALSDACMGTIASFLSKYQDIIIEHQKVVKGNQKRLESLRELAGKENLEYPSVTLPPQPHTKEGVDAYNEVIARVRMWVNLNLWQKLKLSRDDAKPLLRLKGFPSFPLVERQANEVDWWDMVCNVKKLINEKKEDGKVFWQNLAGYKRQEALRPYLSSEEDRKKGKKFARYQLGDLLLHLEKKHGEDWGKVYDEAWERIDKKVEGLSKHIKLEEERRSEDAQSKAALTDWLRAKASFVIEGLKEADKDEFCRCELKLQKWYGDLRGKPFAIEAENSILDISGFSKQYNCAFIWQKDGVKKLNLYLIINYFKGGKLRFKKIKPEAFEANRFYTVINKKSGEIVPMEVNFNFDDPNLIILPLAFGKRQGREFIWNDLLSLETGSLKLANGRVIEKTLYNRRTRQDEPALFVALTFERREVLDSSNIKPMNLIGVDRGENIPAVIALTDPEGCPLSRFKDSLGNPTHILRIGESYKEKQRTIQAKKEVEQRRAGGYSRKYASKAKNLADDMVRNTARDLLYYAVTQDAMLIFENLSRGFGRQGKRTFMAERQYTRMEDWLTAKLAYEGPLPSKTYLSKTLAQYTSKTCSNCGFTITSADYDRVLEKLKKTATGWMTTINGKELKVEGQITYYNRYKRQNVVKDLSVELDRLSEESVNNDISSWTKGRSGEALSLLKKRFSHRPVQEKFVCLNCGFETHADEQAALNIARSWLFLRSQEYKKYQTNKTTGNTDKRAFVETWQSFYRKKLKEVWKPAV

SEQ ID NO: 34536 - protein, 979 aa, synthetic construct
  REGION 1..979: note = engineered CasX variant
QEIKRINKIRRRLVKDSNTKKAGKTGPMKTLLVRVMTPDLRERLENLRKKPENIPQPISNTSRANLNKLLTDYTEMKKAILHVYDEEFQKDPVGLMSRVAQPASKKIDQNKLKPEMDEKGNLTTAGFACSQCGQPLFVYKLEQVSEKGKAYTNYFGRCNVAEHEKLILLAQLKPEKDSDEAVTYSLGKFGQRALDFYSIHVTKESTHPVKPLAQIAGNRYASHPVGKALSDACMGTIASFLSKYQDIIIEHQKVVKGNQKRLESLRELAGKENLEYPSVTLPPQPHTKEGVDAYNEVIARVRMWVNLNLWQKLKLSRDDAKPLLRLKGFPSFPLVERQANEVDWWDMVCNVKKLINEKKEDGKVFWQNLAGYKRQEALRPYLSSEEDRKKGKKFARYQLGDLLLHLEKKHGEDWGKVYDEAWERIDKKVEGLSKHIKLEEERRSEDAQSKAALTDWLRAKASFVIEGLKEADKDEFCRCELKLQKWYGDLRGKPFAIEAENSILDISGFSKQYNCAFIWQKDGVKKLNLYLIINYFKGGKLRFKKIKPEAFEANRFYTVINKKSGEIVPMEVNFNFDDPNLIILPLAFGKRQGREFIWNDLLSLETGSLKLANGRVIEKTLYNRRTRQDEPALFVALTFERREVLDSSNIKPMNLIGVDRGENIPAVIALTDPEGCPLSRFKDSLGNPTHILRIGESYKEKQRTIQAKKEVEQRRAGGYSRKYASKAKNLADDMVRNTARDLLYYAVTQDAMLIFENLSRGFGRQGKRTFMAERQYTRMEDWLTAKLAYEGPLPSKTYLSKTLAQYTSKTCSNCGFTITSADYDRVLEKLKKTATGWMTTINGKELKVEGQITYYNRYKRQNVVKDLSVELDRLSEESVNNDISSWTKGRSGEALSLLKKRFSHRPVQEKFVCLNCGFETHADEQAALNIARSWLFLRSQEYKKYQTNKTTGNTDKRAFVETWQSFYRKKLKEVWKPAV

SEQ ID NO: 34537 - protein, 979 aa, synthetic construct
  REGION 1..979: note = engineered CasX variant
QEIKRINKIRRRLVKDSNTKKAGKTGPMKTLLVRVMTPDLRERLENLRKKPENIPQPISNTSRANLNKLLTDYTEMKKAILHVYDEEFQKDPVGLMSRVAQPASKKIDQNKLKPEMDEKGNLTTAGFACSQCGQPLFVYKLEQVSEKGKAYTNYFGRCNVAEHEKLILLAQLKPEKDSDEAVTYSLGKFGQRALDFYSIHVTKESTHPVKPLAQIAGNRYASSPVGKALSDACMGTIASFLSKYQDIIIEHQKVVKGNQKRLESLRELAGKENLEYPSVTLPPQPHTKEGVDAYNEVIARVRMWVNLNLWQKLKLSRDDAKPLLRLKGFPSFPLVERQANEVDWWDMVCNVKKLINEKKEDGKVFWQNLAGYKRQEALRPYLSSEEDRKKGKKFARYQLGDLLLHLEKKHGEDWGKVYDEAWERIDKKVEGLSKHIKLEEERRSEDAQSKAALTDWLRAKASFVIEGLKEADKDEFCRCELKLQKWYGDLRGKPFAIEAENSILDISGFSKQYNCAFIWQKDGVKKLNLYLIINYFKGGKLRFKKIKPEAFEANRFYTVINKKSGEIVPMEVNFNFDDPNLIILPLAFGKRQGREFIWNDLLSLETGSLKLANGRVIEKTLYNRRTRQDEPALFVALTFERREVLDSSNIKPMNLIGVDRGENIPAVIALTDPEGCPLSRFKDSLGNPTHILRIGESYKEKQRTIQAKKEVEQRRAGGYSRKYASKAKNLADDMVRNTARDLLYYAVTQDAMLIFENLSRGFGRQGKRTFMAERQYTRMEDWLTAKLAYEGPLPSKTYLSKTLAQYTSKTCSNCGFTITSADYDRVLEKLKKTATGWMTTINGKELKVEGQITYYNRYKRQNVVKDLSVELDRLSEESVNNDISSWTKGRSGEALSLLKKRFSHRPVQEKFVCLNCGFETHADEQAALNIARSWLFLRSQEYKKYQTNKTTGNTDKRAFVETWQSFYRKKLKEVWKPAV

SEQ ID NO: 34538 - protein, 979 aa, synthetic construct
  REGION 1..979: note = engineered CasX variant
QEIKRINKIRRRLVKDSNTKKAGKTGPMKTLLVRVMTPDLRERLENLRKKPENIPQPISNTSRANLNKLLTDYTEMKKAILHVYDEEFQKDPVGLMSRVAQPASKKIDQNKLKPEMDEKGNLTTAGFACSQCGQPLFVYKLEQVSEKGKAYTNYFGRCNVAEHEKLILLAQLKPEKDSDEAVTYSLGKFGQRALDFYSIHVTKESTHPVKPLAQIAGNRYASTPVGKALSDACMGTIASFLSKYQDIIIEHQKVVKGNQKRLESLRELAGKENLEYPSVTLPPQPHTKEGVDAYNEVIARVRMWVNLNLWQKLKLSRDDAKPLLRLKGFPSFPLVERQANEVDWWDMVCNVKKLINEKKEDGKVFWQNLAGYKRQEALRPYLSSEEDRKKGKKFARYQLGDLLLHLEKKHGEDWGKVYDEAWERIDKKVEGLSKHIKLEEERRSEDAQSKAALTDWLRAKASFVIEGLKEADKDEFCRCELKLQKWYGDLRGKPFAIEAENSILDISGFSKQYNCAFIWQKDGVKKLNLYLIINYFKGGKLRFKKIKPEAFEANRFYTVINKKSGEIVPMEVNFNFDDPNLIILPLAFGKRQGREFIWNDLLSLETGSLKLANGRVIEKTLYNRRTRQDEPALFVALTFERREVLDSSNIKPMNLIGVDRGENIPAVIALTDPEGCPLSRFKDSLGNPTHILRIGESYKEKQRTIQAKKEVEQRRAGGYSRKYASKAKNLADDMVRNTARDLLYYAVTQDAMLIFENLSRGFGRQGKRTFMAERQYTRMEDWLTAKLAYEGPLPSKTYLSKTLAQYTSKTCSNCGFTITSADYDRVLEKLKKTATGWMTTINGKELKVEGQITYYNRYKRQNVVKDLSVELDRLSEESVNNDISSWTKGRSGEALSLLKKRFSHRPVQEKFVCLNCGFETHADEQAALNIARSWLFLRSQEYKKYQTNKTTGNTDKRAFVETWQSFYRKKLKEVWKPAV

SEQ ID NO: 34539 - protein, 979 aa, synthetic construct
  REGION 1..979: note = engineered CasX variant
QEIKRINKIRRRLVKDSNTKKAGKTGPMKTLLVRVMTPDLRERLENLRKKPENIPQPISNTSRANLNKLLTDYTEMKKAILHVYDEEFQKDPVGLMSRVAQPASKKIDQNKLKPEMDEKGNLTTAGFACSQCGQPLFVYKLEQVSEKGKAYTNYFGRCNVAEHEKLILLAQLKPEKDSDEAVTYSLGKFGQRALDFYSIHVTKESTHPVKPLAQIAGNRYASAPVGKALSDACMGTIASFLSKYQDIIIEHQKVVKGNQKRLESLRELAGKENLEYPSVTLPPQPHTKEGVDAYNEVIARVRMWVNLNLWQKLKLSRDDAKPLLRLKGFPSFPLVERQANEVDWWDMVCNVKKLINEKKEDGKVFWQNLAGYKRQEALRPYLSSEEDRKKGKKFARYQLGDLLLHLEKKHGEDWGKVYDEAWERIDKKVEGLSKHIKLEEERRSEDAQSKAALTDWLRAKASFVIEGLKEADKDEFCRCELKLQKWYGDLRGKPFAIEAENSILDISGFSKQYNCAFIWQKDGVKKLNLYLIINYFKGGKLRFKKIKPEAFEANRFYTVINKKSGEIVPMEVNFNFDDPNLIILPLAFGKRQGREFIWNDLLSLETGSLKLANGRVIEKTLYNRRTRQDEPALFVALTFERREVLDSSNIKPMNLIGVDRGENIPAVIALTDPEGCPLSRFKDSLGNPTHILRIGESYKEKQRTIQAKKEVEQRRAGGYSRKYASKAKNLADDMVRNTARDLLYYAVTQDAMLIFENLSRGFGRQGKRTFMAERQYTRMEDWLTAKLAYEGPLPSKTYLSKTLAQYTSKTCSNCGFTITSADYDRVLEKLKKTATGWMTTINGKELKVEGQITYYNRYKRQNVVKDLSVELDRLSEESVNNDISSWTKGRSGEALSLLKKRFSHRPVQEKFVCLNCGFETHADEQAALNIARSWLFLRSQEYKKYQTNKTTGNTDKRAFVETWQSFYRKKLKEVWKPAV

SEQ ID NO: 34540 - protein, 979 aa, synthetic construct
  REGION 1..979: note = engineered CasX variant
QEIKRINKIRRRLVKDSNTKKAGKTGPMKTLLVRVMTPDLRERLENLRKKPENIPQPISNTSRANLNKLLTDYTEMKKAILHVYDEEFQKDPVGLMSRVAQPASKKIDQNKLKPEMDEKGNLTTAGFACSQCGQPLFVYKLEQVSEKGKAYTNYFGRCNVAEHEKLILLAQLKPEKDSDEAVTYSLGKFGQRALDFYSIHVTKESTHPVKPLAQIAGNRYASVPVGKALSDACMGTIASFLSKYQDIIIEHQKVVKGNQKRLESLRELAGKENLEYPSVTLPPQPHTKEGVDAYNEVIARVRMWVNLNLWQKLKLSRDDAKPLLRLKGFPSFPLVERQANEVDWWDMVCNVKKLINEKKEDGKVFWQNLAGYKRQEALRPYLSSEEDRKKGKKFARYQLGDLLLHLEKKHGEDWGKVYDEAWERIDKKVEGLSKHIKLEEERRSEDAQSKAALTDWLRAKASFVIEGLKEADKDEFCRCELKLQKWYGDLRGKPFAIEAENSILDISGFSKQYNCAFIWQKDGVKKLNLYLIINYFKGGKLRFKKIKPEAFEANRFYTVINKKSGEIVPMEVNFNFDDPNLIILPLAFGKRQGREFIWNDLLSLETGSLKLANGRVIEKTLYNRRTRQDEPALFVALTFERREVLDSSNIKPMNLIGVDRGENIPAVIALTDPEGCPLSRFKDSLGNPTHILRIGESYKEKQRTIQAKKEVEQRRAGGYSRKYASKAKNLADDMVRNTARDLLYYAVTQDAMLIFENLSRGFGRQGKRTFMAERQYTRMEDWLTAKLAYEGPLPSKTYLSKTLAQYTSKTCSNCGFTITSADYDRVLEKLKKTATGWMTTINGKELKVEGQITYYNRYKRQNVVKDLSVELDRLSEESVNNDISSWTKGRSGEALSLLKKRFSHRPVQEKFVCLNCGFETHADEQAALNIARSWLFLRSQEYKKYQTNKTTGNTDKRAFVETWQSFYRKKLKEVWKPAV

SEQ ID NO: 34541 - protein, 979 aa, synthetic construct
  REGION 1..979: note = engineered CasX variant
QEIKRINKIRRRLVKDSNTKKAGKTGPMKTLLVRVMTPDLRERLENLRKKPENIPQPISNTSRANLNKLLTDYTEMKKAILHVYDEEFQKDPVGLMSRVAQPASKKIDQNKLKPEMDEKGNLTTAGFACSQCGQPLFVYKLEQVSEKGKAYTNYFGRCNVAEHEKLIKLAQLKPEKDSDEAVTYSLGKFGQRALDFYSIHVTKESTHPVKPLAQIAGNRYASGPVGKALSDACMGTIASFLSKYQDIIIEHQKVVKGNQKRLESLRELAGKENLEYPSVTLPPQPHTKEGVDAYNEVIARVRMWVNLNLWQKLKLSRDDAKPLLRLKGFPSFPLVERQANEVDWWDMVCNVKKLINEKKEDGKVFWQNLAGYKRQEALRPYLSSEEDRKKGKKFARYQLGDLLLHLEKKHGEDWGKVYDEAWERIDKKVEGLSKHIKLEEERRSEDAQSKAALTDWLRAKASFVIEGLKEADKDEFCRCELKLQKWYGDLRGKPFAIEAENSILDISGFSKQYNCAFIWQKDGVKKLNLYLIINYFKGGKLRFKKIKPEAFEANRFYTVINKKSGEIVPMEVNFNFDDPNLIILPLAFGKRQGREFIWNDLLSLETGSLKLANGRVIEKTLYNRRTRQDEPALFVALTFERREVLDSSNIKPMNLIGVDRGENIPAVIALTDPEGCPLSRFKDSLGNPTHILRIGESYKEKQRTIQAKKEVEQRRAGGYSRKYASKAKNLADDMVRNTARDLLYYAVTQDAMLIFENLSRGFGRQGKRTFMAERQYTRMEDWLTAKLAYEGPLPSKTYLSKTLAQYTSKTCSNCGFTITSADYDRVLEKLKKTATGWMTTINGKELKVEGQITYYNRYKRQNVVKDLSVELDRLSEESVNNDISSWTKGRSGEALSLLKKRFSHRPVQEKFVCLNCGFETHADEQAALNIARSWLFLRSQEYKKYQTNKTTGNTDKRAFVETWQSFYRKKLKEVWKPAV

SEQ ID NO: 34542 - protein, 978 aa, synthetic construct
  REGION 1..978: note = engineered CasX variant
QEIKRINKIRRRLVKDSNTKKAGKTGPMKTLLVRVMTPDLRERLENLRKKPENIPQPISNTSRANLNKLLTDYTEMKKAILHVYDEEFQKDPVGLMSRVAQPASKKIDQNKLKPEMDEKGNLTTAGFACSQCGQPLFVYKLEQVSEKGKAYTNYFGRCNVAEHEKLILLAQLKPEKDSDEAVTYSLGKFGQRALDFYSIHVTKESTHPVKPLAQIAGNRYASPVGKALSDACMGTIASFLSKYQDIIIEHQKVVKGNQKRLESLRELAGKENLEYPSVTLPPQPHTKEGVDAYNEVIARVRMWVNLNLWQKLKLSRDDAKPLLRLKGFPSFPLVERQANEVDWWDMVCNVKKLINEKKEDGKVFWQNLAGYKRQEALRPYLSSEEDRKKGKKFARYQLGDLLLHLEKKHGEDWGKVYDEAWERIDKKVEGLSKHIKLEEERRSEDAQSKAALTDWLRAKASFVIEGLKEADKDEFCRCELKLQKWYGDLRGKPFAIEAENSILDISGFSKQYNCAFIWQKDGVKKLNLYLIINYFKGGKLRFKKIKPEAFEANRFYTVINKKSGEIVPMEVNFNFDDPNLIILPLAFGKRQGREFIWNDLLSLETGSLKLANGRVIEKTLYNRRTRQDEPALFVALTFERREVLDSSNIKPMNLIGVDRGENIPAVIALTDPEGCPLSRFKDSLGNPTHILRIGESYKEKQRTIQAKKEVEQRRAGGYSRKYASKAKNLADDMVRNTARDLLYYAVTQDAMLIFENLSRGFGRQGKRTFMAERQYTRMEDWLTAKLAYEGPLPSKTYLSKTLAQYTSKTCSNCGFTITSADYDRVLEKLKKTATGWMTTINGKELKVEGQITYYNRYKRQNVVKDLSVELDRLSEESVNNDISSWTKGRSGEALSLLKKRFSHRPVQEKFVCLNCGFETHADEQAALNIARSWLFLRSQEYKKYQTNKTTGNTDKRAFVETWQSFYRKKLKEVWKPAV

SEQ ID NO: 34543 - protein, 979 aa, synthetic construct
  REGION 1..979: note = engineered CasX variant
QEIKRINKIRRRLVKDSNTKKAGKTGPMKTLLVRVMTPDLRERLENLRKKPENIPQPISNTSRANLNKLLTDYTEMKKAILHVYDEEFQKDPVGLMSRVAQPASKKIDQNKLKPEMDEKGNLTTAGFACSQCGQPLFVYKLEQVSEKGKAYTNYFGRCNVAEHEKLILLAQLKPEKDSDEAVTYSLGKFGQRALDFYSIHVTKESTHPVKPLAQIAGNRYASYPVGKALSDACMGTIASFLSKYQDIIIEHQKVVKGNQKRLESLRELAGKENLEYPSVTLPPQPHTKEGVDAYNEVIARVRMWVNLNLWQKLKLSRDDAKPLLRLKGFPSFPLVERQANEVDWWDMVCNVKKLINEKKEDGKVFWQNLAGYKRQEALRPYLSSEEDVRKKGKKFARYQLGDLLLHLEKKHGEDWGKVYDEAWERIDKKVEGLSKHIKLEEERRSEDAQSKAALTDWLRAKASFVIEGLKEADKDEFCRCELKLQKWYGDLRGKPFAIEAENSILDISGFSKQYNCAFIWQKDGVKKLNLYLIINYFKGGKLRFKKIKPEAFEANRFYTVINKKSGEIVPMEVNFNFDDPNLIILPLAFGKRQGREFIWNDLLSLETGSLKLANGRVIEKTLYNRRTRQDEPALFVALTFERREVLDSSNIKPMNLIGVDRGENIPAVIALTDPEGCPLSRFKDSLGNPTHILRIGESYKEKQRTIQAKKEVEQRRAGGYSRKYASKAKNLADDMVRNTARDLLYYAVTQDAMLIFENLSRGFGRQGKRTFMAERQYTRMEDWLTAKLAYEGLPSKTYLSKTLAQYTSKTCSNCGFTITSADYDRVLEKLKKTATGWMTTINGKELKVEGQITYYNRYKRQNVVKDLSVELDRLSEESVNNDISSWTKGRSGEALSLLKKRFSHRPVQEKFVCLNCGFETHADEQAALNIARSWLFLRSQEYKKYQTNKTTGNTDKRAFVETWQSFYRKKLKEVWKPAV

SEQ ID NO: 34544 - protein, 979 aa, synthetic construct
  REGION 1..979: note = engineered CasX variant
QEIKRINKIRRRLVKDSNTKKAGKTGPMKTLLVRVMTPDLRERLENLRKKPENIPQPISNTSRANLNKLLTDYTEMKKAILHVYDEEFQKDPVGLMSRVAQPASKKIDQNKLKPEMDEKGNLTTAGFACSQCGQPLFVYKLEQVSEKGKAYTNYFGRCNVAEHEKLILLAQLKPEKDSDEAVTYSLGKFGQRALDFYSIHVTKESTHPVKPLAQIAGNRYASHPVGKALSDACMGTIASFLSKYQDIIIEHQKVVKGNQKRLESLRELAGKENLEYPSVTLPPQPHTKEGVDAYNEVIARVRMWVNLNLWQKLKLSRDDAKPLLRLKGFPSFPLVERQANEVDWWDMVCNVKKLINEKKEDGKVFWQNLAGYKRQEALRPYLSSEEDVRKKGKKFARYQLGDLLLHLEKKHGEDWGKVYDEAWERIDKKVEGLSKHIKLEEERRSEDAQSKAALTDWLRAKASFVIEGLKEADKDEFCRCELKLQKWYGDLRGKPFAIEAENSILDISGFSKQYNCAFIWQKDGVKKLNLYLIINYFKGGKLRFKKIKPEAFEANRFYTVINKKSGEIVPMEVNFNFDDPNLIILPLAFGKRQGREFIWNDLLSLETGSLKLANGRVIEKTLYNRRTRQDEPALFVALTFERREVLDSSNIKPMNLIGVDRGENIPAVIALTDPEGCPLSRFKDSLGNPTHILRIGESYKEKQRTIQAKKEVEQRRAGGYSRKYASKAKNLADDMVRNTARDLLYYAVTQDAMLIFENLSRGFGRQGKRTFMAERQYTRMEDWLTAKLAYEGLPSKTYLSKTLAQYTSKTCSNCGFTITSADYDRVLEKLKKTATGWMTTINGKELKVEGQITYYNRYKRQNVVKDLSVELDRLSEESVNNDISSWTKGRSGEALSLLKKRFSHRPVQEKFVCLNCGFETHADEQAALNIARSWLFLRSQEYKKYQTNKTTGNTDKRAFVETWQSFYRKKLKEVWKPAV

SEQ ID NO: 34545 - protein, 979 aa, synthetic construct
  REGION 1..979: note = engineered CasX variant
QEIKRINKIRRRLVKDSNTKKAGKTGPMKTLLVRVMTPDLRERLENLRKKPENIPQPISNTSRANLNKLLTDYTEMKKAILHVYDEEFQKDPVGLMSRVAQPASKKIDQNKLKPEMDEKGNLTTAGFACSQCGQPLFVYKLEQVSEKGKAYTNYFGRCNVAEHEKLILLAQLKPEKDSDEAVTYSLGKFGQRALDFYSIHVTKESTHPVKPLAQIAGNRYASSPVGKALSDACMGTIASFLSKYQDIIIEHQKVVKGNQKRLESLRELAGKENLEYPSVTLPPQPHTKEGVDAYNEVIARVRMWVNLNLWQKLKLSRDDAKPLLRLKGFPSFPLVERQANEVDWWDMVCNVKKLINEKKEDGKVFWQNLAGYKRQEALRPYLSSEEDVRKKGKKFARYQLGDLLLHLEKKHGEDWGKVYDEAWERIDKKVEGLSKHIKLEEERRSEDAQSKAALTDWLRAKASFVIEGLKEADKDEFCRCELKLQKWYGDLRGKPFAIEAENSILDISGFSKQYNCAFIWQKDGVKKLNLYLIINYFKGGKLRFKKIKPEAFEANRFYTVINKKSGEIVPMEVNFNFDDPNLIILPLAFGKRQGREFIWNDLLSLETGSLKLANGRVIEKTLYNRRTRQDEPALFVALTFERREVLDSSNIKPMNLIGVDRGENIPAVIALTDPEGCPLSRFKDSLGNPTHILRIGESYKEKQRTIQAKKEVEQRRAGGYSRKYASKAKNLADDMVRNTARDLLYYAVTQDAMLIFENLSRGFGRQGKRTFMAERQYTRMEDWLTAKLAYEGLPSKTYLSKTLAQYTSKTCSNCGFTITSADYDRVLEKLKKTATGWMTTINGKELKVEGQITYYNRYKRQNVVKDLSVELDRLSEESVNNDISSWTKGRSGEALSLLKKRFSHRPVQEKFVCLNCGFETHADEQAALNIARSWLFLRSQEYKKYQTNKTTGNTDKRAFVETWQSFYRKKLKEVWKPAV

SEQ ID NO: 34546 - protein, 979 aa, synthetic construct
  REGION 1..979: note = engineered CasX variant
QEIKRINKIRRRLVKDSNTKKAGKTGPMKTLLVRVMTPDLRERLENLRKKPENIPQPISNTSRANLNKLLTDYTEMKKAILHVYDEEFQKDPVGLMSRVAQPASKKIDQNKLKPEMDEKGNLTTAGFACSQCGQPLFVYKLEQVSEKGKAYTNYFGRCNVAEHEKLILLAQLKPEKDSDEAVTYSLGKFGQRALDFYSIHVTKESTHPVKPLAQIAGNRYASTPVGKALSDACMGTIASFLSKYQDIIIEHQKVVKGNQKRLESLRELAGKENLEYPSVTLPPQPHTKEGVDAYNEVIARVRMWVNLNLWQKLKLSRDDAKPLLRLKGFPSFPLVERQANEVDWWDMVCNVKKLINEKKEDGKVFWQNLAGYKRQEALRPYLSSEEDVRKKGKKFARYQLGDLLLHLEKKHGEDWGKVYDEAWERIDKKVEGLSKHIKLEEERRSEDAQSKAALTDWLRAKASFVIEGLKEADKDEFCRCELKLQKWYGDLRGKPFAIEAENSILDISGFSKQYNCAFIWQKDGVKKLNLYLIINYFKGGKLRFKKIKPEAFEANRFYTVINKKSGEIVPMEVNFNFDDPNLIILPLAFGKRQGREFIWNDLLSLETGSLKLANGRVIEKTLYNRRTRQDEPALFVALTFERREVLDSSNIKPMNLIGVDRGENIPAVIALTDPEGCPLSRFKDSLGNPTHILRIGESYKEKQRTIQAKKEVEQRRAGGYSRKYASKAKNLADDMVRNTARDLLYYAVTQDAMLIFENLSRGFGRQGKRTFMAERQYTRMEDWLTAKLAYEGLPSKTYLSKTLAQYTSKTCSNCGFTITSADYDRVLEKLKKTATGWMTTINGKELKVEGQITYYNRYKRQNVVKDLSVELDRLSEESVNNDISSWTKGRSGEALSLLKKRFSHRPVQEKFVCLNCGFETHADEQAALNIARSWLFLRSQEYKKYQTNKTTGNTDKRAFVETWQSFYRKKLKEVWKPAV

SEQ ID NO: 34547 - protein, 979 aa, synthetic construct
  REGION 1..979: note = engineered CasX variant
QEIKRINKIRRRLVKDSNTKKAGKTGPMKTLLVRVMTPDLRERLENLRKKPENIPQPISNTSRANLNKLLTDYTEMKKAILHVYDEEFQKDPVGLMSRVAQPASKKIDQNKLKPEMDEKGNLTTAGFACSQCGQPLFVYKLEQVSEKGKAYTNYFGRCNVAEHEKLILLAQLKPEKDSDEAVTYSLGKFGQRALDFYSIHVTKESTHPVKPLAQIAGNRYASAPVGKALSDACMGTIASFLSKYQDIIIEHQKVVKGNQKRLESLRELAGKENLEYPSVTLPPQPHTKEGVDAYNEVIARVRMWVNLNLWQKLKLSRDDAKPLLRLKGFPSFPLVERQANEVDWWDMVCNVKKLINEKKEDGKVFWQNLAGYKRQEALRPYLSSEEDVRKKGKKFARYQLGDLLLHLEKKHGEDWGKVYDEAWERIDKKVEGLSKHIKLEEERRSEDAQSKAALTDWLRAKASFVIEGLKEADKDEFCRCELKLQKWYGDLRGKPFAIEAENSILDISGFSKQYNCAFIWQKDGVKKLNLYLIINYFKGGKLRFKKIKPEAFEANRFYTVINKKSGEIVPMEVNFNFDDPNLIILPLAFGKRQGREFIWNDLLSLETGSLKLANGRVIEKTLYNRRTRQDEPALFVALTFERREVLDSSNIKPMNLIGVDRGENIPAVIALTDPEGCPLSRFKDSLGNPTHILRIGESYKEKQRTIQAKKEVEQRRAGGYSRKYASKAKNLADDMVRNTARDLLYYAVTQDAMLIFENLSRGFGRQGKRTFMAERQYTRMEDWLTAKLAYEGLPSKTYLSKTLAQYTSKTCSNCGFTITSADYDRVLEKLKKTATGWMTTINGKELKVEGQITYYNRYKRQNVVKDLSVELDRLSEESVNNDISSWTKGRSGEALSLLKKRFSHRPVQEKFVCLNCGFETHADEQAALNIARSWLFLRSQEYKKYQTNKTTGNTDKRAFVETWQSFYRKKLKEVWKPAV

SEQ ID NO: 34548 - protein, 979 aa, synthetic construct
  REGION 1..979: note = engineered CasX variant
QEIKRINKIRRRLVKDSNTKKAGKTGPMKTLLVRVMTPDLRERLENLRKKPENIPQPISNTSRANLNKLLTDYTEMKKAILHVYDEEFQKDPVGLMSRVAQPASKKIDQNKLKPEMDEKGNLTTAGFACSQCGQPLFVYKLEQVSEKGKAYTNYFGRCNVAEHEKLILLAQLKPEKDSDEAVTYSLGKFGQRALDFYSIHVTKESTHPVKPLAQIAGNRYASVPVGKALSDACMGTIASFLSKYQDIIIEHQKVVKGNQKRLESLRELAGKENLEYPSVTLPPQPHTKEGVDAYNEVIARVRMWVNLNLWQKLKLSRDDAKPLLRLKGFPSFPLVERQANEVDWWDMVCNVKKLINEKKEDGKVFWQNLAGYKRQEALRPYLSSEEDVRKKGKKFARYQLGDLLLHLEKKHGEDWGKVYDEAWERIDKKVEGLSKHIKLEEERRSEDAQSKAALTDWLRAKASFVIEGLKEADKDEFCRCELKLQKWYGDLRGKPFAIEAENSILDISGFSKQYNCAFIWQKDGVKKLNLYLIINYFKGGKLRFKKIKPEAFEANRFYTVINKKSGEIVPMEVNFNFDDPNLIILPLAFGKRQGREFIWNDLLSLETGSLKLANGRVIEKTLYNRRTRQDEPALFVALTFERREVLDSSNIKPMNLIGVDRGENIPAVIALTDPEGCPLSRFKDSLGNPTHILRIGESYKEKQRTIQAKKEVEQRRAGGYSRKYASKAKNLADDMVRNTARDLLYYAVTQDAMLIFENLSRGFGRQGKRTFMAERQYTRMEDWLTAKLAYEGLPSKTYLSKTLAQYTSKTCSNCGFTITSADYDRVLEKLKKTATGWMTTINGKELKVEGQITYYNRYKRQNVVKDLSVELDRLSEESVNNDISSWTKGRSGEALSLLKKRFSHRPVQEKFVCLNCGFETHADEQAALNIARSWLFLRSQEYKKYQTNKTTGNTDKRAFVETWQSFYRKKLKEVWKPAV

SEQ ID NO: 34549 - protein, 979 aa, synthetic construct
  REGION 1..979: note = engineered CasX variant
QEIKRINKIRRRLVKDSNTKKAGKTGPMKTLLVRVMTPDLRERLENLRKKPENIPQPISNTSRANLNKLLTDYTEMKKAILHVYDEEFQKDPVGLMSRVAQPASKKIDQNKLKPEMDEKGNLTTAGFACSQCGQPLFVYKLEQVSEKGKAYTNYFGRCNVAEHEKLIKLAQLKPEKDSDEAVTYSLGKFGQRALDFYSIHVTKESTHPVKPLAQIAGNRYASGPVGKALSDACMGTIASFLSKYQDIIIEHQKVVKGNQKRLESLRELAGKENLEYPSVTLPPQPHTKEGVDAYNEVIARVRMWVNLNLWQKLKLSRDDAKPLLRLKGFPSFPLVERQANEVDWWDMVCNVKKLINEKKEDGKVFWQNLAGYKRQEALRPYLSSEEDVRKKGKKFARYQLGDLLLHLEKKHGEDWGKVYDEAWERIDKKVEGLSKHIKLEEERRSEDAQSKAALTDWLRAKASFVIEGLKEADKDEFCRCELKLQKWYGDLRGKPFAIEAENSILDISGFSKQYNCAFIWQKDGVKKLNLYLIINYFKGGKLRFKKIKPEAFEANRFYTVINKKSGEIVPMEVNFNFDDPNLIILPLAFGKRQGREFIWNDLLSLETGSLKLANGRVIEKTLYNRRTRQDEPALFVALTFERREVLDSSNIKPMNLIGVDRGENIPAVIALTDPEGCPLSRFKDSLGNPTHILRIGESYKEKQRTIQAKKEVEQRRAGGYSRKYASKAKNLADDMVRNTARDLLYYAVTQDAMLIFENLSRGFGRQGKRTFMAERQYTRMEDWLTAKLAYEGLPSKTYLSKTLAQYTSKTCSNCGFTITSADYDRVLEKLKKTATGWMTTINGKELKVEGQITYYNRYKRQNVVKDLSVELDRLSEESVNNDISSWTKGRSGEALSLLKKRFSHRPVQEKFVCLNCGFETHADEQAALNIARSWLFLRSQEYKKYQTNKTTGNTDKRAFVETWQSFYRKKLKEVWKPAV

SEQ ID NO: 34550 - protein, 978 aa, synthetic construct
  REGION 1..978: note = engineered CasX variant
QEIKRINKIRRRLVKDSNTKKAGKTGPMKTLLVRVMTPDLRERLENLRKKPENIPQPISNTSRANLNKLLTDYTEMKKAILHVYDEEFQKDPVGLMSRVAQPASKKIDQNKLKPEMDEKGNLTTAGFACSQCGQPLFVYKLEQVSEKGKAYTNYFGRCNVAEHEKLILLAQLKPEKDSDEAVTYSLGKFGQRALDFYSIHVTKESTHPVKPLAQIAGNRYASPVGKALSDACMGTIASFLSKYQDIIIEHQKVVKGNQKRLESLRELAGKENLEYPSVTLPPQPHTKEGVDAYNEVIARVRMWVNLNLWQKLKLSRDDAKPLLRLKGFPSFPLVERQANEVDWWDMVCNVKKLINEKKEDGKVFWQNLAGYKRQEALRPYLSSEEDVRKKGKKFARYQLGDLLLHLEKKHGEDWGKVYDEAWERIDKKVEGLSKHIKLEEERRSEDAQSKAALTDWLRAKASFVIEGLKEADKDEFCRCELKLQKWYGDLRGKPFAIEAENSILDISGFSKQYNCAFIWQKDGVKKLNLYLIINYFKGGKLRFKKIKPEAFEANRFYTVINKKSGEIVPMEVNFNFDDPNLIILPLAFGKRQGREFIWNDLLSLETGSLKLANGRVIEKTLYNRRTRQDEPALFVALTFERREVLDSSNIKPMNLIGVDRGENIPAVIALTDPEGCPLSRFKDSLGNPTHILRIGESYKEKQRTIQAKKEVEQRRAGGYSRKYASKAKNLADDMVRNTARDLLYYAVTQDAMLIFENLSRGFGRQGKRTFMAERQYTRMEDWLTAKLAYEGLPSKTYLSKTLAQYTSKTCSNCGFTITSADYDRVLEKLKKTATGWMTTINGKELKVEGQITYYNRYKRQNVVKDLSVELDRLSEESVNNDISSWTKGRSGEALSLLKKRFSHRPVQEKFVCLNCGFETHADEQAALNIARSWLFLRSQEYKKYQTNKTTGNTDKRAFVETWQSFYRKKLKEVWKPAV

SEQ ID NO: 34551 - protein, 978 aa, synthetic construct
  REGION 1..978: note = engineered CasX variant
QEIKRINKIRRRLVKDSNTKKAGKTGPMKTLLVRVMTPDLRERLENLRKKPENIPQPISNTSRANLNKLLTDYTEMKKAILHVYDEEFQKDPVGLMSRVAQPASKKIDQNKLKPEMDEKGNLTTAGFACSQCGQPLFVYKLEQVSEKGKAYTNYFGRCNVAEHEKLILLAQLKPEKDSDEAVTYSLGKFGQRALDFYSIHVTKESTHPVKPLAQIAGNRYASYPVGKALSDACMGTIASFLSKYQDIIIEHQKVVKGNQKRLESLRELAGKENLEYPSVTLPPQPHTKEGVDAYNEVIARVRMWVNLNLWQKLKLSRDDAKPLLRLKGFPSFPLVERQANEVDWWDMVCNVKKLINEKKEDGKVFWQNLAGYKRQEALRPYLSSEEDRKKGKKFARYQLGDLLLHLEKKHGEDWGKVYDEAWERIDKKVEGLSKHIKLEEERRSEDAQSKAALTDWLRAKASFVIEGLKEADKDEFCRCELKLQKWYGDLRGKPFAIEAENSILDISGFSKQYNCAFIWQKDGVKKLNLYLIINYFKGGKLRFKKIKPEAFEANRFYTVINKKSGEIVPMEVNFNFDDPNLIILPLAFGKRQGREFIWNDLLSLETGSLKLANGRVIEKTLYNRRTRQDEPALFVALTFERREVLDSSNIKPMNLIGVDRGENIPAVIALTDPEGCPLSRFKDSLGNPTHILRIGESYKEKQRTIQAKKEVEQRRAGGYSRKYASKAKNLADDMVRNTARDLLYYAVTQDAMLIFENLSRGFGRQGKRTFMAERQYTRMEDWLTAKLAYEGLPSKTYLSKTLAQYTSKTCSNCGFTITSADYDRMLEKLKKTATGWMTTINGKELKVEGQITYYNRYKRQNVVKDLSVELDRLSEESVNNDISSWTKGRSGEALSLLKKRFSHRPVQEKFVCLNCGFETHADEQAALNIARSWLFLRSQEYKKYQTNKTTGNTDKRAFVETWQSFYRKKLKEVWKPAV

SEQ ID NO: 34552 - protein, 978 aa, synthetic construct
  REGION 1..978: note = engineered CasX variant
QEIKRINKIRRRLVKDSNTKKAGKTGPMKTLLVRVMTPDLRERLENLRKKPENIPQPISNTSRANLNKLLTDYTEMKKAILHVYDEEFQKDPVGLMSRVAQPASKKIDQNKLKPEMDEKGNLTTAGFACSQCGQPLFVYKLEQVSEKGKAYTNYFGRCNVAEHEKLILLAQLKPEKDSDEAVTYSLGKFGQRALDFYSIHVTKESTHPVKPLAQIAGNRYASHPVGKALSDACMGTIASFLSKYQDIIIEHQKVVKGNQKRLESLRELAGKENLEYPSVTLPPQPHTKEGVDAYNEVIARVRMWVNLNLWQKLKLSRDDAKPLLRLKGFPSFPLVERQANEVDWWDMVCNVKKLINEKKEDGKVFWQNLAGYKRQEALRPYLSSEEDRKKGKKFARYQLGDLLLHLEKKHGEDWGKVYDEAWERIDKKVEGLSKHIKLEEERRSEDAQSKAALTDWLRAKASFVIEGLKEADKDEFCRCELKLQKWYGDLRGKPFAIEAENSILDISGFSKQYNCAFIWQKDGVKKLNLYLIINYFKGGKLRFKKIKPEAFEANRFYTVINKKSGEIVPMEVNFNFDDPNLIILPLAFGKRQGREFIWNDLLSLETGSLKLANGRVIEKTLYNRRTRQDEPALFVALTFERREVLDSSNIKPMNLIGVDRGENIPAVIALTDPEGCPLSRFKDSLGNPTHILRIGESYKEKQRTIQAKKEVEQRRAGGYSRKYASKAKNLADDMVRNTARDLLYYAVTQDAMLIFENLSRGFGRQGKRTFMAERQYTRMEDWLTAKLAYEGLPSKTYLSKTLAQYTSKTCSNCGFTITSADYDRMLEKLKKTATGWMTTINGKELKVEGQITYYNRYKRQNVVKDLSVELDRLSEESVNNDISSWTKGRSGEALSLLKKRFSHRPVQEKFVCLNCGFETHADEQAALNIARSWLFLRSQEYKKYQTNKTTGNTDKRAFVETWQSFYRKKLKEVWKPAV

SEQ ID NO: 34553 - protein, 978 aa, synthetic construct
  REGION 1..978: note = engineered CasX variant
QEIKRINKIRRRLVKDSNTKKAGKTGPMKTLLVRVMTPDLRERLENLRKKPENIPQPISNTSRANLNKLLTDYTEMKKAILHVYDEEFQKDPVGLMSRVAQPASKKIDQNKLKPEMDEKGNLTTAGFACSQCGQPLFVYKLEQVSEKGKAYTNYFGRCNVAEHEKLILLAQLKPEKDSDEAVTYSLGKFGQRALDFYSIHVTKESTHPVKPLAQIAGNRYASSPVGKALSDACMGTIASFLSKYQDIIIEHQKVVKGNQKRLESLRELAGKENLEYPSVTLPPQPHTKEGVDAYNEVIARVRMWVNLNLWQKLKLSRDDAKPLLRLKGFPSFPLVERQANEVDWWDMVCNVKKLINEKKEDGKVFWQNLAGYKRQEALRPYLSSEEDRKKGKKFARYQLGDLLLHLEKKHGEDWGKVYDEAWERIDKKVEGLSKHIKLEEERRSEDAQSKAALTDWLRAKASFVIEGLKEADKDEFCRCELKLQKWYGDLRGKPFAIEAENSILDISGFSKQYNCAFIWQKDGVKKLNLYLIINYFKGGKLRFKKIKPEAFEANRFYTVINKKSGEIVPMEVNFNFDDPNLIILPLAFGKRQGREFIWNDLLSLETGSLKLANGRVIEKTLYNRRTRQDEPALFVALTFERREVLDSSNIKPMNLIGVDRGENIPAVIALTDPEGCPLSRFKDSLGNPTHILRIGESYKEKQRTIQAKKEVEQRRAGGYSRKYASKAKNLADDMVRNTARDLLYYAVTQDAMLIFENLSRGFGRQGKRTFMAERQYTRMEDWLTAKLAYEGLPSKTYLSKTLAQYTSKTCSNCGFTITSADYDRMLEKLKKTATGWMTTINGKELKVEGQITYYNRYKRQNVVKDLSVELDRLSEESVNNDISSWTKGRSGEALSLLKKRFSHRPVQEKFVCLNCGFETHADEQAALNIARSWLFLRSQEYKKYQTNKTTGNTDKRAFVETWQSFYRKKLKEVWKPAV

SEQ ID NO: 34554 - protein, 978 aa, synthetic construct
  REGION 1..978: note = engineered CasX variant
QEIKRINKIRRRLVKDSNTKKAGKTGPMKTLLVRVMTPDLRERLENLRKKPENIPQPISNTSRANLNKLLTDYTEMKKAILHVYDEEFQKDPVGLMSRVAQPASKKIDQNKLKPEMDEKGNLTTAGFACSQCGQPLFVYKLEQVSEKGKAYTNYFGRCNVAEHEKLILLAQLKPEKDSDEAVTYSLGKFGQRALDFYSIHVTKESTHPVKPLAQIAGNRYASTPVGKALSDACMGTIASFLSKYQDIIIEHQKVVKGNQKRLESLRELAGKENLEYPSVTLPPQPHTKEGVDAYNEVIARVRMWVNLNLWQKLKLSRDDAKPLLRLKGFPSFPLVERQANEVDWWDMVCNVKKLINEKKEDGKVFWQNLAGYKRQEALRPYLSSEEDRKKGKKFARYQLGDLLLHLEKKHGEDWGKVYDEAWERIDKKVEGLSKHIKLEEERRSEDAQSKAALTDWLRAKASFVIEGLKEADKDEFCRCELKLQKWYGDLRGKPFAIEAENSILDISGFSKQYNCAFIWQKDGVKKLNLYLIINYFKGGKLRFKKIKPEAFEANRFYTVINKKSGEIVPMEVNFNFDDPNLIILPLAFGKRQGREFIWNDLLSLETGSLKLANGRVIEKTLYNRRTRQDEPALFVALTFERREVLDSSNIKPMNLIGVDRGENIPAVIALTDPEGCPLSRFKDSLGNPTHILRIGESYKEKQRTIQAKKEVEQRRAGGYSRKYASKAKNLADDMVRNTARDLLYYAVTQDAMLIFENLSRGFGRQGKRTFMAERQYTRMEDWLTAKLAYEGLPSKTYLSKTLAQYTSKTCSNCGFTITSADYDRMLEKLKKTATGWMTTINGKELKVEGQITYYNRYKRQNVVKDLSVELDRLSEESVNNDISSWTKGRSGEALSLLKKRFSHRPVQEKFVCLNCGFETHADEQAALNIARSWLFLRSQEYKKYQTNKTTGNTDKRAFVETWQSFYRKKLKEVWKPAV

SEQ ID NO: 34555 - protein, 978 aa, synthetic construct
  REGION 1..978: note = engineered CasX variant
QEIKRINKIRRRLVKDSNTKKAGKTGPMKTLLVRVMTPDLRERLENLRKKPENIPQPISNTSRANLNKLLTDYTEMKKAILHVYDEEFQKDPVGLMSRVAQPASKKIDQNKLKPEMDEKGNLTTAGFACSQCGQPLFVYKLEQVSEKGKAYTNYFGRCNVAEHEKLILLAQLKPEKDSDEAVTYSLGKFGQRALDFYSIHVTKESTHPVKPLAQIAGNRYASAPVGKALSDACMGTIASFLSKYQDIIIEHQKVVKGNQKRLESLRELAGKENLEYPSVTLPPQPHTKEGVDAYNEVIARVRMWVNLNLWQKLKLSRDDAKPLLRLKGFPSFPLVERQANEVDWWDMVCNVKKLINEKKEDGKVFWQNLAGYKRQEALRPYLSSEEDRKKGKKFARYQLGDLLLHLEKKHGEDWGKVYDEAWERIDKKVEGLSKHIKLEEERRSEDAQSKAALTDWLRAKASFVIEGLKEADKDEFCRCELKLQKWYGDLRGKPFAIEAENSILDISGFSKQYNCAFIWQKDGVKKLNLYLIINYFKGGKLRFKKIKPEAFEANRFYTVINKKSGEIVPMEVNFNFDDPNLIILPLAFGKRQGREFIWNDLLSLETGSLKLANGRVIEKTLYNRRTRQDEPALFVALTFERREVLDSSNIKPMNLIGVDRGENIPAVIALTDPEGCPLSRFKDSLGNPTHILRIGESYKEKQRTIQAKKEVEQRRAGGYSRKYASKAKNLADDMVRNTARDLLYYAVTQDAMLIFENLSRGFGRQGKRTFMAERQYTRMEDWLTAKLAYEGLPSKTYLSKTLAQYTSKTCSNCGFTITSADYDRMLEKLKKTATGWMTTINGKELKVEGQITYYNRYKRQNVVKDLSVELDRLSEESVNNDISSWTKGRSGEALSLLKKRFSHRPVQEKFVCLNCGFETHADEQAALNIARSWLFLRSQEYKKYQTNKTTGNTDKRAFVETWQSFYRKKLKEVWKPAV

SEQ ID NO: 34556 - protein, 978 aa, synthetic construct
  REGION 1..978: note = engineered CasX variant
QEIKRINKIRRRLVKDSNTKKAGKTGPMKTLLVRVMTPDLRERLENLRKKPENIPQPISNTSRANLNKLLTDYTEMKKAILHVYDEEFQKDPVGLMSRVAQPASKKIDQNKLKPEMDEKGNLTTAGFACSQCGQPLFVYKLEQVSEKGKAYTNYFGRCNVAEHEKLILLAQLKPEKDSDEAVTYSLGKFGQRALDFYSIHVTKESTHPVKPLAQIAGNRYASVPVGKALSDACMGTIASFLSKYQDIIIEHQKVVKGNQKRLESLRELAGKENLEYPSVTLPPQPHTKEGVDAYNEVIARVRMWVNLNLWQKLKLSRDDAKPLLRLKGFPSFPLVERQANEVDWWDMVCNVKKLINEKKEDGKVFWQNLAGYKRQEALRPYLSSEEDRKKGKKFARYQLGDLLLHLEKKHGEDWGKVYDEAWERIDKKVEGLSKHIKLEEERRSEDAQSKAALTDWLRAKASFVIEGLKEADKDEFCRCELKLQKWYGDLRGKPFAIEAENSILDISGFSKQYNCAFIWQKDGVKKLNLYLIINYFKGGKLRFKKIKPEAFEANRFYTVINKKSGEIVPMEVNFNFDDPNLIILPLAFGKRQGREFIWNDLLSLETGSLKLANGRVIEKTLYNRRTRQDEPALFVALTFERREVLDSSNIKPMNLIGVDRGENIPAVIALTDPEGCPLSRFKDSLGNPTHILRIGESYKEKQRTIQAKKEVEQRRAGGYSRKYASKAKNLADDMVRNTARDLLYYAVTQDAMLIFENLSRGFGRQGKRTFMAERQYTRMEDWLTAKLAYEGLPSKTYLSKTLAQYTSKTCSNCGFTITSADYDRMLEKLKKTATGWMTTINGKELKVEGQITYYNRYKRQNVVKDLSVELDRLSEESVNNDISSWTKGRSGEALSLLKKRFSHRPVQEKFVCLNCGFETHADEQAALNIARSWLFLRSQEYKKYQTNKTTGNTDKRAFVETWQSFYRKKLKEVWKPAV

SEQ ID NO: 34557 - protein, 978 aa, synthetic construct
  REGION 1..978: note = engineered CasX variant
QEIKRINKIRRRLVKDSNTKKAGKTGPMKTLLVRVMTPDLRERLENLRKKPENIPQPISNTSRANLNKLLTDYTEMKKAILHVYDEEFQKDPVGLMSRVAQPASKKIDQNKLKPEMDEKGNLTTAGFACSQCGQPLFVYKLEQVSEKGKAYTNYFGRCNVAEHEKLIKLAQLKPEKDSDEAVTYSLGKFGQRALDFYSIHVTKESTHPVKPLAQIAGNRYASGPVGKALSDACMGTIASFLSKYQDIIIEHQKVVKGNQKRLESLRELAGKENLEYPSVTLPPQPHTKEGVDAYNEVIARVRMWVNLNLWQKLKLSRDDAKPLLRLKGFPSFPLVERQANEVDWWDMVCNVKKLINEKKEDGKVFWQNLAGYKRQEALRPYLSSEEDRKKGKKFARYQLGDLLLHLEKKHGEDWGKVYDEAWERIDKKVEGLSKHIKLEEERRSEDAQSKAALTDWLRAKASFVIEGLKEADKDEFCRCELKLQKWYGDLRGKPFAIEAENSILDISGFSKQYNCAFIWQKDGVKKLNLYLIINYFKGGKLRFKKIKPEAFEANRFYTVINKKSGEIVPMEVNFNFDDPNLIILPLAFGKRQGREFIWNDLLSLETGSLKLANGRVIEKTLYNRRTRQDEPALFVALTFERREVLDSSNIKPMNLIGVDRGENIPAVIALTDPEGCPLSRFKDSLGNPTHILRIGESYKEKQRTIQAKKEVEQRRAGGYSRKYASKAKNLADDMVRNTARDLLYYAVTQDAMLIFENLSRGFGRQGKRTFMAERQYTRMEDWLTAKLAYEGLPSKTYLSKTLAQYTSKTCSNCGFTITSADYDRMLEKLKKTATGWMTTINGKELKVEGQITYYNRYKRQNVVKDLSVELDRLSEESVNNDISSWTKGRSGEALSLLKKRFSHRPVQEKFVCLNCGFETHADEQAALNIARSWLFLRSQEYKKYQTNKTTGNTDKRAFVETWQSFYRKKLKEVWKPAV

SEQ ID NO: 34558 - protein, 977 aa, synthetic construct
  REGION 1..977: note = engineered CasX variant
QEIKRINKIRRRLVKDSNTKKAGKTGPMKTLLVRVMTPDLRERLENLRKKPENIPQPISNTSRANLNKLLTDYTEMKKAILHVYDEEFQKDPVGLMSRVAQPASKKIDQNKLKPEMDEKGNLTTAGFACSQCGQPLFVYKLEQVSEKGKAYTNYFGRCNVAEHEKLILLAQLKPEKDSDEAVTYSLGKFGQRALDFYSIHVTKESTHPVKPLAQIAGNRYASPVGKALSDACMGTIASFLSKYQDIIIEHQKVVKGNQKRLESLRELAGKENLEYPSVTLPPQPHTKEGVDAYNEVIARVRMWVNLNLWQKLKLSRDDAKPLLRLKGFPSFPLVERQANEVDWWDMVCNVKKLINEKKEDGKVFWQNLAGYKRQEALRPYLSSEEDRKKGKKFARYQLGDLLLHLEKKHGEDWGKVYDEAWERIDKKVEGLSKHIKLEEERRSEDAQSKAALTDWLRAKASFVIEGLKEADKDEFCRCELKLQKWYGDLRGKPFAIEAENSILDISGFSKQYNCAFIWQKDGVKKLNLYLIINYFKGGKLRFKKIKPEAFEANRFYTVINKKSGEIVPMEVNFNFDDPNLIILPLAFGKRQGREFIWNDLLSLETGSLKLANGRVIEKTLYNRRTRQDEPALFVALTFERREVLDSSNIKPMNLIGVDRGENIPAVIALTDPEGCPLSRFKDSLGNPTHILRIGESYKEKQRTIQAKKEVEQRRAGGYSRKYASKAKNLADDMVRNTARDLLYYAVTQDAMLIFENLSRGFGRQGKRTFMAERQYTRMEDWLTAKLAYEGLPSKTYLSKTLAQYTSKTCSNCGFTITSADYDRMLEKLKKTATGWMTTINGKELKVEGQITYYNRYKRQNVVKDLSVELDRLSEESVNNDISSWTKGRSGEALSLLKKRFSHRPVQEKFVCLNCGFETHADEQAALNIARSWLFLRSQEYKKYQTNKTTGNTDKRAFVETWQSFYRKKLKEVWKPAV

SEQ ID NO: 34559 - protein, 978 aa, synthetic construct
  REGION 1..978: note = engineered CasX variant
QEIKRINKIRRRLVKDSNTKKAGKTGPMKTLLVRVMTPDLRERLENLRKKPENIPQPISNTSRANLNKLLTDYTEMKKAILHVYDEEFQKDPVGLMSRVAQPASKKIDQNKLKPEMDEKGNLTTAGFACSQCGQPLFVYKLEQVSEKGKAYTNYFGRCNVAEHEKLILLAQLKPEKDSDEAVTYSLGKFGQRALDFYSIHVTKESTHPVKPLAQIAGNRYASYPVGKALSDACMGTIASFLSKYQDIIIEHQKVVKGNQKRLESLRELAGKENLEYPSVTLPPQPHTKEGVDAYNEVIARVRMWVNLNLWQKLKLSRDDAKPLLRLKGFPSFPLVERQANEVDWWDMVCNVKKLINEKKEDGKVFWQNLAGYKRQEALRPYLSSEEDRKKGKKFARYQLGDLLLHLEKKHGEDWGKVYDEAWERIDKKVEGLSKHIKLEEERRSEDAQSKAALTDWLRAKASFVIEGLKEADKDEFCRCELKLQKWYGDLRGKPFAIEAENSILDISGFSKQYNCAFIWQKDGVKKLNLYLIINYFKGGKLRFKKIKPEAFEANRFYTVINKKSGEIVPMEVNFNFDDPNLIILPLAFGKRQGREFIWNDLLSLETGSLKLANGRVIEKTLYNRRTRQDEPALFVALTFERREVLDSSNIKPMNLIGVDRGENIPAVIALTDPEGCPLSRFKDSLGNPTHILRIGESYKEKQRTIQAKKEVEQRRAGGYSRKYASKAKNLADDMVRNTARDLLYYAVTQDAMLIFENLSRGFGRQGKRTFMAERQYTRMEDWLTAKLAYEGLPSKTYLSKTLAQYTSKTCSNCGFTITSADYDRVLEKLKKTATGWMTTINGKELKVEGQITYYNRYKRQNVVKDLSVELDRLSEESVNNDISSWTKGRQGEALSLLKKRFSHRPVQEKFVCLNCGFETHADEQAALNIARSWLFLRSQEYKKYQTNKTTGNTDKRAFVETWQSFYRKKLKEVWKPAV

SEQ ID NO: 34560 - protein, 978 aa, synthetic construct
  REGION 1..978: note = engineered CasX variant
QEIKRINKIRRRLVKDSNTKKAGKTGPMKTLLVRVMTPDLRERLENLRKKPENIPQPISNTSRANLNKLLTDYTEMKKAILHVYDEEFQKDPVGLMSRVAQPASKKIDQNKLKPEMDEKGNLTTAGFACSQCGQPLFVYKLEQVSEKGKAYTNYFGRCNVAEHEKLILLAQLKPEKDSDEAVTYSLGKFGQRALDFYSIHVTKESTHPVKPLAQIAGNRYASHPVGKALSDACMGTIASFLSKYQDIIIEHQKVVKGNQKRLESLRELAGKENLEYPSVTLPPQPHTKEGVDAYNEVIARVRMWVNLNLWQKLKLSRDDAKPLLRLKGFPSFPLVERQANEVDWWDMVCNVKKLINEKKEDGKVFWQNLAGYKRQEALRPYLSSEEDRKKGKKFARYQLGDLLLHLEKKHGEDWGKVYDEAWERIDKKVEGLSKHIKLEEERRSEDAQSKAALTDWLRAKASFVIEGLKEADKDEFCRCELKLQKWYGDLRGKPFAIEAENSILDISGFSKQYNCAFIWQKDGVKKLNLYLIINYFKGGKLRFKKIKPEAFEANRFYTVINKKSGEIVPMEVNFNFDDPNLIILPLAFGKRQGREFIWNDLLSLETGSLKLANGRVIEKTLYNRRTRQDEPALFVALTFERREVLDSSNIKPMNLIGVDRGENIPAVIALTDPEGCPLSRFKDSLGNPTHILRIGESYKEKQRTIQAKKEVEQRRAGGYSRKYASKAKNLADDMVRNTARDLLYYAVTQDAMLIFENLSRGFGRQGKRTFMAERQYTRMEDWLTAKLAYEGLPSKTYLSKTLAQYTSKTCSNCGFTITSADYDRVLEKLKKTATGWMTTINGKELKVEGQITYYNRYKRQNVVKDLSVELDRLSEESVNNDISSWTKGRQGEALSLLKKRFSHRPVQEKFVCLNCGFETHADEQAALNIARSWLFLRSQEYKKYQTNKTTGNTDKRAFVETWQSFYRKKLKEVWKPAV

SEQ ID NO: 34561 - protein, 978 aa, synthetic construct
  REGION 1..978: note = engineered CasX variant
QEIKRINKIRRRLVKDSNTKKAGKTGPMKTLLVRVMTPDLRERLENLRKKPENIPQPISNTSRANLNKLLTDYTEMKKAILHVYDEEFQKDPVGLMSRVAQPASKKIDQNKLKPEMDEKGNLTTAGFACSQCGQPLFVYKLEQVSEKGKAYTNYFGRCNVAEHEKLILLAQLKPEKDSDEAVTYSLGKFGQRALDFYSIHVTKESTHPVKPLAQIAGNRYASSPVGKALSDACMGTIASFLSKYQDIIIEHQKVVKGNQKRLESLRELAGKENLEYPSVTLPPQPHTKEGVDAYNEVIARVRMWVNLNLWQKLKLSRDDAKPLLRLKGFPSFPLVERQANEVDWWDMVCNVKKLINEKKEDGKVFWQNLAGYKRQEALRPYLSSEEDRKKGKKFARYQLGDLLLHLEKKHGEDWGKVYDEAWERIDKKVEGLSKHIKLEEERRSEDAQSKAALTDWLRAKASFVIEGLKEADKDEFCRCELKLQKWYGDLRGKPFAIEAENSILDISGFSKQYNCAFIWQKDGVKKLNLYLIINYFKGGKLRFKKIKPEAFEANRFYTVINKKSGEIVPMEVNFNFDDPNLIILPLAFGKRQGREFIWNDLLSLETGSLKLANGRVIEKTLYNRRTRQDEPALFVALTFERREVLDSSNIKPMNLIGVDRGENIPAVIALTDPEGCPLSRFKDSLGNPTHILRIGESYKEKQRTIQAKKEVEQRRAGGYSRKYASKAKNLADDMVRNTARDLLYYAVTQDAMLIFENLSRGFGRQGKRTFMAERQYTRMEDWLTAKLAYEGLPSKTYLSKTLAQYTSKTCSNCGFTITSADYDRVLEKLKKTATGWMTTINGKELKVEGQITYYNRYKRQNVVKDLSVELDRLSEESVNNDISSWTKGRQGEALSLLKKRFSHRPVQEKFVCLNCGFETHADEQAALNIARSWLFLRSQEYKKYQTNKTTGNTDKRAFVETWQSFYRKKLKEVWKPAV

SEQ ID NO: 34562 - protein, 978 aa, synthetic construct
  REGION 1..978: note = engineered CasX variant
QEIKRINKIRRRLVKDSNTKKAGKTGPMKTLLVRVMTPDLRERLENLRKKPENIPQPISNTSRANLNKLLTDYTEMKKAILHVYDEEFQKDPVGLMSRVAQPASKKIDQNKLKPEMDEKGNLTTAGFACSQCGQPLFVYKLEQVSEKGKAYTNYFGRCNVAEHEKLILLAQLKPEKDSDEAVTYSLGKFGQRALDFYSIHVTKESTHPVKPLAQIAGNRYASTPVGKALSDACMGTIASFLSKYQDIIIEHQKVVKGNQKRLESLRELAGKENLEYPSVTLPPQPHTKEGVDAYNEVIARVRMWVNLNLWQKLKLSRDDAKPLLRLKGFPSFPLVERQANEVDWWDMVCNVKKLINEKKEDGKVFWQNLAGYKRQEALRPYLSSEEDRKKGKKFARYQLGDLLLHLEKKHGEDWGKVYDEAWERIDKKVEGLSKHIKLEEERRSEDAQSKAALTDWLRAKASFVIEGLKEADKDEFCRCELKLQKWYGDLRGKPFAIEAENSILDISGFSKQYNCAFIWQKDGVKKLNLYLIINYFKGGKLRFKKIKPEAFEANRFYTVINKKSGEIVPMEVNFNFDDPNLIILPLAFGKRQGREFIWNDLLSLETGSLKLANGRVIEKTLYNRRTRQDEPALFVALTFERREVLDSSNIKPMNLIGVDRGENIPAVIALTDPEGCPLSRFKDSLGNPTHILRIGESYKEKQRTIQAKKEVEQRRAGGYSRKYASKAKNLADDMVRNTARDLLYYAVTQDAMLIFENLSRGFGRQGKRTFMAERQYTRMEDWLTAKLAYEGLPSKTYLSKTLAQYTSKTCSNCGFTITSADYDRVLEKLKKTATGWMTTINGKELKVEGQITYYNRYKRQNVVKDLSVELDRLSEESVNNDISSWTKGRQGEALSLLKKRFSHRPVQEKFVCLNCGFETHADEQAALNIARSWLFLRSQEYKKYQTNKTTGNTDKRAFVETWQSFYRKKLKEVWKPAV

SEQ ID NO: 34563 - protein, 978 aa, synthetic construct
  REGION 1..978: note = engineered CasX variant
QEIKRINKIRRRLVKDSNTKKAGKTGPMKTLLVRVMTPDLRERLENLRKKPENIPQPISNTSRANLNKLLTDYTEMKKAILHVYDEEFQKDPVGLMSRVAQPASKKIDQNKLKPEMDEKGNLTTAGFACSQCGQPLFVYKLEQVSEKGKAYTNYFGRCNVAEHEKLILLAQLKPEKDSDEAVTYSLGKFGQRALDFYSIHVTKESTHPVKPLAQIAGNRYASAPVGKALSDACMGTIASFLSKYQDIIIEHQKVVKGNQKRLESLRELAGKENLEYPSVTLPPQPHTKEGVDAYNEVIARVRMWVNLNLWQKLKLSRDDAKPLLRLKGFPSFPLVERQANEVDWWDMVCNVKKLINEKKEDGKVFWQNLAGYKRQEALRPYLSSEEDRKKGKKFARYQLGDLLLHLEKKHGEDWGKVYDEAWERIDKKVEGLSKHIKLEEERRSEDAQSKAALTDWLRAKASFVIEGLKEADKDEFCRCELKLQKWYGDLRGKPFAIEAENSILDISGFSKQYNCAFIWQKDGVKKLNLYLIINYFKGGKLRFKKIKPEAFEANRFYTVINKKSGEIVPMEVNFNFDDPNLIILPLAFGKRQGREFIWNDLLSLETGSLKLANGRVIEKTLYNRRTRQDEPALFVALTFERREVLDSSNIKPMNLIGVDRGENIPAVIALTDPEGCPLSRFKDSLGNPTHILRIGESYKEKQRTIQAKKEVEQRRAGGYSRKYASKAKNLADDMVRNTARDLLYYAVTQDAMLIFENLSRGFGRQGKRTFMAERQYTRMEDWLTAKLAYEGLPSKTYLSKTLAQYTSKTCSNCGFTITSADYDRVLEKLKKTATGWMTTINGKELKVEGQITYYNRYKRQNVVKDLSVELDRLSEESVNNDISSWTKGRQGEALSLLKKRFSHRPVQEKFVCLNCGFETHADEQAALNIARSWLFLRSQEYKKYQTNKTTGNTDKRAFVETWQSFYRKKLKEVWKPAV

SEQ ID NO: 34564 - protein, 978 aa, synthetic construct
  REGION 1..978: note = engineered CasX variant
QEIKRINKIRRRLVKDSNTKKAGKTGPMKTLLVRVMTPDLRERLENLRKKPENIPQPISNTSRANLNKLLTDYTEMKKAILHVYDEEFQKDPVGLMSRVAQPASKKIDQNKLKPEMDEKGNLTTAGFACSQCGQPLFVYKLEQVSEKGKAYTNYFGRCNVAEHEKLILLAQLKPEKDSDEAVTYSLGKFGQRALDFYSIHVTKESTHPVKPLAQIAGNRYASVPVGKALSDACMGTIASFLSKYQDIIIEHQKVVKGNQKRLESLRELAGKENLEYPSVTLPPQPHTKEGVDAYNEVIARVRMWVNLNLWQKLKLSRDDAKPLLRLKGFPSFPLVERQANEVDWWDMVCNVKKLINEKKEDGKVFWQNLAGYKRQEALRPYLSSEEDRKKGKKFARYQLGDLLLHLEKKHGEDWGKVYDEAWERIDKKVEGLSKHIKLEEERRSEDAQSKAALTDWLRAKASFVIEGLKEADKDEFCRCELKLQKWYGDLRGKPFAIEAENSILDISGFSKQYNCAFIWQKDGVKKLNLYLIINYFKGGKLRFKKIKPEAFEANRFYTVINKKSGEIVPMEVNFNFDDPNLIILPLAFGKRQGREFIWNDLLSLETGSLKLANGRVIEKTLYNRRTRQDEPALFVALTFERREVLDSSNIKPMNLIGVDRGENIPAVIALTDPEGCPLSRFKDSLGNPTHILRIGESYKEKQRTIQAKKEVEQRRAGGYSRKYASKAKNLADDMVRNTARDLLYYAVTQDAMLIFENLSRGFGRQGKRTFMAERQYTRMEDWLTAKLAYEGLPSKTYLSKTLAQYTSKTCSNCGFTITSADYDRVLEKLKKTATGWMTTINGKELKVEGQITYYNRYKRQNVVKDLSVELDRLSEESVNNDISSWTKGRQGEALSLLKKRFSHRPVQEKFVCLNCGFETHADEQAALNIARSWLFLRSQEYKKYQTNKTTGNTDKRAFVETWQSFYRKKLKEVWKPAV

SEQ ID NO: 34565 - protein, 978 aa, synthetic construct
  REGION 1..978: note = engineered CasX variant
QEIKRINKIRRRLVKDSNTKKAGKTGPMKTLLVRVMTPDLRERLENLRKKPENIPQPISNTSRANLNKLLTDYTEMKKAILHVYDEEFQKDPVGLMSRVAQPASKKIDQNKLKPEMDEKGNLTTAGFACSQCGQPLFVYKLEQVSEKGKAYTNYFGRCNVAEHEKLIKLAQLKPEKDSDEAVTYSLGKFGQRALDFYSIHVTKESTHPVKPLAQIAGNRYASGPVGKALSDACMGTIASFLSKYQDIIIEHQKVVKGNQKRLESLRELAGKENLEYPSVTLPPQPHTKEGVDAYNEVIARVRMWVNLNLWQKLKLSRDDAKPLLRLKGFPSFPLVERQANEVDWWDMVCNVKKLINEKKEDGKVFWQNLAGYKRQEALRPYLSSEEDRKKGKKFARYQLGDLLLHLEKKHGEDWGKVYDEAWERIDKKVEGLSKHIKLEEERRSEDAQSKAALTDWLRAKASFVIEGLKEADKDEFCRCELKLQKWYGDLRGKPFAIEAENSILDISGFSKQYNCAFIWQKDGVKKLNLYLIINYFKGGKLRFKKIKPEAFEANRFYTVINKKSGEIVPMEVNFNFDDPNLIILPLAFGKRQGREFIWNDLLSLETGSLKLANGRVIEKTLYNRRTRQDEPALFVALTFERREVLDSSNIKPMNLIGVDRGENIPAVIALTDPEGCPLSRFKDSLGNPTHILRIGESYKEKQRTIQAKKEVEQRRAGGYSRKYASKAKNLADDMVRNTARDLLYYAVTQDAMLIFENLSRGFGRQGKRTFMAERQYTRMEDWLTAKLAYEGLPSKTYLSKTLAQYTSKTCSNCGFTITSADYDRVLEKLKKTATGWMTTINGKELKVEGQITYYNRYKRQNVVKDLSVELDRLSEESVNNDISSWTKGRQGEALSLLKKRFSHRPVQEKFVCLNCGFETHADEQAALNIARSWLFLRSQEYKKYQTNKTTGNTDKRAFVETWQSFYRKKLKEVWKPAV

SEQ ID NO: 34566 - protein, 977 aa, synthetic construct
  REGION 1..977: note = engineered CasX variant
QEIKRINKIRRRLVKDSNTKKAGKTGPMKTLLVRVMTPDLRERLENLRKKPENIPQPISNTSRANLNKLLTDYTEMKKAILHVYDEEFQKDPVGLMSRVAQPASKKIDQNKLKPEMDEKGNLTTAGFACSQCGQPLFVYKLEQVSEKGKAYTNYFGRCNVAEHEKLILLAQLKPEKDSDEAVTYSLGKFGQRALDFYSIHVTKESTHPVKPLAQIAGNRYASPVGKALSDACMGTIASFLSKYQDIIIEHQKVVKGNQKRLESLRELAGKENLEYPSVTLPPQPHTKEGVDAYNEVIARVRMWVNLNLWQKLKLSRDDAKPLLRLKGFPSFPLVERQANEVDWWDMVCNVKKLINEKKEDGKVFWQNLAGYKRQEALRPYLSSEEDRKKGKKFARYQLGDLLLHLEKKHGEDWGKVYDEAWERIDKKVEGLSKHIKLEEERRSEDAQSKAALTDWLRAKASFVIEGLKEADKDEFCRCELKLQKWYGDLRGKPFAIEAENSILDISGFSKQYNCAFIWQKDGVKKLNLYLIINYFKGGKLRFKKIKPEAFEANRFYTVINKKSGEIVPMEVNFNFDDPNLIILPLAFGKRQGREFIWNDLLSLETGSLKLANGRVIEKTLYNRRTRQDEPALFVALTFERREVLDSSNIKPMNLIGVDRGENIPAVIALTDPEGCPLSRFKDSLGNPTHILRIGESYKEKQRTIQAKKEVEQRRAGGYSRKYASKAKNLADDMVRNTARDLLYYAVTQDAMLIFENLSRGFGRQGKRTFMAERQYTRMEDWLTAKLAYEGLPSKTYLSKTLAQYTSKTCSNCGFTITSADYDRVLEKLKKTATGWMTTINGKELKVEGQITYYNRYKRQNVVKDLSVELDRLSEESVNNDISSWTKGRQGEALSLLKKRFSHRPVQEKFVCLNCGFETHADEQAALNIARSWLFLRSQEYKKYQTNKTTGNTDKRAFVETWQSFYRKKLKEVWKPAV

SEQ ID NO: 34567 - protein, 978 aa, synthetic construct
  REGION 1..978: note = engineered CasX variant
QEIKRINKIRRRLVKDSNTKKAGKTGPMKTLLVRVMTPDLRERLENLRKKPENIPQPISNTSRANLNKLLTDYTEMKKAILHVYDEEFQKDPVGLMSRVAQPASKKIDQNKLKPEMDEKGNLTTAGFACSQCGQPLFVYKLEQVSEKGKAYTNYFGRCNVAEHEKLILLAQLKPEKDSDEAVTYSLGKFGQRALDFYSIHVTKESTHPVKPLAQIAGNRYASYPVGKALSDACMGTIASFLSKYQDIIIEHQKVVKGNQKRLESLRELAGKENLEYPSVTLPPQPHTKEGVDAYNEVIARVRMWVNLNLWQKLKLSRDDAKPLLRLKGFPSFPLVERQANEVDWWDMVCNVKKLINEKKEDGKVFWQNLAGYKRQEALRPYLSSEEDRKKGKKFARYQLGDLLLHLEKKHGEDWGKVYDEAWERIDKKVEGLSKHIKLEEERRSEDAQSKAALTDWLRAKASFVIEGLKEADKDEFCRCELKLQKWYGDLRGKPFAIEAENSILDISGFSKQYNCAFIWQKDGVKKLNLYLIINYFKGGKLRFKKIKPEAFEANRFYTVINKKSGEIVPMEVNFNFDDPNLIILPLAFGKRQGREFIWNDLLSLETGSLKLANGRVIEKTLYNRRTRQDEPALFVALTFERREVLDSSNIKPMNLIGVDRGENIPAVIALTDPEGCPLSRFKDSLGNPTHILRIGESYKEKQRTIQAKKEVEQRRAGGYSRKYASKAKNLADDMVRNTARDLLYYAVTQDAMLIFENLSRGFGRQGKRTFMAERQYTRMEDWLTAKLAYEGLPSKTYLSKTLAQYTSKTCSNCGFTITSADYDRVLEKLKKTATGWMTTINGKELKVEGQITYYNRYKRQNVVKDLSVELDRLSEESVNNDISSWTKGRSGEALSLLKKRFSHRPVQEKFVCLNCEFETHADEQAALNIARSWLFLRSQEYKKYQTNKTTGNTDKRAFVETWQSFYRKKLKEVWKPAV

SEQ ID NO: 34568 - protein, 978 aa, synthetic construct
  REGION 1..978: note = engineered CasX variant
QEIKRINKIRRRLVKDSNTKKAGKTGPMKTLLVRVMTPDLRERLENLRKKPENIPQPISNTSRANLNKLLTDYTEMKKAILHVYDEEFQKDPVGLMSRVAQPASKKIDQNKLKPEMDEKGNLTTAGFACSQCGQPLFVYKLEQVSEKGKAYTNYFGRCNVAEHEKLILLAQLKPEKDSDEAVTYSLGKFGQRALDFYSIHVTKESTHPVKPLAQIAGNRYASHPVGKALSDACMGTIASFLSKYQDIIIEHQKVVKGNQKRLESLRELAGKENLEYPSVTLPPQPHTKEGVDAYNEVIARVRMWVNLNLWQKLKLSRDDAKPLLRLKGFPSFPLVERQANEVDWWDMVCNVKKLINEKKEDGKVFWQNLAGYKRQEALRPYLSSEEDRKKGKKFARYQLGDLLLHLEKKHGEDWGKVYDEAWERIDKKVEGLSKHIKLEEERRSEDAQSKAALTDWLRAKASFVIEGLKEADKDEFCRCELKLQKWYGDLRGKPFAIEAENSILDISGFSKQYNCAFIWQKDGVKKLNLYLIINYFKGGKLRFKKIKPEAFEANRFYTVINKKSGEIVPMEVNFNFDDPNLIILPLAFGKRQGREFIWNDLLSLETGSLKLANGRVIEKTLYNRRTRQDEPALFVALTFERREVLDSSNIKPMNLIGVDRGENIPAVIALTDPEGCPLSRFKDSLGNPTHILRIGESYKEKQRTIQAKKEVEQRRAGGYSRKYASKAKNLADDMVRNTARDLLYYAVTQDAMLIFENLSRGFGRQGKRTFMAERQYTRMEDWLTAKLAYEGLPSKTYLSKTLAQYTSKTCSNCGFTITSADYDRVLEKLKKTATGWMTTINGKELKVEGQITYYNRYKRQNVVKDLSVELDRLSEESVNNDISSWTKGRSGEALSLLKKRFSHRPVQEKFVCLNCEFETHADEQAALNIARSWLFLRSQEYKKYQTNKTTGNTDKRAFVETWQSFYRKKLKEVWKPAV

SEQ ID NO: 34569 - protein, 978 aa, synthetic construct
  REGION 1..978: note = engineered CasX variant
QEIKRINKIRRRLVKDSNTKKAGKTGPMKTLLVRVMTPDLRERLENLRKKPENIPQPISNTSRANLNKLLTDYTEMKKAILHVYDEEFQKDPVGLMSRVAQPASKKIDQNKLKPEMDEKGNLTTAGFACSQCGQPLFVYKLEQVSEKGKAYTNYFGRCNVAEHEKLILLAQLKPEKDSDEAVTYSLGKFGQRALDFYSIHVTKESTHPVKPLAQIAGNRYASSPVGKALSDACMGTIASFLSKYQDIIIEHQKVVKGNQKRLESLRELAGKENLEYPSVTLPPQPHTKEGVDAYNEVIARVRMWVNLNLWQKLKLSRDDAKPLLRLKGFPSFPLVERQANEVDWWDMVCNVKKLINEKKEDGKVFWQNLAGYKRQEALRPYLSSEEDRKKGKKFARYQLGDLLLHLEKKHGEDWGKVYDEAWERIDKKVEGLSKHIKLEEERRSEDAQSKAALTDWLRAKASFVIEGLKEADKDEFCRCELKLQKWYGDLRGKPFAIEAENSILDISGFSKQYNCAFIWQKDGVKKLNLYLIINYFKGGKLRFKKIKPEAFEANRFYTVINKKSGEIVPMEVNFNFDDPNLIILPLAFGKRQGREFIWNDLLSLETGSLKLANGRVIEKTLYNRRTRQDEPALFVALTFERREVLDSSNIKPMNLIGVDRGENIPAVIALTDPEGCPLSRFKDSLGNPTHILRIGESYKEKQRTIQAKKEVEQRRAGGYSRKYASKAKNLADDMVRNTARDLLYYAVTQDAMLIFENLSRGFGRQGKRTFMAERQYTRMEDWLTAKLAYEGLPSKTYLSKTLAQYTSKTCSNCGFTITSADYDRVLEKLKKTATGWMTTINGKELKVEGQITYYNRYKRQNVVKDLSVELDRLSEESVNNDISSWTKGRSGEALSLLKKRFSHRPVQEKFVCLNCEFETHADEQAALNIARSWLFLRSQEYKKYQTNKTTGNTDKRAFVETWQSFYRKKLKEVWKPAV

SEQ ID NO: 34570 - protein, 978 aa, synthetic construct
  REGION 1..978: note = engineered CasX variant
QEIKRINKIRRRLVKDSNTKKAGKTGPMKTLLVRVMTPDLRERLENLRKKPENIPQPISNTSRANLNKLLTDYTEMKKAILHVYDEEFQKDPVGLMSRVAQPASKKIDQNKLKPEMDEKGNLTTAGFACSQCGQPLFVYKLEQVSEKGKAYTNYFGRCNVAEHEKLILLAQLKPEKDSDEAVTYSLGKFGQRALDFYSIHVTKESTHPVKPLAQIAGNRYASTPVGKALSDACMGTIASFLSKYQDIIIEHQKVVKGNQKRLESLRELAGKENLEYPSVTLPPQPHTKEGVDAYNEVIARVRMWVNLNLWQKLKLSRDDAKPLLRLKGFPSFPLVERQANEVDWWDMVCNVKKLINEKKEDGKVFWQNLAGYKRQEALRPYLSSEEDRKKGKKFARYQLGDLLLHLEKKHGEDWGKVYDEAWERIDKKVEGLSKHIKLEEERRSEDAQSKAALTDWLRAKASFVIEGLKEADKDEFCRCELKLQKWYGDLRGKPFAIEAENSILDISGFSKQYNCAFIWQKDGVKKLNLYLIINYFKGGKLRFKKIKPEAFEANRFYTVINKKSGEIVPMEVNFNFDDPNLIILPLAFGKRQGREFIWNDLLSLETGSLKLANGRVIEKTLYNRRTRQDEPALFVALTFERREVLDSSNIKPMNLIGVDRGENIPAVIALTDPEGCPLSRFKDSLGNPTHILRIGESYKEKQRTIQAKKEVEQRRAGGYSRKYASKAKNLADDMVRNTARDLLYYAVTQDAMLIFENLSRGFGRQGKRTFMAERQYTRMEDWLTAKLAYEGLPSKTYLSKTLAQYTSKTCSNCGFTITSADYDRVLEKLKKTATGWMTTINGKELKVEGQITYYNRYKRQNVVKDLSVELDRLSEESVNNDISSWTKGRSGEALSLLKKRFSHRPVQEKFVCLNCEFETHADEQAALNIARSWLFLRSQEYKKYQTNKTTGNTDKRAFVETWQSFYRKKLKEVWKPAV

SEQ ID NO: 34571 - protein, 978 aa, synthetic construct
  REGION 1..978: note = engineered CasX variant
QEIKRINKIRRRLVKDSNTKKAGKTGPMKTLLVRVMTPDLRERLENLRKKPENIPQPISNTSRANLNKLLTDYTEMKKAILHVYDEEFQKDPVGLMSRVAQPASKKIDQNKLKPEMDEKGNLTTAGFACSQCGQPLFVYKLEQVSEKGKAYTNYFGRCNVAEHEKLILLAQLKPEKDSDEAVTYSLGKFGQRALDFYSIHVTKESTHPVKPLAQIAGNRYASAPVGKALSDACMGTIASFLSKYQDIIIEHQKVVKGNQKRLESLRELAGKENLEYPSVTLPPQPHTKEGVDAYNEVIARVRMWVNLNLWQKLKLSRDDAKPLLRLKGFPSFPLVERQANEVDWWDMVCNVKKLINEKKEDGKVFWQNLAGYKRQEALRPYLSSEEDRKKGKKFARYQLGDLLLHLEKKHGEDWGKVYDEAWERIDKKVEGLSKHIKLEEERRSEDAQSKAALTDWLRAKASFVIEGLKEADKDEFCRCELKLQKWYGDLRGKPFAIEAENSILDISGFSKQYNCAFIWQKDGVKKLNLYLIINYFKGGKLRFKKIKPEAFEANRFYTVINKKSGEIVPMEVNFNFDDPNLIILPLAFGKRQGREFIWNDLLSLETGSLKLANGRVIEKTLYNRRTRQDEPALFVALTFERREVLDSSNIKPMNLIGVDRGENIPAVIALTDPEGCPLSRFKDSLGNPTHILRIGESYKEKQRTIQAKKEVEQRRAGGYSRKYASKAKNLADDMVRNTARDLLYYAVTQDAMLIFENLSRGFGRQGKRTFMAERQYTRMEDWLTAKLAYEGLPSKTYLSKTLAQYTSKTCSNCGFTITSADYDRVLEKLKKTATGWMTTINGKELKVEGQITYYNRYKRQNVVKDLSVELDRLSEESVNNDISSWTKGRSGEALSLLKKRFSHRPVQEKFVCLNCEFETHADEQAALNIARSWLFLRSQEYKKYQTNKTTGNTDKRAFVETWQSFYRKKLKEVWKPAV

SEQ ID NO: 34572 - protein, 978 aa, synthetic construct
  REGION 1..978: note = engineered CasX variant
QEIKRINKIRRRLVKDSNTKKAGKTGPMKTLLVRVMTPDLRERLENLRKKPENIPQPISNTSRANLNKLLTDYTEMKKAILHVYDEEFQKDPVGLMSRVAQPASKKIDQNKLKPEMDEKGNLTTAGFACSQCGQPLFVYKLEQVSEKGKAYTNYFGRCNVAEHEKLILLAQLKPEKDSDEAVTYSLGKFGQRALDFYSIHVTKESTHPVKPLAQIAGNRYASVPVGKALSDACMGTIASFLSKYQDIIIEHQKVVKGNQKRLESLRELAGKENLEYPSVTLPPQPHTKEGVDAYNEVIARVRMWVNLNLWQKLKLSRDDAKPLLRLKGFPSFPLVERQANEVDWWDMVCNVKKLINEKKEDGKVFWQNLAGYKRQEALRPYLSSEEDRKKGKKFARYQLGDLLLHLEKKHGEDWGKVYDEAWERIDKKVEGLSKHIKLEEERRSEDAQSKAALTDWLRAKASFVIEGLKEADKDEFCRCELKLQKWYGDLRGKPFAIEAENSILDISGFSKQYNCAFIWQKDGVKKLNLYLIINYFKGGKLRFKKIKPEAFEANRFYTVINKKSGEIVPMEVNFNFDDPNLIILPLAFGKRQGREFIWNDLLSLETGSLKLANGRVIEKTLYNRRTRQDEPALFVALTFERREVLDSSNIKPMNLIGVDRGENIPAVIALTDPEGCPLSRFKDSLGNPTHILRIGESYKEKQRTIQAKKEVEQRRAGGYSRKYASKAKNLADDMVRNTARDLLYYAVTQDAMLIFENLSRGFGRQGKRTFMAERQYTRMEDWLTAKLAYEGLPSKTYLSKTLAQYTSKTCSNCGFTITSADYDRVLEKLKKTATGWMTTINGKELKVEGQITYYNRYKRQNVVKDLSVELDRLSEESVNNDISSWTKGRSGEALSLLKKRFSHRPVQEKFVCLNCEFETHADEQAALNIARSWLFLRSQEYKKYQTNKTTGNTDKRAFVETWQSFYRKKLKEVWKPAV

SEQ ID NO: 34573 - protein, 978 aa, synthetic construct
  REGION 1..978: note = engineered CasX variant
QEIKRINKIRRRLVKDSNTKKAGKTGPMKTLLVRVMTPDLRERLENLRKKPENIPQPISNTSRANLNKLLTDYTEMKKAILHVYDEEFQKDPVGLMSRVAQPASKKIDQNKLKPEMDEKGNLTTAGFACSQCGQPLFVYKLEQVSEKGKAYTNYFGRCNVAEHEKLIKLAQLKPEKDSDEAVTYSLGKFGQRALDFYSIHVTKESTHPVKPLAQIAGNRYASGPVGKALSDACMGTIASFLSKYQDIIIEHQKVVKGNQKRLESLRELAGKENLEYPSVTLPPQPHTKEGVDAYNEVIARVRMWVNLNLWQKLKLSRDDAKPLLRLKGFPSFPLVERQANEVDWWDMVCNVKKLINEKKEDGKVFWQNLAGYKRQEALRPYLSSEEDRKKGKKFARYQLGDLLLHLEKKHGEDWGKVYDEAWERIDKKVEGLSKHIKLEEERRSEDAQSKAALTDWLRAKASFVIEGLKEADKDEFCRCELKLQKWYGDLRGKPFAIEAENSILDISGFSKQYNCAFIWQKDGVKKLNLYLIINYFKGGKLRFKKIKPEAFEANRFYTVINKKSGEIVPMEVNFNFDDPNLIILPLAFGKRQGREFIWNDLLSLETGSLKLANGRVIEKTLYNRRTRQDEPALFVALTFERREVLDSSNIKPMNLIGVDRGENIPAVIALTDPEGCPLSRFKDSLGNPTHILRIGESYKEKQRTIQAKKEVEQRRAGGYSRKYASKAKNLADDMVRNTARDLLYYAVTQDAMLIFENLSRGFGRQGKRTFMAERQYTRMEDWLTAKLAYEGLPSKTYLSKTLAQYTSKTCSNCGFTITSADYDRVLEKLKKTATGWMTTINGKELKVEGQITYYNRYKRQNVVKDLSVELDRLSEESVNNDISSWTKGRSGEALSLLKKRFSHRPVQEKFVCLNCEFETHADEQAALNIARSWLFLRSQEYKKYQTNKTTGNTDKRAFVETWQSFYRKKLKEVWKPAV

SEQ ID NO: 34574 - protein, 977 aa, synthetic construct
  REGION 1..977: note = engineered CasX variant
QEIKRINKIRRRLVKDSNTKKAGKTGPMKTLLVRVMTPDLRERLENLRKKPENIPQPISNTSRANLNKLLTDYTEMKKAILHVYDEEFQKDPVGLMSRVAQPASKKIDQNKLKPEMDEKGNLTTAGFACSQCGQPLFVYKLEQVSEKGKAYTNYFGRCNVAEHEKLILLAQLKPEKDSDEAVTYSLGKFGQRALDFYSIHVTKESTHPVKPLAQIAGNRYASPVGKALSDACMGTIASFLSKYQDIIIEHQKVVKGNQKRLESLRELAGKENLEYPSVTLPPQPHTKEGVDAYNEVIARVRMWVNLNLWQKLKLSRDDAKPLLRLKGFPSFPLVERQANEVDWWDMVCNVKKLINEKKEDGKVFWQNLAGYKRQEALRPYLSSEEDRKKGKKFARYQLGDLLLHLEKKHGEDWGKVYDEAWERIDKKVEGLSKHIKLEEERRSEDAQSKAALTDWLRAKASFVIEGLKEADKDEFCRCELKLQKWYGDLRGKPFAIEAENSILDISGFSKQYNCAFIWQKDGVKKLNLYLIINYFKGGKLRFKKIKPEAFEANRFYTVINKKSGEIVPMEVNFNFDDPNLIILPLAFGKRQGREFIWNDLLSLETGSLKLANGRVIEKTLYNRRTRQDEPALFVALTFERREVLDSSNIKPMNLIGVDRGENIPAVIALTDPEGCPLSRFKDSLGNPTHILRIGESYKEKQRTIQAKKEVEQRRAGGYSRKYASKAKNLADDMVRNTARDLLYYAVTQDAMLIFENLSRGFGRQGKRTFMAERQYTRMEDWLTAKLAYEGLPSKTYLSKTLAQYTSKTCSNCGFTITSADYDRVLEKLKKTATGWMTTINGKELKVEGQITYYNRYKRQNVVKDLSVELDRLSEESVNNDISSWTKGRSGEALSLLKKRFSHRPVQEKFVCLNCEFETHADEQAALNIARSWLFLRSQEYKKYQTNKTTGNTDKRAFVETWQSFYRKKLKEVWKPAV

SEQ ID NO: 34575 - protein, 979 aa, synthetic construct
  REGION 1..979: note = engineered CasX variant
QEIKRINKIRRRLVKDSNTKKAGKTGPMKTLLVRVMTPDLRERLENLRKKPENIPQPISNTSRANLNKLLTDYTEMKKAILHVYDEEFQKDPVGLMSRVAQPASKKIDQNKLKPEMDEKGNLTTAGFACSQCGQPLFVYKLEQVSEKGKAYTNYFGRCNVAEHEKLILLAQLKPEKDSDEAVTYSLGKFGQRALDFYSIHVTKESTHPVKPLAQIAGNRYASYPVGKALSDACMGTIASFLSKYQDIIIEHQKVVKGNQKRLESLRELAGKENLEYPSVTLPPQPHTKEGVDAYNEVIARVRMWVNLNLWQKLKLSRDDAKPLLRLKGFPSFPLVERQANEVDWWDMVCNVKKLINEKKEDGKVFWQNLAGYKRQEALRPYLSSEEDRKKGKKFARYQLGDLLLHLEKKHGEDWGKVYDEAWERIDKKVEGLSKHIKLEEERRSEDAQSKAALTDWLRAKASFVIEGLKEADKDEFCRCELKLQKWYGDLRGKPFAIEAENSILDISGFSKQYNCAFIWQKDGVKKLNLYLIINYFKGGKLRFKKIKPEAFEANRFYTVINKKSGEIVPMEVNFNFDDPNLIILPLAFGKRQGREFIWNDLLSLETGSLKLANGRVIEKTLYNRRTRQDEPALFVALTFERREVLDSSNIKPMNLIGVDRGENIPAVIALTDPEGCPLSRFKDSLGNPTHILRIGESYKEKQRTIQAKKEVEQRRAGGYSRKYASKAKNLADDMVRNTARDLLYYAVTQDAMLIFENLSRGFGRQGKRTFMAERQYTRMEDWLTAKLAYEGLPSKTYLSKTLAQYTSKTCSNCGFTITSADYDRVLEKLKKTATGWMTTINGKELKVEGQITYYNRYKRQNVVKDLSVELDRLSEESVNNDISSWTKGRSGEALSLLKKRFSHRPVQEKFVCLNCGFETHADEQAALNIARSWLFLRSQEYKKYQTNKTSTGNTDKRAFVETWQSFYRKKLKEVWKPAV

SEQ ID NO: 34576 - protein, 979 aa, synthetic construct
  REGION 1..979: note = engineered CasX variant
QEIKRINKIRRRLVKDSNTKKAGKTGPMKTLLVRVMTPDLRERLENLRKKPENIPQPISNTSRANLNKLLTDYTEMKKAILHVYDEEFQKDPVGLMSRVAQPASKKIDQNKLKPEMDEKGNLTTAGFACSQCGQPLFVYKLEQVSEKGKAYTNYFGRCNVAEHEKLILLAQLKPEKDSDEAVTYSLGKFGQRALDFYSIHVTKESTHPVKPLAQIAGNRYASHPVGKALSDACMGTIASFLSKYQDIIIEHQKVVKGNQKRLESLRELAGKENLEYPSVTLPPQPHTKEGVDAYNEVIARVRMWVNLNLWQKLKLSRDDAKPLLRLKGFPSFPLVERQANEVDWWDMVCNVKKLINEKKEDGKVFWQNLAGYKRQEALRPYLSSEEDRKKGKKFARYQLGDLLLHLEKKHGEDWGKVYDEAWERIDKKVEGLSKHIKLEEERRSEDAQSKAALTDWLRAKASFVIEGLKEADKDEFCRCELKLQKWYGDLRGKPFAIEAENSILDISGFSKQYNCAFIWQKDGVKKLNLYLIINYFKGGKLRFKKIKPEAFEANRFYTVINKKSGEIVPMEVNFNFDDPNLIILPLAFGKRQGREFIWNDLLSLETGSLKLANGRVIEKTLYNRRTRQDEPALFVALTFERREVLDSSNIKPMNLIGVDRGENIPAVIALTDPEGCPLSRFKDSLGNPTHILRIGESYKEKQRTIQAKKEVEQRRAGGYSRKYASKAKNLADDMVRNTARDLLYYAVTQDAMLIFENLSRGFGRQGKRTFMAERQYTRMEDWLTAKLAYEGLPSKTYLSKTLAQYTSKTCSNCGFTITSADYDRVLEKLKKTATGWMTTINGKELKVEGQITYYNRYKRQNVVKDLSVELDRLSEESVNNDISSWTKGRSGEALSLLKKRFSHRPVQEKFVCLNCGFETHADEQAALNIARSWLFLRSQEYKKYQTNKTSTGNTDKRAFVETWQSFYRKKLKEVWKPAV

SEQ ID NO: 34577 - protein, 979 aa, synthetic construct
  REGION 1..979: note = engineered CasX variant
QEIKRINKIRRRLVKDSNTKKAGKTGPMKTLLVRVMTPDLRERLENLRKKPENIPQPISNTSRANLNKLLTDYTEMKKAILHVYDEEFQKDPVGLMSRVAQPASKKIDQNKLKPEMDEKGNLTTAGFACSQCGQPLFVYKLEQVSEKGKAYTNYFGRCNVAEHEKLILLAQLKPEKDSDEAVTYSLGKFGQRALDFYSIHVTKESTHPVKPLAQIAGNRYASSPVGKALSDACMGTIASFLSKYQDIIIEHQKVVKGNQKRLESLRELAGKENLEYPSVTLPPQPHTKEGVDAYNEVIARVRMWVNLNLWQKLKLSRDDAKPLLRLKGFPSFPLVERQANEVDWWDMVCNVKKLINEKKEDGKVFWQNLAGYKRQEALRPYLSSEEDRKKGKKFARYQLGDLLLHLEKKHGEDWGKVYDEAWERIDKKVEGLSKHIKLEEERRSEDAQSKAALTDWLRAKASFVIEGLKEADKDEFCRCELKLQKWYGDLRGKPFAIEAENSILDISGFSKQYNCAFIWQKDGVKKLNLYLIINYFKGGKLRFKKIKPEAFEANRFYTVINKKSGEIVPMEVNFNFDDPNLIILPLAFGKRQGREFIWNDLLSLETGSLKLANGRVIEKTLYNRRTRQDEPALFVALTFERREVLDSSNIKPMNLIGVDRGENIPAVIALTDPEGCPLSRFKDSLGNPTHILRIGESYKEKQRTIQAKKEVEQRRAGGYSRKYASKAKNLADDMVRNTARDLLYYAVTQDAMLIFENLSRGFGRQGKRTFMAERQYTRMEDWLTAKLAYEGLPSKTYLSKTLAQYTSKTCSNCGFTITSADYDRVLEKLKKTATGWMTTINGKELKVEGQITYYNRYKRQNVVKDLSVELDRLSEESVNNDISSWTKGRSGEALSLLKKRFSHRPVQEKFVCLNCGFETHADEQAALNIARSWLFLRSQEYKKYQTNKTSTGNTDKRAFVETWQSFYRKKLKEVWKPAV

SEQ ID NO: 34578 - protein, 979 aa, synthetic construct
  REGION 1..979: note = engineered CasX variant
QEIKRINKIRRRLVKDSNTKKAGKTGPMKTLLVRVMTPDLRERLENLRKKPENIPQPISNTSRANLNKLLTDYTEMKKAILHVYDEEFQKDPVGLMSRVAQPASKKIDQNKLKPEMDEKGNLTTAGFACSQCGQPLFVYKLEQVSEKGKAYTNYFGRCNVAEHEKLILLAQLKPEKDSDEAVTYSLGKFGQRALDFYSIHVTKESTHPVKPLAQIAGNRYASTPVGKALSDACMGTIASFLSKYQDIIIEHQKVVKGNQKRLESLRELAGKENLEYPSVTLPPQPHTKEGVDAYNEVIARVRMWVNLNLWQKLKLSRDDAKPLLRLKGFPSFPLVERQANEVDWWDMVCNVKKLINEKKEDGKVFWQNLAGYKRQEALRPYLSSEEDRKKGKKFARYQLGDLLLHLEKKHGEDWGKVYDEAWERIDKKVEGLSKHIKLEEERRSEDAQSKAALTDWLRAKASFVIEGLKEADKDEFCRCELKLQKWYGDLRGKPFAIEAENSILDISGFSKQYNCAFIWQKDGVKKLNLYLIINYFKGGKLRFKKIKPEAFEANRFYTVINKKSGEIVPMEVNFNFDDPNLIILPLAFGKRQGREFIWNDLLSLETGSLKLANGRVIEKTLYNRRTRQDEPALFVALTFERREVLDSSNIKPMNLIGVDRGENIPAVIALTDPEGCPLSRFKDSLGNPTHILRIGESYKEKQRTIQAKKEVEQRRAGGYSRKYASKAKNLADDMVRNTARDLLYYAVTQDAMLIFENLSRGFGRQGKRTFMAERQYTRMEDWLTAKLAYEGLPSKTYLSKTLAQYTSKTCSNCGFTITSADYDRVLEKLKKTATGWMTTINGKELKVEGQITYYNRYKRQNVVKDLSVELDRLSEESVNNDISSWTKGRSGEALSLLKKRFSHRPVQEKFVCLNCGFETHADEQAALNIARSWLFLRSQEYKKYQTNKTSTGNTDKRAFVETWQSFYRKKLKEVWKPAV

SEQ ID NO: 34579 - protein, 979 aa, synthetic construct
  REGION 1..979: note = engineered CasX variant
QEIKRINKIRRRLVKDSNTKKAGKTGPMKTLLVRVMTPDLRERLENLRKKPENIPQPISNTSRANLNKLLTDYTEMKKAILHVYDEEFQKDPVGLMSRVAQPASKKIDQNKLKPEMDEKGNLTTAGFACSQCGQPLFVYKLEQVSEKGKAYTNYFGRCNVAEHEKLILLAQLKPEKDSDEAVTYSLGKFGQRALDFYSIHVTKESTHPVKPLAQIAGNRYASAPVGKALSDACMGTIASFLSKYQDIIIEHQKVVKGNQKRLESLRELAGKENLEYPSVTLPPQPHTKEGVDAYNEVIARVRMWVNLNLWQKLKLSRDDAKPLLRLKGFPSFPLVERQANEVDWWDMVCNVKKLINEKKEDGKVFWQNLAGYKRQEALRPYLSSEEDRKKGKKFARYQLGDLLLHLEKKHGEDWGKVYDEAWERIDKKVEGLSKHIKLEEERRSEDAQSKAALTDWLRAKASFVIEGLKEADKDEFCRCELKLQKWYGDLRGKPFAIEAENSILDISGFSKQYNCAFIWQKDGVKKLNLYLIINYFKGGKLRFKKIKPEAFEANRFYTVINKKSGEIVPMEVNFNFDDPNLIILPLAFGKRQGREFIWNDLLSLETGSLKLANGRVIEKTLYNRRTRQDEPALFVALTFERREVLDSSNIKPMNLIGVDRGENIPAVIALTDPEGCPLSRFKDSLGNPTHILRIGESYKEKQRTIQAKKEVEQRRAGGYSRKYASKAKNLADDMVRNTARDLLYYAVTQDAMLIFENLSRGFGRQGKRTFMAERQYTRMEDWLTAKLAYEGLPSKTYLSKTLAQYTSKTCSNCGFTITSADYDRVLEKLKKTATGWMTTINGKELKVEGQITYYNRYKRQNVVKDLSVELDRLSEESVNNDISSWTKGRSGEALSLLKKRFSHRPVQEKFVCLNCGFETHADEQAALNIARSWLFLRSQEYKKYQTNKTSTGNTDKRAFVETWQSFYRKKLKEVWKPAV

SEQ ID NO: 34580 - protein, 979 aa, synthetic construct
  REGION 1..979: note = engineered CasX variant
QEIKRINKIRRRLVKDSNTKKAGKTGPMKTLLVRVMTPDLRERLENLRKKPENIPQPISNTSRANLNKLLTDYTEMKKAILHVYDEEFQKDPVGLMSRVAQPASKKIDQNKLKPEMDEKGNLTTAGFACSQCGQPLFVYKLEQVSEKGKAYTNYFGRCNVAEHEKLILLAQLKPEKDSDEAVTYSLGKFGQRALDFYSIHVTKESTHPVKPLAQIAGNRYASVPVGKALSDACMGTIASFLSKYQDIIIEHQKVVKGNQKRLESLRELAGKENLEYPSVTLPPQPHTKEGVDAYNEVIARVRMWVNLNLWQKLKLSRDDAKPLLRLKGFPSFPLVERQANEVDWWDMVCNVKKLINEKKEDGKVFWQNLAGYKRQEALRPYLSSEEDRKKGKKFARYQLGDLLLHLEKKHGEDWGKVYDEAWERIDKKVEGLSKHIKLEEERRSEDAQSKAALTDWLRAKASFVIEGLKEADKDEFCRCELKLQKWYGDLRGKPFAIEAENSILDISGFSKQYNCAFIWQKDGVKKLNLYLIINYFKGGKLRFKKIKPEAFEANRFYTVINKKSGEIVPMEVNFNFDDPNLIILPLAFGKRQGREFIWNDLLSLETGSLKLANGRVIEKTLYNRRTRQDEPALFVALTFERREVLDSSNIKPMNLIGVDRGENIPAVIALTDPEGCPLSRFKDSLGNPTHILRIGESYKEKQRTIQAKKEVEQRRAGGYSRKYASKAKNLADDMVRNTARDLLYYAVTQDAMLIFENLSRGFGRQGKRTFMAERQYTRMEDWLTAKLAYEGLPSKTYLSKTLAQYTSKTCSNCGFTITSADYDRVLEKLKKTATGWMTTINGKELKVEGQITYYNRYKRQNVVKDLSVELDRLSEESVNNDISSWTKGRSGEALSLLKKRFSHRPVQEKFVCLNCGFETHADEQAALNIARSWLFLRSQEYKKYQTNKTSTGNTDKRAFVETWQSFYRKKLKEVWKPAV

SEQ ID NO: 34581 - protein, 979 aa, synthetic construct
  REGION 1..979: note = engineered CasX variant
QEIKRINKIRRRLVKDSNTKKAGKTGPMKTLLVRVMTPDLRERLENLRKKPENIPQPISNTSRANLNKLLTDYTEMKKAILHVYDEEFQKDPVGLMSRVAQPASKKIDQNKLKPEMDEKGNLTTAGFACSQCGQPLFVYKLEQVSEKGKAYTNYFGRCNVAEHEKLIKLAQLKPEKDSDEAVTYSLGKFGQRALDFYSIHVTKESTHPVKPLAQIAGNRYASGPVGKALSDACMGTIASFLSKYQDIIIEHQKVVKGNQKRLESLRELAGKENLEYPSVTLPPQPHTKEGVDAYNEVIARVRMWVNLNLWQKLKLSRDDAKPLLRLKGFPSFPLVERQANEVDWWDMVCNVKKLINEKKEDGKVFWQNLAGYKRQEALRPYLSSEEDRKKGKKFARYQLGDLLLHLEKKHGEDWGKVYDEAWERIDKKVEGLSKHIKLEEERRSEDAQSKAALTDWLRAKASFVIEGLKEADKDEFCRCELKLQKWYGDLRGKPFAIEAENSILDISGFSKQYNCAFIWQKDGVKKLNLYLIINYFKGGKLRFKKIKPEAFEANRFYTVINKKSGEIVPMEVNFNFDDPNLIILPLAFGKRQGREFIWNDLLSLETGSLKLANGRVIEKTLYNRRTRQDEPALFVALTFERREVLDSSNIKPMNLIGVDRGENIPAVIALTDPEGCPLSRFKDSLGNPTHILRIGESYKEKQRTIQAKKEVEQRRAGGYSRKYASKAKNLADDMVRNTARDLLYYAVTQDAMLIFENLSRGFGRQGKRTFMAERQYTRMEDWLTAKLAYEGLPSKTYLSKTLAQYTSKTCSNCGFTITSADYDRVLEKLKKTATGWMTTINGKELKVEGQITYYNRYKRQNVVKDLSVELDRLSEESVNNDISSWTKGRSGEALSLLKKRFSHRPVQEKFVCLNCGFETHADEQAALNIARSWLFLRSQEYKKYQTNKTSTGNTDKRAFVETWQSFYRKKLKEVWKPAV

SEQ ID NO: 34582 - protein, 978 aa, synthetic construct
  REGION 1..978: note = engineered CasX variant
QEIKRINKIRRRLVKDSNTKKAGKTGPMKTLLVRVMTPDLRERLENLRKKPENIPQPISNTSRANLNKLLTDYTEMKKAILHVYDEEFQKDPVGLMSRVAQPASKKIDQNKLKPEMDEKGNLTTAGFACSQCGQPLFVYKLEQVSEKGKAYTNYFGRCNVAEHEKLILLAQLKPEKDSDEAVTYSLGKFGQRALDFYSIHVTKESTHPVKPLAQIAGNRYASPVGKALSDACMGTIASFLSKYQDIIIEHQKVVKGNQKRLESLRELAGKENLEYPSVTLPPQPHTKEGVDAYNEVIARVRMWVNLNLWQKLKLSRDDAKPLLRLKGFPSFPLVERQANEVDWWDMVCNVKKLINEKKEDGKVFWQNLAGYKRQEALRPYLSSEEDRKKGKKFARYQLGDLLLHLEKKHGEDWGKVYDEAWERIDKKVEGLSKHIKLEEERRSEDAQSKAALTDWLRAKASFVIEGLKEADKDEFCRCELKLQKWYGDLRGKPFAIEAENSILDISGFSKQYNCAFIWQKDGVKKLNLYLIINYFKGGKLRFKKIKPEAFEANRFYTVINKKSGEIVPMEVNFNFDDPNLIILPLAFGKRQGREFIWNDLLSLETGSLKLANGRVIEKTLYNRRTRQDEPALFVALTFERREVLDSSNIKPMNLIGVDRGENIPAVIALTDPEGCPLSRFKDSLGNPTHILRIGESYKEKQRTIQAKKEVEQRRAGGYSRKYASKAKNLADDMVRNTARDLLYYAVTQDAMLIFENLSRGFGRQGKRTFMAERQYTRMEDWLTAKLAYEGLPSKTYLSKTLAQYTSKTCSNCGFTITSADYDRVLEKLKKTATGWMTTINGKELKVEGQITYYNRYKRQNVVKDLSVELDRLSEESVNNDISSWTKGRSGEALSLLKKRFSHRPVQEKFVCLNCGFETHADEQAALNIARSWLFLRSQEYKKYQTNKTSTGNTDKRAFVETWQSFYRKKLKEVWKPAV

SEQ ID NO: 34583 - protein, 979 aa, synthetic construct
  REGION 1..979: note = engineered CasX variant
QEIKRINKIRRRLVKDSNTKKAGKTGPMKTLLVRVMTPDLRERLENLRKKPENIPQPISNTSRANLNKLLTDYTEMKKAILHVYDEEFQKDPVGLMSRVAQPASKKIDQNKLKPEMDEKGNLTTAGFACSQCGQPLFVYKLEQVSEKGKAYTNYFGRCNVAEHEKLILLAQLKPEKDSDEAVTYSLGKFGQRALDFYSIHVTKESTHPVKPLAQIAGNRYASYPVGKALSDACMGTIASFLSKYQDIIIEHQKVVKGNQKRLESLRELAGKENLEYPSVTLPPQPHTKEGVDAYNEVIARVRMWVNLNLWQKLKLSRDDAKPLLRLKGFPSFPLVERQANEVDWWDMVCNVKKLINEKKEDGKVFWQNLAGYKRQEALRPYLSSEEDRKKGKKFARYQLGDLLLHLEKKHGEDWGKVYDEAWERIDKKVEGLSKHIKLEEERRSEDAQSKAALTDWLRAKASFVIEGLKEADKDEFCRCELKLQKWYGDLRGKPFAIEAENSILDISGFSKQYNCAFIWQKDGVKKLNLYLIINYFKGGKLRFKKIKPEAFEANRFYTVINKKSGEIVPMEVNFNFDDPNLIILPLAFGKRQGREFIWNDLLSLETGSLKLANGRVIEKTLYNRRTRQDEPALFVALTFERREVLDSSNIKPMNLIGVDRGENIPAVIALTDPEGCPLSRFKDSLGNPTHILRIGESYKEKQRTIQAKKEVEQRRAGGYSRKYASKAKNLADDMVRNTARDLLYYAVTQDAMLIFENLSRGFGRQGKRTFMAERQYTRMEDWLTAKLAYEGLPSKTYLSKTLAQYTSKTCSNCGFTITSADYDRVLEKLKKTATGWMTTINGKELKVEGQITYYNRYKRQNVVKDLSVELDRLSEESVNNDISSWTKGRSGEALSLLKKRFSHRPVQEKFVCLNCGFETHADEQAALNIARSWLFLRSQEYKKYQTNKTTGKNTDKRAFVETWQSFYRKKLKEVWKPAV

SEQ ID NO: 34584 - protein, 979 aa, synthetic construct
  REGION 1..979: note = engineered CasX variant
QEIKRINKIRRRLVKDSNTKKAGKTGPMKTLLVRVMTPDLRERLENLRKKPENIPQPISNTSRANLNKLLTDYTEMKKAILHVYDEEFQKDPVGLMSRVAQPASKKIDQNKLKPEMDEKGNLTTAGFACSQCGQPLFVYKLEQVSEKGKAYTNYFGRCNVAEHEKLILLAQLKPEKDSDEAVTYSLGKFGQRALDFYSIHVTKESTHPVKPLAQIAGNRYASHPVGKALSDACMGTIASFLSKYQDIIIEHQKVVKGNQKRLESLRELAGKENLEYPSVTLPPQPHTKEGVDAYNEVIARVRMWVNLNLWQKLKLSRDDAKPLLRLKGFPSFPLVERQANEVDWWDMVCNVKKLINEKKEDGKVFWQNLAGYKRQEALRPYLSSEEDRKKGKKFARYQLGDLLLHLEKKHGEDWGKVYDEAWERIDKKVEGLSKHIKLEEERRSEDAQSKAALTDWLRAKASFVIEGLKEADKDEFCRCELKLQKWYGDLRGKPFAIEAENSILDISGFSKQYNCAFIWQKDGVKKLNLYLIINYFKGGKLRFKKIKPEAFEANRFYTVINKKSGEIVPMEVNFNFDDPNLIILPLAFGKRQGREFIWNDLLSLETGSLKLANGRVIEKTLYNRRTRQDEPALFVALTFERREVLDSSNIKPMNLIGVDRGENIPAVIALTDPEGCPLSRFKDSLGNPTHILRIGESYKEKQRTIQAKKEVEQRRAGGYSRKYASKAKNLADDMVRNTARDLLYYAVTQDAMLIFENLSRGFGRQGKRTFMAERQYTRMEDWLTAKLAYEGLPSKTYLSKTLAQYTSKTCSNCGFTITSADYDRVLEKLKKTATGWMTTINGKELKVEGQITYYNRYKRQNVVKDLSVELDRLSEESVNNDISSWTKGRSGEALSLLKKRFSHRPVQEKFVCLNCGFETHADEQAALNIARSWLFLRSQEYKKYQTNKTTGKNTDKRAFVETWQSFYRKKLKEVWKPAV

SEQ ID NO: 34585 - protein, 979 aa, synthetic construct
  REGION 1..979: note = engineered CasX variant
QEIKRINKIRRRLVKDSNTKKAGKTGPMKTLLVRVMTPDLRERLENLRKKPENIPQPISNTSRANLNKLLTDYTEMKKAILHVYDEEFQKDPVGLMSRVAQPASKKIDQNKLKPEMDEKGNLTTAGFACSQCGQPLFVYKLEQVSEKGKAYTNYFGRCNVAEHEKLILLAQLKPEKDSDEAVTYSLGKFGQRALDFYSIHVTKESTHPVKPLAQIAGNRYASSPVGKALSDACMGTIASFLSKYQDIIIEHQKVVKGNQKRLESLRELAGKENLEYPSVTLPPQPHTKEGVDAYNEVIARVRMWVNLNLWQKLKLSRDDAKPLLRLKGFPSFPLVERQANEVDWWDMVCNVKKLINEKKEDGKVFWQNLAGYKRQEALRPYLSSEEDRKKGKKFARYQLGDLLLHLEKKHGEDWGKVYDEAWERIDKKVEGLSKHIKLEEERRSEDAQSKAALTDWLRAKASFVIEGLKEADKDEFCRCELKLQKWYGDLRGKPFAIEAENSILDISGFSKQYNCAFIWQKDGVKKLNLYLIINYFKGGKLRFKKIKPEAFEANRFYTVINKKSGEIVPMEVNFNFDDPNLIILPLAFGKRQGREFIWNDLLSLETGSLKLANGRVIEKTLYNRRTRQDEPALFVALTFERREVLDSSNIKPMNLIGVDRGENIPAVIALTDPEGCPLSRFKDSLGNPTHILRIGESYKEKQRTIQAKKEVEQRRAGGYSRKYASKAKNLADDMVRNTARDLLYYAVTQDAMLIFENLSRGFGRQGKRTFMAERQYTRMEDWLTAKLAYEGLPSKTYLSKTLAQYTSKTCSNCGFTITSADYDRVLEKLKKTATGWMTTINGKELKVEGQITYYNRYKRQNVVKDLSVELDRLSEESVNNDISSWTKGRSGEALSLLKKRFSHRPVQEKFVCLNCGFETHADEQAALNIARSWLFLRSQEYKKYQTNKTTGKNTDKRAFVETWQSFYRKKLKEVWKPAV

SEQ ID NO: 34586 - protein, 979 aa, synthetic construct
  REGION 1..979: note = engineered CasX variant
QEIKRINKIRRRLVKDSNTKKAGKTGPMKTLLVRVMTPDLRERLENLRKKPENIPQPISNTSRANLNKLLTDYTEMKKAILHVYDEEFQKDPVGLMSRVAQPASKKIDQNKLKPEMDEKGNLTTAGFACSQCGQPLFVYKLEQVSEKGKAYTNYFGRCNVAEHEKLILLAQLKPEKDSDEAVTYSLGKFGQRALDFYSIHVTKESTHPVKPLAQIAGNRYASTPVGKALSDACMGTIASFLSKYQDIIIEHQKVVKGNQKRLESLRELAGKENLEYPSVTLPPQPHTKEGVDAYNEVIARVRMWVNLNLWQKLKLSRDDAKPLLRLKGFPSFPLVERQANEVDWWDMVCNVKKLINEKKEDGKVFWQNLAGYKRQEALRPYLSSEEDRKKGKKFARYQLGDLLLHLEKKHGEDWGKVYDEAWERIDKKVEGLSKHIKLEEERRSEDAQSKAALTDWLRAKASFVIEGLKEADKDEFCRCELKLQKWYGDLRGKPFAIEAENSILDISGFSKQYNCAFIWQKDGVKKLNLYLIINYFKGGKLRFKKIKPEAFEANRFYTVINKKSGEIVPMEVNFNFDDPNLIILPLAFGKRQGREFIWNDLLSLETGSLKLANGRVIEKTLYNRRTRQDEPALFVALTFERREVLDSSNIKPMNLIGVDRGENIPAVIALTDPEGCPLSRFKDSLGNPTHILRIGESYKEKQRTIQAKKEVEQRRAGGYSRKYASKAKNLADDMVRNTARDLLYYAVTQDAMLIFENLSRGFGRQGKRTFMAERQYTRMEDWLTAKLAYEGLPSKTYLSKTLAQYTSKTCSNCGFTITSADYDRVLEKLKKTATGWMTTINGKELKVEGQITYYNRYKRQNVVKDLSVELDRLSEESVNNDISSWTKGRSGEALSLLKKRFSHRPVQEKFVCLNCGFETHADEQAALNIARSWLFLRSQEYKKYQTNKTTGKNTDKRAFVETWQSFYRKKLKEVWKPAV

SEQ ID NO: 34587 - protein, 979 aa, synthetic construct
  REGION 1..979: note = engineered CasX variant
QEIKRINKIRRRLVKDSNTKKAGKTGPMKTLLVRVMTPDLRERLENLRKKPENIPQPISNTSRANLNKLLTDYTEMKKAILHVYDEEFQKDPVGLMSRVAQPASKKIDQNKLKPEMDEKGNLTTAGFACSQCGQPLFVYKLEQVSEKGKAYTNYFGRCNVAEHEKLILLAQLKPEKDSDEAVTYSLGKFGQRALDFYSIHVTKESTHPVKPLAQIAGNRYASAPVGKALSDACMGTIASFLSKYQDIIIEHQKVVKGNQKRLESLRELAGKENLEYPSVTLPPQPHTKEGVDAYNEVIARVRMWVNLNLWQKLKLSRDDAKPLLRLKGFPSFPLVERQANEVDWWDMVCNVKKLINEKKEDGKVFWQNLAGYKRQEALRPYLSSEEDRKKGKKFARYQLGDLLLHLEKKHGEDWGKVYDEAWERIDKKVEGLSKHIKLEEERRSEDAQSKAALTDWLRAKASFVIEGLKEADKDEFCRCELKLQKWYGDLRGKPFAIEAENSILDISGFSKQYNCAFIWQKDGVKKLNLYLIINYFKGGKLRFKKIKPEAFEANRFYTVINKKSGEIVPMEVNFNFDDPNLIILPLAFGKRQGREFIWNDLLSLETGSLKLANGRVIEKTLYNRRTRQDEPALFVALTFERREVLDSSNIKPMNLIGVDRGENIPAVIALTDPEGCPLSRFKDSLGNPTHILRIGESYKEKQRTIQAKKEVEQRRAGGYSRKYASKAKNLADDMVRNTARDLLYYAVTQDAMLIFENLSRGFGRQGKRTFMAERQYTRMEDWLTAKLAYEGLPSKTYLSKTLAQYTSKTCSNCGFTITSADYDRVLEKLKKTATGWMTTINGKELKVEGQITYYNRYKRQNVVKDLSVELDRLSEESVNNDISSWTKGRSGEALSLLKKRFSHRPVQEKFVCLNCGFETHADEQAALNIARSWLFLRSQEYKKYQTNKTTGKNTDKRAFVETWQSFYRKKLKEVWKPAV

SEQ ID NO: 34588 - protein, 979 aa, synthetic construct
  REGION 1..979: note = engineered CasX variant
QEIKRINKIRRRLVKDSNTKKAGKTGPMKTLLVRVMTPDLRERLENLRKKPENIPQPISNTSRANLNKLLTDYTEMKKAILHVYDEEFQKDPVGLMSRVAQPASKKIDQNKLKPEMDEKGNLTTAGFACSQCGQPLFVYKLEQVSEKGKAYTNYFGRCNVAEHEKLILLAQLKPEKDSDEAVTYSLGKFGQRALDFYSIHVTKESTHPVKPLAQIAGNRYASVPVGKALSDACMGTIASFLSKYQDIIIEHQKVVKGNQKRLESLRELAGKENLEYPSVTLPPQPHTKEGVDAYNEVIARVRMWVNLNLWQKLKLSRDDAKPLLRLKGFPSFPLVERQANEVDWWDMVCNVKKLINEKKEDGKVFWQNLAGYKRQEALRPYLSSEEDRKKGKKFARYQLGDLLLHLEKKHGEDWGKVYDEAWERIDKKVEGLSKHIKLEEERRSEDAQSKAALTDWLRAKASFVIEGLKEADKDEFCRCELKLQKWYGDLRGKPFAIEAENSILDISGFSKQYNCAFIWQKDGVKKLNLYLIINYFKGGKLRFKKIKPEAFEANRFYTVINKKSGEIVPMEVNFNFDDPNLIILPLAFGKRQGREFIWNDLLSLETGSLKLANGRVIEKTLYNRRTRQDEPALFVALTFERREVLDSSNIKPMNLIGVDRGENIPAVIALTDPEGCPLSRFKDSLGNPTHILRIGESYKEKQRTIQAKKEVEQRRAGGYSRKYASKAKNLADDMVRNTARDLLYYAVTQDAMLIFENLSRGFGRQGKRTFMAERQYTRMEDWLTAKLAYEGLPSKTYLSKTLAQYTSKTCSNCGFTITSADYDRVLEKLKKTATGWMTTINGKELKVEGQITYYNRYKRQNVVKDLSVELDRLSEESVNNDISSWTKGRSGEALSLLKKRFSHRPVQEKFVCLNCGFETHADEQAALNIARSWLFLRSQEYKKYQTNKTTGKNTDKRAFVETWQSFYRKKLKEVWKPAV

SEQ ID NO: 34589 - protein, 979 aa, synthetic construct
  REGION 1..979: note = engineered CasX variant
QEIKRINKIRRRLVKDSNTKKAGKTGPMKTLLVRVMTPDLRERLENLRKKPENIPQPISNTSRANLNKLLTDYTEMKKAILHVYDEEFQKDPVGLMSRVAQPASKKIDQNKLKPEMDEKGNLTTAGFACSQCGQPLFVYKLEQVSEKGKAYTNYFGRCNVAEHEKLIKLAQLKPEKDSDEAVTYSLGKFGQRALDFYSIHVTKESTHPVKPLAQIAGNRYASGPVGKALSDACMGTIASFLSKYQDIIIEHQKVVKGNQKRLESLRELAGKENLEYPSVTLPPQPHTKEGVDAYNEVIARVRMWVNLNLWQKLKLSRDDAKPLLRLKGFPSFPLVERQANEVDWWDMVCNVKKLINEKKEDGKVFWQNLAGYKRQEALRPYLSSEEDRKKGKKFARYQLGDLLLHLEKKHGEDWGKVYDEAWERIDKKVEGLSKHIKLEEERRSEDAQSKAALTDWLRAKASFVIEGLKEADKDEFCRCELKLQKWYGDLRGKPFAIEAENSILDISGFSKQYNCAFIWQKDGVKKLNLYLIINYFKGGKLRFKKIKPEAFEANRFYTVINKKSGEIVPMEVNFNFDDPNLIILPLAFGKRQGREFIWNDLLSLETGSLKLANGRVIEKTLYNRRTRQDEPALFVALTFERREVLDSSNIKPMNLIGVDRGENIPAVIALTDPEGCPLSRFKDSLGNPTHILRIGESYKEKQRTIQAKKEVEQRRAGGYSRKYASKAKNLADDMVRNTARDLLYYAVTQDAMLIFENLSRGFGRQGKRTFMAERQYTRMEDWLTAKLAYEGLPSKTYLSKTLAQYTSKTCSNCGFTITSADYDRVLEKLKKTATGWMTTINGKELKVEGQITYYNRYKRQNVVKDLSVELDRLSEESVNNDISSWTKGRSGEALSLLKKRFSHRPVQEKFVCLNCGFETHADEQAALNIARSWLFLRSQEYKKYQTNKTTGKNTDKRAFVETWQSFYRKKLKEVWKPAV

SEQ ID NO: 34590 - protein, 978 aa, synthetic construct
  REGION 1..978: note = engineered CasX variant
QEIKRINKIRRRLVKDSNTKKAGKTGPMKTLLVRVMTPDLRERLENLRKKPENIPQPISNTSRANLNKLLTDYTEMKKAILHVYDEEFQKDPVGLMSRVAQPASKKIDQNKLKPEMDEKGNLTTAGFACSQCGQPLFVYKLEQVSEKGKAYTNYFGRCNVAEHEKLILLAQLKPEKDSDEAVTYSLGKFGQRALDFYSIHVTKESTHPVKPLAQIAGNRYASPVGKALSDACMGTIASFLSKYQDIIIEHQKVVKGNQKRLESLRELAGKENLEYPSVTLPPQPHTKEGVDAYNEVIARVRMWVNLNLWQKLKLSRDDAKPLLRLKGFPSFPLVERQANEVDWWDMVCNVKKLINEKKEDGKVFWQNLAGYKRQEALRPYLSSEEDRKKGKKFARYQLGDLLLHLEKKHGEDWGKVYDEAWERIDKKVEGLSKHIKLEEERRSEDAQSKAALTDWLRAKASFVIEGLKEADKDEFCRCELKLQKWYGDLRGKPFAIEAENSILDISGFSKQYNCAFIWQKDGVKKLNLYLIINYFKGGKLRFKKIKPEAFEANRFYTVINKKSGEIVPMEVNFNFDDPNLIILPLAFGKRQGREFIWNDLLSLETGSLKLANGRVIEKTLYNRRTRQDEPALFVALTFERREVLDSSNIKPMNLIGVDRGENIPAVIALTDPEGCPLSRFKDSLGNPTHILRIGESYKEKQRTIQAKKEVEQRRAGGYSRKYASKAKNLADDMVRNTARDLLYYAVTQDAMLIFENLSRGFGRQGKRTFMAERQYTRMEDWLTAKLAYEGLPSKTYLSKTLAQYTSKTCSNCGFTITSADYDRVLEKLKKTATGWMTTINGKELKVEGQITYYNRYKRQNVVKDLSVELDRLSEESVNNDISSWTKGRSGEALSLLKKRFSHRPVQEKFVCLNCGFETHADEQAALNIARSWLFLRSQEYKKYQTNKTTGKNTDKRAFVETWQSFYRKKLKEVWKPAV

SEQ ID NO: 34591 - protein, 978 aa, synthetic construct
  REGION 1..978: note = engineered CasX variant
QEIKRINKIRRRLVKDSNTKKAGKTGPMKTLLVRVMTPDLRERLENLRKKPENIPQPISNTSRANLNKLLTDYTEMKKAILHVYDEEFQKDPVGLMSRVAQPASKKIDQNKLKPEMDEKGNLTTAGFACSQCGQPLFVYKLEQVSEKGKAYTNYFGRCNVAEHEKLILLAQLKPEKDSDEAVTYSLGKFGQRALDFYSIHVTKESTHPVKPLAQIAGNRYASYPVGKALSDACMGTIASFLSKYQDIIIEHQKVVKGNQKRLESLRELAGKENLEYPSVTLPPQPHTKEGVDAYNEVIARVRMWVNLNLWQKLKLSRDDAKPLLRLKKFPSFPLVERQANEVDWWDMVCNVKKLINEKKEDGKVFWQNLAGYKRQEALRPYLSSEEDRKKGKKFARYQLGDLLLHLEKKHGEDWGKVYDEAWERIDKKVEGLSKHIKLEEERRSEDAQSKAALTDWLRAKASFVIEGLKEADKDEFCRCELKLQKWYGDLRGKPFAIEAENSILDISGFSKQYNCAFIWQKDGVKKLNLYLIINYFKGGKLRFKKIKPEAFEANRFYTVINKKSGEIVPMEVNFNFDDPNLIILPLAFGKRQGREFIWNDLLSLETGSLKLANGRVIEKTLYNRRTRQDEPALFVALTFERREVLDSSNIKPMNLIGVDRGENIPAVIALTDPEGCPLSRFKDSLGNPTHILRIGESYKEKQRTIQAKKEVEQRRAGGYSRKYASKAKNLADDMVRNTARDLLYYAVTQDAMLIFENLSRGFGRQGKRTFMAERQYTRMEDWLTAKLAYEGLPSKTYLSKTLAQYTSKTCSNCGFTITSADYDRVLEKLKKTATGWMTTINGKELKVEGQITYYNRYKRQNVVKDLSVELDRLSEESVNNDISSWTKGRSGEALSLLKKRFSHRPVQEKFVCLNCGFETHADEQAALNIARSWLFLRSQEYKKYQTNKTTGNTDKRAFVETWQSFYRKKLKEVWKPAV

SEQ ID NO: 34592 - protein, 978 aa, synthetic construct
  REGION 1..978: note = engineered CasX variant
QEIKRINKIRRRLVKDSNTKKAGKTGPMKTLLVRVMTPDLRERLENLRKKPENIPQPISNTSRANLNKLLTDYTEMKKAILHVYDEEFQKDPVGLMSRVAQPASKKIDQNKLKPEMDEKGNLTTAGFACSQCGQPLFVYKLEQVSEKGKAYTNYFGRCNVAEHEKLILLAQLKPEKDSDEAVTYSLGKFGQRALDFYSIHVTKESTHPVKPLAQIAGNRYASHPVGKALSDACMGTIASFLSKYQDIIIEHQKVVKGNQKRLESLRELAGKENLEYPSVTLPPQPHTKEGVDAYNEVIARVRMWVNLNLWQKLKLSRDDAKPLLRLKKFPSFPLVERQANEVDWWDMVCNVKKLINEKKEDGKVFWQNLAGYKRQEALRPYLSSEEDRKKGKKFARYQLGDLLLHLEKKHGEDWGKVYDEAWERIDKKVEGLSKHIKLEEERRSEDAQSKAALTDWLRAKASFVIEGLKEADKDEFCRCELKLQKWYGDLRGKPFAIEAENSILDISGFSKQYNCAFIWQKDGVKKLNLYLIINYFKGGKLRFKKIKPEAFEANRFYTVINKKSGEIVPMEVNFNFDDPNLIILPLAFGKRQGREFIWNDLLSLETGSLKLANGRVIEKTLYNRRTRQDEPALFVALTFERREVLDSSNIKPMNLIGVDRGENIPAVIALTDPEGCPLSRFKDSLGNPTHILRIGESYKEKQRTIQAKKEVEQRRAGGYSRKYASKAKNLADDMVRNTARDLLYYAVTQDAMLIFENLSRGFGRQGKRTFMAERQYTRMEDWLTAKLAYEGLPSKTYLSKTLAQYTSKTCSNCGFTITSADYDRVLEKLKKTATGWMTTINGKELKVEGQITYYNRYKRQNVVKDLSVELDRLSEESVNNDISSWTKGRSGEALSLLKKRFSHRPVQEKFVCLNCGFETHADEQAALNIARSWLFLRSQEYKKYQTNKTTGNTDKRAFVETWQSFYRKKLKEVWKPAV

SEQ ID NO: 34593 - protein, 978 aa, synthetic construct
  REGION 1..978: note = engineered CasX variant
QEIKRINKIRRRLVKDSNTKKAGKTGPMKTLLVRVMTPDLRERLENLRKKPENIPQPISNTSRANLNKLLTDYTEMKKAILHVYDEEFQKDPVGLMSRVAQPASKKIDQNKLKPEMDEKGNLTTAGFACSQCGQPLFVYKLEQVSEKGKAYTNYFGRCNVAEHEKLILLAQLKPEKDSDEAVTYSLGKFGQRALDFYSIHVTKESTHPVKPLAQIAGNRYASSPVGKALSDACMGTIASFLSKYQDIIIEHQKVVKGNQKRLESLRELAGKENLEYPSVTLPPQPHTKEGVDAYNEVIARVRMWVNLNLWQKLKLSRDDAKPLLRLKKFPSFPLVERQANEVDWWDMVCNVKKLINEKKEDGKVFWQNLAGYKRQEALRPYLSSEEDRKKGKKFARYQLGDLLLHLEKKHGEDWGKVYDEAWERIDKKVEGLSKHIKLEEERRSEDAQSKAALTDWLRAKASFVIEGLKEADKDEFCRCELKLQKWYGDLRGKPFAIEAENSILDISGFSKQYNCAFIWQKDGVKKLNLYLIINYFKGGKLRFKKIKPEAFEANRFYTVINKKSGEIVPMEVNFNFDDPNLIILPLAFGKRQGREFIWNDLLSLETGSLKLANGRVIEKTLYNRRTRQDEPALFVALTFERREVLDSSNIKPMNLIGVDRGENIPAVIALTDPEGCPLSRFKDSLGNPTHILRIGESYKEKQRTIQAKKEVEQRRAGGYSRKYASKAKNLADDMVRNTARDLLYYAVTQDAMLIFENLSRGFGRQGKRTFMAERQYTRMEDWLTAKLAYEGLPSKTYLSKTLAQYTSKTCSNCGFTITSADYDRVLEKLKKTATGWMTTINGKELKVEGQITYYNRYKRQNVVKDLSVELDRLSEESVNNDISSWTKGRSGEALSLLKKRFSHRPVQEKFVCLNCGFETHADEQAALNIARSWLFLRSQEYKKYQTNKTTGNTDKRAFVETWQSFYRKKLKEVWKPAV

SEQ ID NO: 34594 - protein, 978 aa, synthetic construct
  REGION 1..978: note = engineered CasX variant
QEIKRINKIRRRLVKDSNTKKAGKTGPMKTLLVRVMTPDLRERLENLRKKPENIPQPISNTSRANLNKLLTDYTEMKKAILHVYDEEFQKDPVGLMSRVAQPASKKIDQNKLKPEMDEKGNLTTAGFACSQCGQPLFVYKLEQVSEKGKAYTNYFGRCNVAEHEKLILLAQLKPEKDSDEAVTYSLGKFGQRALDFYSIHVTKESTHPVKPLAQIAGNRYASTPVGKALSDACMGTIASFLSKYQDIIIEHQKVVKGNQKRLESLRELAGKENLEYPSVTLPPQPHTKEGVDAYNEVIARVRMWVNLNLWQKLKLSRDDAKPLLRLKKFPSFPLVERQANEVDWWDMVCNVKKLINEKKEDGKVFWQNLAGYKRQEALRPYLSSEEDRKKGKKFARYQLGDLLLHLEKKHGEDWGKVYDEAWERIDKKVEGLSKHIKLEEERRSEDAQSKAALTDWLRAKASFVIEGLKEADKDEFCRCELKLQKWYGDLRGKPFAIEAENSILDISGFSKQYNCAFIWQKDGVKKLNLYLIINYFKGGKLRFKKIKPEAFEANRFYTVINKKSGEIVPMEVNFNFDDPNLIILPLAFGKRQGREFIWNDLLSLETGSLKLANGRVIEKTLYNRRTRQDEPALFVALTFERREVLDSSNIKPMNLIGVDRGENIPAVIALTDPEGCPLSRFKDSLGNPTHILRIGESYKEKQRTIQAKKEVEQRRAGGYSRKYASKAKNLADDMVRNTARDLLYYAVTQDAMLIFENLSRGFGRQGKRTFMAERQYTRMEDWLTAKLAYEGLPSKTYLSKTLAQYTSKTCSNCGFTITSADYDRVLEKLKKTATGWMTTINGKELKVEGQITYYNRYKRQNVVKDLSVELDRLSEESVNNDISSWTKGRSGEALSLLKKRFSHRPVQEKFVCLNCGFETHADEQAALNIARSWLFLRSQEYKKYQTNKTTGNTDKRAFVETWQSFYRKKLKEVWKPAV

SEQ ID NO: 34595 - protein, 978 aa, synthetic construct
  REGION 1..978: note = engineered CasX variant
QEIKRINKIRRRLVKDSNTKKAGKTGPMKTLLVRVMTPDLRERLENLRKKPENIPQPISNTSRANLNKLLTDYTEMKKAILHVYDEEFQKDPVGLMSRVAQPASKKIDQNKLKPEMDEKGNLTTAGFACSQCGQPLFVYKLEQVSEKGKAYTNYFGRCNVAEHEKLILLAQLKPEKDSDEAVTYSLGKFGQRALDFYSIHVTKESTHPVKPLAQIAGNRYASAPVGKALSDACMGTIASFLSKYQDIIIEHQKVVKGNQKRLESLRELAGKENLEYPSVTLPPQPHTKEGVDAYNEVIARVRMWVNLNLWQKLKLSRDDAKPLLRLKKFPSFPLVERQANEVDWWDMVCNVKKLINEKKEDGKVFWQNLAGYKRQEALRPYLSSEEDRKKGKKFARYQLGDLLLHLEKKHGEDWGKVYDEAWERIDKKVEGLSKHIKLEEERRSEDAQSKAALTDWLRAKASFVIEGLKEADKDEFCRCELKLQKWYGDLRGKPFAIEAENSILDISGFSKQYNCAFIWQKDGVKKLNLYLIINYFKGGKLRFKKIKPEAFEANRFYTVINKKSGEIVPMEVNFNFDDPNLIILPLAFGKRQGREFIWNDLLSLETGSLKLANGRVIEKTLYNRRTRQDEPALFVALTFERREVLDSSNIKPMNLIGVDRGENIPAVIALTDPEGCPLSRFKDSLGNPTHILRIGESYKEKQRTIQAKKEVEQRRAGGYSRKYASKAKNLADDMVRNTARDLLYYAVTQDAMLIFENLSRGFGRQGKRTFMAERQYTRMEDWLTAKLAYEGLPSKTYLSKTLAQYTSKTCSNCGFTITSADYDRVLEKLKKTATGWMTTINGKELKVEGQITYYNRYKRQNVVKDLSVELDRLSEESVNNDISSWTKGRSGEALSLLKKRFSHRPVQEKFVCLNCGFETHADEQAALNIARSWLFLRSQEYKKYQTNKTTGNTDKRAFVETWQSFYRKKLKEVWKPAV

SEQ ID NO: 34596 - protein, 978 aa, synthetic construct
  REGION 1..978: note = engineered CasX variant
QEIKRINKIRRRLVKDSNTKKAGKTGPMKTLLVRVMTPDLRERLENLRKKPENIPQPISNTSRANLNKLLTDYTEMKKAILHVYDEEFQKDPVGLMSRVAQPASKKIDQNKLKPEMDEKGNLTTAGFACSQCGQPLFVYKLEQVSEKGKAYTNYFGRCNVAEHEKLILLAQLKPEKDSDEAVTYSLGKFGQRALDFYSIHVTKESTHPVKPLAQIAGNRYASVPVGKALSDACMGTIASFLSKYQDIIIEHQKVVKGNQKRLESLRELAGKENLEYPSVTLPPQPHTKEGVDAYNEVIARVRMWVNLNLWQKLKLSRDDAKPLLRLKKFPSFPLVERQANEVDWWDMVCNVKKLINEKKEDGKVFWQNLAGYKRQEALRPYLSSEEDRKKGKKFARYQLGDLLLHLEKKHGEDWGKVYDEAWERIDKKVEGLSKHIKLEEERRSEDAQSKAALTDWLRAKASFVIEGLKEADKDEFCRCELKLQKWYGDLRGKPFAIEAENSILDISGFSKQYNCAFIWQKDGVKKLNLYLIINYFKGGKLRFKKIKPEAFEANRFYTVINKKSGEIVPMEVNFNFDDPNLIILPLAFGKRQGREFIWNDLLSLETGSLKLANGRVIEKTLYNRRTRQDEPALFVALTFERREVLDSSNIKPMNLIGVDRGENIPAVIALTDPEGCPLSRFKDSLGNPTHILRIGESYKEKQRTIQAKKEVEQRRAGGYSRKYASKAKNLADDMVRNTARDLLYYAVTQDAMLIFENLSRGFGRQGKRTFMAERQYTRMEDWLTAKLAYEGLPSKTYLSKTLAQYTSKTCSNCGFTITSADYDRVLEKLKKTATGWMTTINGKELKVEGQITYYNRYKRQNVVKDLSVELDRLSEESVNNDISSWTKGRSGEALSLLKKRFSHRPVQEKFVCLNCGFETHADEQAALNIARSWLFLRSQEYKKYQTNKTTGNTDKRAFVETWQSFYRKKLKEVWKPAV

SEQ ID NO: 34597 - protein, 978 aa, synthetic construct
  REGION 1..978: note = engineered CasX variant
QEIKRINKIRRRLVKDSNTKKAGKTGPMKTLLVRVMTPDLRERLENLRKKPENIPQPISNTSRANLNKLLTDYTEMKKAILHVYDEEFQKDPVGLMSRVAQPASKKIDQNKLKPEMDEKGNLTTAGFACSQCGQPLFVYKLEQVSEKGKAYTNYFGRCNVAEHEKLIKLAQLKPEKDSDEAVTYSLGKFGQRALDFYSIHVTKESTHPVKPLAQIAGNRYASGPVGKALSDACMGTIASFLSKYQDIIIEHQKVVKGNQKRLESLRELAGKENLEYPSVTLPPQPHTKEGVDAYNEVIARVRMWVNLNLWQKLKLSRDDAKPLLRLKKFPSFPLVERQANEVDWWDMVCNVKKLINEKKEDGKVFWQNLAGYKRQEALRPYLSSEEDRKKGKKFARYQLGDLLLHLEKKHGEDWGKVYDEAWERIDKKVEGLSKHIKLEEERRSEDAQSKAALTDWLRAKASFVIEGLKEADKDEFCRCELKLQKWYGDLRGKPFAIEAENSILDISGFSKQYNCAFIWQKDGVKKLNLYLIINYFKGGKLRFKKIKPEAFEANRFYTVINKKSGEIVPMEVNFNFDDPNLIILPLAFGKRQGREFIWNDLLSLETGSLKLANGRVIEKTLYNRRTRQDEPALFVALTFERREVLDSSNIKPMNLIGVDRGENIPAVIALTDPEGCPLSRFKDSLGNPTHILRIGESYKEKQRTIQAKKEVEQRRAGGYSRKYASKAKNLADDMVRNTARDLLYYAVTQDAMLIFENLSRGFGRQGKRTFMAERQYTRMEDWLTAKLAYEGLPSKTYLSKTLAQYTSKTCSNCGFTITSADYDRVLEKLKKTATGWMTTINGKELKVEGQITYYNRYKRQNVVKDLSVELDRLSEESVNNDISSWTKGRSGEALSLLKKRFSHRPVQEKFVCLNCGFETHADEQAALNIARSWLFLRSQEYKKYQTNKTTGNTDKRAFVETWQSFYRKKLKEVWKPAV

SEQ ID NO: 34598 - protein, 977 aa, synthetic construct
  REGION 1..977: note = engineered CasX variant
QEIKRINKIRRRLVKDSNTKKAGKTGPMKTLLVRVMTPDLRERLENLRKKPENIPQPISNTSRANLNKLLTDYTEMKKAILHVYDEEFQKDPVGLMSRVAQPASKKIDQNKLKPEMDEKGNLTTAGFACSQCGQPLFVYKLEQVSEKGKAYTNYFGRCNVAEHEKLILLAQLKPEKDSDEAVTYSLGKFGQRALDFYSIHVTKESTHPVKPLAQIAGNRYASPVGKALSDACMGTIASFLSKYQDIIIEHQKVVKGNQKRLESLRELAGKENLEYPSVTLPPQPHTKEGVDAYNEVIARVRMWVNLNLWQKLKLSRDDAKPLLRLKKFPSFPLVERQANEVDWWDMVCNVKKLINEKKEDGKVFWQNLAGYKRQEALRPYLSSEEDRKKGKKFARYQLGDLLLHLEKKHGEDWGKVYDEAWERIDKKVEGLSKHIKLEEERRSEDAQSKAALTDWLRAKASFVIEGLKEADKDEFCRCELKLQKWYGDLRGKPFAIEAENSILDISGFSKQYNCAFIWQKDGVKKLNLYLIINYFKGGKLRFKKIKPEAFEANRFYTVINKKSGEIVPMEVNFNFDDPNLIILPLAFGKRQGREFIWNDLLSLETGSLKLANGRVIEKTLYNRRTRQDEPALFVALTFERREVLDSSNIKPMNLIGVDRGENIPAVIALTDPEGCPLSRFKDSLGNPTHILRIGESYKEKQRTIQAKKEVEQRRAGGYSRKYASKAKNLADDMVRNTARDLLYYAVTQDAMLIFENLSRGFGRQGKRTFMAERQYTRMEDWLTAKLAYEGLPSKTYLSKTLAQYTSKTCSNCGFTITSADYDRVLEKLKKTATGWMTTINGKELKVEGQITYYNRYKRQNVVKDLSVELDRLSEESVNNDISSWTKGRSGEALSLLKKRFSHRPVQEKFVCLNCGFETHADEQAALNIARSWLFLRSQEYKKYQTNKTTGNTDKRAFVETWQSFYRKKLKEVWKPAV

SEQ ID NO: 34599 - protein, 978 aa, synthetic construct
  REGION 1..978: note = engineered CasX variant
QEIKRINKIRRRLVKDSNTKKAGKTGPMKTLLVRVMTPDLRERLENLRKKPENIPQPISNTSRANLNKLLTDYTEMKKAILHVYDEEFQKDPVGLMSRVAQPASKKIDQNKLKPEMDEKGNLTTAGFACSQCGQPLFVYKLEQVSEKGKAYTNYFGRCNVAEHEKLILLAQLKPEKDSDEAVTYSLGKFGQRALDFYSIHVTKESTHPVKPLAQIAGNRYASYPVGKALSDACMGTIASFLSKYQDIIIEHQKVVKGNQKRLESLRELAGKENLEYPSVTLPPQPHTKEGVDAYNEVIARVRMWVNLNLWQKLKLSRDDAKPLLRLKGFPSFPLVERQANEVDWWDMVCNVKKLINEKKEDGKVFWQNLAGYKRQEALRPYLSSEEDRKKGKKFARYQLGDLLLHLEKKHGEDWGKVYDEAWERIDKKVEGLSKHIKLEEERRSEDAQSKAALTDWLRAKASFVIEGLKEADKDEFCRCELKLQKWYGDLRGKPFAIEAENSILDISGFSKQYNCAFIWQKDGVKKLNLYLIINYFKGGKLRFKKIKPEAFEANRFYTVINKKSGEIVPMEVNFNFDDPNLIILPLAFGKRQGREFIWNDLLSLETGSLKLANGRVIEKTLYNRRTRQDEPALFVALTFERREVLDSSNIKPMNLIGVDRGENIPAVIALTDPEGCPLSRFKDSLGNPTHILRIGERYKEKQRTIQAKKEVEQRRAGGYSRKYASKAKNLADDMVRNTARDLLYYAVTQDAMLIFENLSRGFGRQGKRTFMAERQYTRMEDWLTAKLAYEGLPSKTYLSKTLAQYTSKTCSNCGFTITSADYDRVLEKLKKTATGWMTTINGKELKVEGQITYYNRYKRQNVVKDLSVELDRLSEESVNNDISSWTKGRSGEALSLLKKRFSHRPVQEKFVCLNCGFETHADEQAALNIARSWLFLRSQEYKKYQTNKTTGNTDKRAFVETWQSFYRKKLKEVWKPAV

SEQ ID NO: 34600 - protein, 978 aa, synthetic construct
  REGION 1..978: note = engineered CasX variant
QEIKRINKIRRRLVKDSNTKKAGKTGPMKTLLVRVMTPDLRERLENLRKKPENIPQPISNTSRANLNKLLTDYTEMKKAILHVYDEEFQKDPVGLMSRVAQPASKKIDQNKLKPEMDEKGNLTTAGFACSQCGQPLFVYKLEQVSEKGKAYTNYFGRCNVAEHEKLILLAQLKPEKDSDEAVTYSLGKFGQRALDFYSIHVTKESTHPVKPLAQIAGNRYASHPVGKALSDACMGTIASFLSKYQDIIIEHQKVVKGNQKRLESLRELAGKENLEYPSVTLPPQPHTKEGVDAYNEVIARVRMWVNLNLWQKLKLSRDDAKPLLRLKGFPSFPLVERQANEVDWWDMVCNVKKLINEKKEDGKVFWQNLAGYKRQEALRPYLSSEEDRKKGKKFARYQLGDLLLHLEKKHGEDWGKVYDEAWERIDKKVEGLSKHIKLEEERRSEDAQSKAALTDWLRAKASFVIEGLKEADKDEFCRCELKLQKWYGDLRGKPFAIEAENSILDISGFSKQYNCAFIWQKDGVKKLNLYLIINYFKGGKLRFKKIKPEAFEANRFYTVINKKSGEIVPMEVNFNFDDPNLIILPLAFGKRQGREFIWNDLLSLETGSLKLANGRVIEKTLYNRRTRQDEPALFVALTFERREVLDSSNIKPMNLIGVDRGENIPAVIALTDPEGCPLSRFKDSLGNPTHILRIGERYKEKQRTIQAKKEVEQRRAGGYSRKYASKAKNLADDMVRNTARDLLYYAVTQDAMLIFENLSRGFGRQGKRTFMAERQYTRMEDWLTAKLAYEGLPSKTYLSKTLAQYTSKTCSNCGFTITSADYDRVLEKLKKTATGWMTTINGKELKVEGQITYYNRYKRQNVVKDLSVELDRLSEESVNNDISSWTKGRSGEALSLLKKRFSHRPVQEKFVCLNCGFETHADEQAALNIARSWLFLRSQEYKKYQTNKTTGNTDKRAFVETWQSFYRKKLKEVWKPAV

SEQ ID NO: 34601 - protein, 978 aa, synthetic construct
  REGION 1..978: note = engineered CasX variant
QEIKRINKIRRRLVKDSNTKKAGKTGPMKTLLVRVMTPDLRERLENLRKKPENIPQPISNTSRANLNKLLTDYTEMKKAILHVYDEEFQKDPVGLMSRVAQPASKKIDQNKLKPEMDEKGNLTTAGFACSQCGQPLFVYKLEQVSEKGKAYTNYFGRCNVAEHEKLILLAQLKPEKDSDEAVTYSLGKFGQRALDFYSIHVTKESTHPVKPLAQIAGNRYASSPVGKALSDACMGTIASFLSKYQDIIIEHQKVVKGNQKRLESLRELAGKENLEYPSVTLPPQPHTKEGVDAYNEVIARVRMWVNLNLWQKLKLSRDDAKPLLRLKGFPSFPLVERQANEVDWWDMVCNVKKLINEKKEDGKVFWQNLAGYKRQEALRPYLSSEEDRKKGKKFARYQLGDLLLHLEKKHGEDWGKVYDEAWERIDKKVEGLSKHIKLEEERRSEDAQSKAALTDWLRAKASFVIEGLKEADKDEFCRCELKLQKWYGDLRGKPFAIEAENSILDISGFSKQYNCAFIWQKDGVKKLNLYLIINYFKGGKLRFKKIKPEAFEANRFYTVINKKSGEIVPMEVNFNFDDPNLIILPLAFGKRQGREFIWNDLLSLETGSLKLANGRVIEKTLYNRRTRQDEPALFVALTFERREVLDSSNIKPMNLIGVDRGENIPAVIALTDPEGCPLSRFKDSLGNPTHILRIGERYKEKQRTIQAKKEVEQRRAGGYSRKYASKAKNLADDMVRNTARDLLYYAVTQDAMLIFENLSRGFGRQGKRTFMAERQYTRMEDWLTAKLAYEGLPSKTYLSKTLAQYTSKTCSNCGFTITSADYDRVLEKLKKTATGWMTTINGKELKVEGQITYYNRYKRQNVVKDLSVELDRLSEESVNNDISSWTKGRSGEALSLLKKRFSHRPVQEKFVCLNCGFETHADEQAALNIARSWLFLRSQEYKKYQTNKTTGNTDKRAFVETWQSFYRKKLKEVWKPAV

SEQ ID NO: 34602 - protein, 978 aa, synthetic construct
  REGION 1..978: note = engineered CasX variant
QEIKRINKIRRRLVKDSNTKKAGKTGPMKTLLVRVMTPDLRERLENLRKKPENIPQPISNTSRANLNKLLTDYTEMKKAILHVYDEEFQKDPVGLMSRVAQPASKKIDQNKLKPEMDEKGNLTTAGFACSQCGQPLFVYKLEQVSEKGKAYTNYFGRCNVAEHEKLILLAQLKPEKDSDEAVTYSLGKFGQRALDFYSIHVTKESTHPVKPLAQIAGNRYASTPVGKALSDACMGTIASFLSKYQDIIIEHQKVVKGNQKRLESLRELAGKENLEYPSVTLPPQPHTKEGVDAYNEVIARVRMWVNLNLWQKLKLSRDDAKPLLRLKGFPSFPLVERQANEVDWWDMVCNVKKLINEKKEDGKVFWQNLAGYKRQEALRPYLSSEEDRKKGKKFARYQLGDLLLHLEKKHGEDWGKVYDEAWERIDKKVEGLSKHIKLEEERRSEDAQSKAALTDWLRAKASFVIEGLKEADKDEFCRCELKLQKWYGDLRGKPFAIEAENSILDISGFSKQYNCAFIWQKDGVKKLNLYLIINYFKGGKLRFKKIKPEAFEANRFYTVINKKSGEIVPMEVNFNFDDPNLIILPLAFGKRQGREFIWNDLLSLETGSLKLANGRVIEKTLYNRRTRQDEPALFVALTFERREVLDSSNIKPMNLIGVDRGENIPAVIALTDPEGCPLSRFKDSLGNPTHILRIGERYKEKQRTIQAKKEVEQRRAGGYSRKYASKAKNLADDMVRNTARDLLYYAVTQDAMLIFENLSRGFGRQGKRTFMAERQYTRMEDWLTAKLAYEGLPSKTYLSKTLAQYTSKTCSNCGFTITSADYDRVLEKLKKTATGWMTTINGKELKVEGQITYYNRYKRQNVVKDLSVELDRLSEESVNNDISSWTKGRSGEALSLLKKRFSHRPVQEKFVCLNCGFETHADEQAALNIARSWLFLRSQEYKKYQTNKTTGNTDKRAFVETWQSFYRKKLKEVWKPAV

SEQ ID NO: 34603 - protein, 978 aa, synthetic construct
  REGION 1..978: note = engineered CasX variant
QEIKRINKIRRRLVKDSNTKKAGKTGPMKTLLVRVMTPDLRERLENLRKKPENIPQPISNTSRANLNKLLTDYTEMKKAILHVYDEEFQKDPVGLMSRVAQPASKKIDQNKLKPEMDEKGNLTTAGFACSQCGQPLFVYKLEQVSEKGKAYTNYFGRCNVAEHEKLILLAQLKPEKDSDEAVTYSLGKFGQRALDFYSIHVTKESTHPVKPLAQIAGNRYASAPVGKALSDACMGTIASFLSKYQDIIIEHQKVVKGNQKRLESLRELAGKENLEYPSVTLPPQPHTKEGVDAYNEVIARVRMWVNLNLWQKLKLSRDDAKPLLRLKGFPSFPLVERQANEVDWWDMVCNVKKLINEKKEDGKVFWQNLAGYKRQEALRPYLSSEEDRKKGKKFARYQLGDLLLHLEKKHGEDWGKVYDEAWERIDKKVEGLSKHIKLEEERRSEDAQSKAALTDWLRAKASFVIEGLKEADKDEFCRCELKLQKWYGDLRGKPFAIEAENSILDISGFSKQYNCAFIWQKDGVKKLNLYLIINYFKGGKLRFKKIKPEAFEANRFYTVINKKSGEIVPMEVNFNFDDPNLIILPLAFGKRQGREFIWNDLLSLETGSLKLANGRVIEKTLYNRRTRQDEPALFVALTFERREVLDSSNIKPMNLIGVDRGENIPAVIALTDPEGCPLSRFKDSLGNPTHILRIGERYKEKQRTIQAKKEVEQRRAGGYSRKYASKAKNLADDMVRNTARDLLYYAVTQDAMLIFENLSRGFGRQGKRTFMAERQYTRMEDWLTAKLAYEGLPSKTYLSKTLAQYTSKTCSNCGFTITSADYDRVLEKLKKTATGWMTTINGKELKVEGQITYYNRYKRQNVVKDLSVELDRLSEESVNNDISSWTKGRSGEALSLLKKRFSHRPVQEKFVCLNCGFETHADEQAALNIARSWLFLRSQEYKKYQTNKTTGNTDKRAFVETWQSFYRKKLKEVWKPAV

SEQ ID NO: 34604 - protein, 978 aa, synthetic construct
  REGION 1..978: note = engineered CasX variant
QEIKRINKIRRRLVKDSNTKKAGKTGPMKTLLVRVMTPDLRERLENLRKKPENIPQPISNTSRANLNKLLTDYTEMKKAILHVYDEEFQKDPVGLMSRVAQPASKKIDQNKLKPEMDEKGNLTTAGFACSQCGQPLFVYKLEQVSEKGKAYTNYFGRCNVAEHEKLILLAQLKPEKDSDEAVTYSLGKFGQRALDFYSIHVTKESTHPVKPLAQIAGNRYASVPVGKALSDACMGTIASFLSKYQDIIIEHQKVVKGNQKRLESLRELAGKENLEYPSVTLPPQPHTKEGVDAYNEVIARVRMWVNLNLWQKLKLSRDDAKPLLRLKGFPSFPLVERQANEVDWWDMVCNVKKLINEKKEDGKVFWQNLAGYKRQEALRPYLSSEEDRKKGKKFARYQLGDLLLHLEKKHGEDWGKVYDEAWERIDKKVEGLSKHIKLEEERRSEDAQSKAALTDWLRAKASFVIEGLKEADKDEFCRCELKLQKWYGDLRGKPFAIEAENSILDISGFSKQYNCAFIWQKDGVKKLNLYLIINYFKGGKLRFKKIKPEAFEANRFYTVINKKSGEIVPMEVNFNFDDPNLIILPLAFGKRQGREFIWNDLLSLETGSLKLANGRVIEKTLYNRRTRQDEPALFVALTFERREVLDSSNIKPMNLIGVDRGENIPAVIALTDPEGCPLSRFKDSLGNPTHILRIGERYKEKQRTIQAKKEVEQRRAGGYSRKYASKAKNLADDMVRNTARDLLYYAVTQDAMLIFENLSRGFGRQGKRTFMAERQYTRMEDWLTAKLAYEGLPSKTYLSKTLAQYTSKTCSNCGFTITSADYDRVLEKLKKTATGWMTTINGKELKVEGQITYYNRYKRQNVVKDLSVELDRLSEESVNNDISSWTKGRSGEALSLLKKRFSHRPVQEKFVCLNCGFETHADEQAALNIARSWLFLRSQEYKKYQTNKTTGNTDKRAFVETWQSFYRKKLKEVWKPAV

SEQ ID NO: 34605 - protein, 978 aa, synthetic construct
  REGION 1..978: note = engineered CasX variant
QEIKRINKIRRRLVKDSNTKKAGKTGPMKTLLVRVMTPDLRERLENLRKKPENIPQPISNTSRANLNKLLTDYTEMKKAILHVYDEEFQKDPVGLMSRVAQPASKKIDQNKLKPEMDEKGNLTTAGFACSQCGQPLFVYKLEQVSEKGKAYTNYFGRCNVAEHEKLIKLAQLKPEKDSDEAVTYSLGKFGQRALDFYSIHVTKESTHPVKPLAQIAGNRYASGPVGKALSDACMGTIASFLSKYQDIIIEHQKVVKGNQKRLESLRELAGKENLEYPSVTLPPQPHTKEGVDAYNEVIARVRMWVNLNLWQKLKLSRDDAKPLLRLKGFPSFPLVERQANEVDWWDMVCNVKKLINEKKEDGKVFWQNLAGYKRQEALRPYLSSEEDRKKGKKFARYQLGDLLLHLEKKHGEDWGKVYDEAWERIDKKVEGLSKHIKLEEERRSEDAQSKAALTDWLRAKASFVIEGLKEADKDEFCRCELKLQKWYGDLRGKPFAIEAENSILDISGFSKQYNCAFIWQKDGVKKLNLYLIINYFKGGKLRFKKIKPEAFEANRFYTVINKKSGEIVPMEVNFNFDDPNLIILPLAFGKRQGREFIWNDLLSLETGSLKLANGRVIEKTLYNRRTRQDEPALFVALTFERREVLDSSNIKPMNLIGVDRGENIPAVIALTDPEGCPLSRFKDSLGNPTHILRIGERYKEKQRTIQAKKEVEQRRAGGYSRKYASKAKNLADDMVRNTARDLLYYAVTQDAMLIFENLSRGFGRQGKRTFMAERQYTRMEDWLTAKLAYEGLPSKTYLSKTLAQYTSKTCSNCGFTITSADYDRVLEKLKKTATGWMTTINGKELKVEGQITYYNRYKRQNVVKDLSVELDRLSEESVNNDISSWTKGRSGEALSLLKKRFSHRPVQEKFVCLNCGFETHADEQAALNIARSWLFLRSQEYKKYQTNKTTGNTDKRAFVETWQSFYRKKLKEVWKPAV

SEQ ID NO: 34606 - protein, 977 aa, synthetic construct
  REGION 1..977: note = engineered CasX variant
QEIKRINKIRRRLVKDSNTKKAGKTGPMKTLLVRVMTPDLRERLENLRKKPENIPQPISNTSRANLNKLLTDYTEMKKAILHVYDEEFQKDPVGLMSRVAQPASKKIDQNKLKPEMDEKGNLTTAGFACSQCGQPLFVYKLEQVSEKGKAYTNYFGRCNVAEHEKLILLAQLKPEKDSDEAVTYSLGKFGQRALDFYSIHVTKESTHPVKPLAQIAGNRYASPVGKALSDACMGTIASFLSKYQDIIIEHQKVVKGNQKRLESLRELAGKENLEYPSVTLPPQPHTKEGVDAYNEVIARVRMWVNLNLWQKLKLSRDDAKPLLRLKGFPSFPLVERQANEVDWWDMVCNVKKLINEKKEDGKVFWQNLAGYKRQEALRPYLSSEEDRKKGKKFARYQLGDLLLHLEKKHGEDWGKVYDEAWERIDKKVEGLSKHIKLEEERRSEDAQSKAALTDWLRAKASFVIEGLKEADKDEFCRCELKLQKWYGDLRGKPFAIEAENSILDISGFSKQYNCAFIWQKDGVKKLNLYLIINYFKGGKLRFKKIKPEAFEANRFYTVINKKSGEIVPMEVNFNFDDPNLIILPLAFGKRQGREFIWNDLLSLETGSLKLANGRVIEKTLYNRRTRQDEPALFVALTFERREVLDSSNIKPMNLIGVDRGENIPAVIALTDPEGCPLSRFKDSLGNPTHILRIGERYKEKQRTIQAKKEVEQRRAGGYSRKYASKAKNLADDMVRNTARDLLYYAVTQDAMLIFENLSRGFGRQGKRTFMAERQYTRMEDWLTAKLAYEGLPSKTYLSKTLAQYTSKTCSNCGFTITSADYDRVLEKLKKTATGWMTTINGKELKVEGQITYYNRYKRQNVVKDLSVELDRLSEESVNNDISSWTKGRSGEALSLLKKRFSHRPVQEKFVCLNCGFETHADEQAALNIARSWLFLRSQEYKKYQTNKTTGNTDKRAFVETWQSFYRKKLKEVWKPAV

SEQ ID NO: 34607 - protein, 978 aa, synthetic construct
  REGION 1..978: note = engineered CasX variant
QEIKRINKIRRRLVKDSNTKKAGKTGPMKTLLVRVMTPDLRERLENLRKKPENIPQPISNTSRANLNKLLTDYTEMKKAILHVYDEEFQKDPVGLMSRVAQPASKKIDQNKLKPEMDEKGNLTTAGFACSQCGQPLFVYKLEQVSEKGKAYTNYFGRCNVAEHEKLILLAQLKPEKDSDEAVTYSLGKFGQRALDFYSIHVTKESTHPVKPLAQIAGNRYASYPVGKALSDACMGTIASFLSKYQDIIIEHQKVVKGNQKRLESLRELAGKENLEYPSVTLPPQPHTKEGVDAYNEVIARVRMWVNLNLWQKLKLSRDDAKPLLRLKGFPSFPLVERQANEVDWWDMVCNVKKLINEKKEDGKVFWQNLAGYKRQEALRPYLSSEEDRKKGKKFARYQLGDLLLHLEKKHGEDWGKVYDEAWERIDKKVEGLSKHIKLEEERRSEDAQSKAALTDWLRAKASFVIEGLKEADKDEFCRCELKLQKWYGDLRGKPFAIEAENSILDISGFSKQYNCAFIWQKDGVKKLNLYLIINYFKGGKLRFKKIKPEAFEANRFYTVINKKSGEIVPMEVNFNFDDPNLIILPLAFGKRQGREFIWNDLLSLETGSLQLANGRVIEKTLYNRRTRQDEPALFVALTFERREVLDSSNIKPMNLIGVDRGENIPAVIALTDPEGCPLSRFKDSLGNPTHILRIGESYKEKQRTIQAKKEVEQRRAGGYSRKYASKAKNLADDMVRNTARDLLYYAVTQDAMLIFENLSRGFGRQGKRTFMAERQYTRMEDWLTAKLAYEGLPSKTYLSKTLAQYTSKTCSNCGFTITSADYDRVLEKLKKTATGWMTTINGKELKVEGQITYYNRYKRQNVVKDLSVELDRLSEESVNNDISSWTKGRSGEALSLLKKRFSHRPVQEKFVCLNCGFETHADEQAALNIARSWLFLRSQEYKKYQTNKTTGNTDKRAFVETWQSFYRKKLKEVWKPAV

SEQ ID NO: 34608 - protein, 978 aa, synthetic construct
  REGION 1..978: note = engineered CasX variant
QEIKRINKIRRRLVKDSNTKKAGKTGPMKTLLVRVMTPDLRERLENLRKKPENIPQPISNTSRANLNKLLTDYTEMKKAILHVYDEEFQKDPVGLMSRVAQPASKKIDQNKLKPEMDEKGNLTTAGFACSQCGQPLFVYKLEQVSEKGKAYTNYFGRCNVAEHEKLILLAQLKPEKDSDEAVTYSLGKFGQRALDFYSIHVTKESTHPVKPLAQIAGNRYASHPVGKALSDACMGTIASFLSKYQDIIIEHQKVVKGNQKRLESLRELAGKENLEYPSVTLPPQPHTKEGVDAYNEVIARVRMWVNLNLWQKLKLSRDDAKPLLRLKGFPSFPLVERQANEVDWWDMVCNVKKLINEKKEDGKVFWQNLAGYKRQEALRPYLSSEEDRKKGKKFARYQLGDLLLHLEKKHGEDWGKVYDEAWERIDKKVEGLSKHIKLEEERRSEDAQSKAALTDWLRAKASFVIEGLKEADKDEFCRCELKLQKWYGDLRGKPFAIEAENSILDISGFSKQYNCAFIWQKDGVKKLNLYLIINYFKGGKLRFKKIKPEAFEANRFYTVINKKSGEIVPMEVNFNFDDPNLIILPLAFGKRQGREFIWNDLLSLETGSLQLANGRVIEKTLYNRRTRQDEPALFVALTFERREVLDSSNIKPMNLIGVDRGENIPAVIALTDPEGCPLSRFKDSLGNPTHILRIGESYKEKQRTIQAKKEVEQRRAGGYSRKYASKAKNLADDMVRNTARDLLYYAVTQDAMLIFENLSRGFGRQGKRTFMAERQYTRMEDWLTAKLAYEGLPSKTYLSKTLAQYTSKTCSNCGFTITSADYDRVLEKLKKTATGWMTTINGKELKVEGQITYYNRYKRQNVVKDLSVELDRLSEESVNNDISSWTKGRSGEALSLLKKRFSHRPVQEKFVCLNCGFETHADEQAALNIARSWLFLRSQEYKKYQTNKTTGNTDKRAFVETWQSFYRKKLKEVWKPAV

SEQ ID NO: 34609 - protein, 978 aa, synthetic construct
  REGION 1..978: note = engineered CasX variant
QEIKRINKIRRRLVKDSNTKKAGKTGPMKTLLVRVMTPDLRERLENLRKKPENIPQPISNTSRANLNKLLTDYTEMKKAILHVYDEEFQKDPVGLMSRVAQPASKKIDQNKLKPEMDEKGNLTTAGFACSQCGQPLFVYKLEQVSEKGKAYTNYFGRCNVAEHEKLILLAQLKPEKDSDEAVTYSLGKFGQRALDFYSIHVTKESTHPVKPLAQIAGNRYASSPVGKALSDACMGTIASFLSKYQDIIIEHQKVVKGNQKRLESLRELAGKENLEYPSVTLPPQPHTKEGVDAYNEVIARVRMWVNLNLWQKLKLSRDDAKPLLRLKGFPSFPLVERQANEVDWWDMVCNVKKLINEKKEDGKVFWQNLAGYKRQEALRPYLSSEEDRKKGKKFARYQLGDLLLHLEKKHGEDWGKVYDEAWERIDKKVEGLSKHIKLEEERRSEDAQSKAALTDWLRAKASFVIEGLKEADKDEFCRCELKLQKWYGDLRGKPFAIEAENSILDISGFSKQYNCAFIWQKDGVKKLNLYLIINYFKGGKLRFKKIKPEAFEANRFYTVINKKSGEIVPMEVNFNFDDPNLIILPLAFGKRQGREFIWNDLLSLETGSLQLANGRVIEKTLYNRRTRQDEPALFVALTFERREVLDSSNIKPMNLIGVDRGENIPAVIALTDPEGCPLSRFKDSLGNPTHILRIGESYKEKQRTIQAKKEVEQRRAGGYSRKYASKAKNLADDMVRNTARDLLYYAVTQDAMLIFENLSRGFGRQGKRTFMAERQYTRMEDWLTAKLAYEGLPSKTYLSKTLAQYTSKTCSNCGFTITSADYDRVLEKLKKTATGWMTTINGKELKVEGQITYYNRYKRQNVVKDLSVELDRLSEESVNNDISSWTKGRSGEALSLLKKRFSHRPVQEKFVCLNCGFETHADEQAALNIARSWLFLRSQEYKKYQTNKTTGNTDKRAFVETWQSFYRKKLKEVWKPAV

SEQ ID NO: 34610 - protein, 978 aa, synthetic construct
  REGION 1..978: note = engineered CasX variant
QEIKRINKIRRRLVKDSNTKKAGKTGPMKTLLVRVMTPDLRERLENLRKKPENIPQPISNTSRANLNKLLTDYTEMKKAILHVYDEEFQKDPVGLMSRVAQPASKKIDQNKLKPEMDEKGNLTTAGFACSQCGQPLFVYKLEQVSEKGKAYTNYFGRCNVAEHEKLILLAQLKPEKDSDEAVTYSLGKFGQRALDFYSIHVTKESTHPVKPLAQIAGNRYASTPVGKALSDACMGTIASFLSKYQDIIIEHQKVVKGNQKRLESLRELAGKENLEYPSVTLPPQPHTKEGVDAYNEVIARVRMWVNLNLWQKLKLSRDDAKPLLRLKGFPSFPLVERQANEVDWWDMVCNVKKLINEKKEDGKVFWQNLAGYKRQEALRPYLSSEEDRKKGKKFARYQLGDLLLHLEKKHGEDWGKVYDEAWERIDKKVEGLSKHIKLEEERRSEDAQSKAALTDWLRAKASFVIEGLKEADKDEFCRCELKLQKWYGDLRGKPFAIEAENSILDISGFSKQYNCAFIWQKDGVKKLNLYLIINYFKGGKLRFKKIKPEAFEANRFYTVINKKSGEIVPMEVNFNFDDPNLIILPLAFGKRQGREFIWNDLLSLETGSLQLANGRVIEKTLYNRRTRQDEPALFVALTFERREVLDSSNIKPMNLIGVDRGENIPAVIALTDPEGCPLSRFKDSLGNPTHILRIGESYKEKQRTIQAKKEVEQRRAGGYSRKYASKAKNLADDMVRNTARDLLYYAVTQDAMLIFENLSRGFGRQGKRTFMAERQYTRMEDWLTAKLAYEGLPSKTYLSKTLAQYTSKTCSNCGFTITSADYDRVLEKLKKTATGWMTTINGKELKVEGQITYYNRYKRQNVVKDLSVELDRLSEESVNNDISSWTKGRSGEALSLLKKRFSHRPVQEKFVCLNCGFETHADEQAALNIARSWLFLRSQEYKKYQTNKTTGNTDKRAFVETWQSFYRKKLKEVWKPAV

SEQ ID NO: 34611 - protein, 978 aa, synthetic construct
  REGION 1..978: note = engineered CasX variant
QEIKRINKIRRRLVKDSNTKKAGKTGPMKTLLVRVMTPDLRERLENLRKKPENIPQPISNTSRANLNKLLTDYTEMKKAILHVYDEEFQKDPVGLMSRVAQPASKKIDQNKLKPEMDEKGNLTTAGFACSQCGQPLFVYKLEQVSEKGKAYTNYFGRCNVAEHEKLILLAQLKPEKDSDEAVTYSLGKFGQRALDFYSIHVTKESTHPVKPLAQIAGNRYASAPVGKALSDACMGTIASFLSKYQDIIIEHQKVVKGNQKRLESLRELAGKENLEYPSVTLPPQPHTKEGVDAYNEVIARVRMWVNLNLWQKLKLSRDDAKPLLRLKGFPSFPLVERQANEVDWWDMVCNVKKLINEKKEDGKVFWQNLAGYKRQEALRPYLSSEEDRKKGKKFARYQLGDLLLHLEKKHGEDWGKVYDEAWERIDKKVEGLSKHIKLEEERRSEDAQSKAALTDWLRAKASFVIEGLKEADKDEFCRCELKLQKWYGDLRGKPFAIEAENSILDISGFSKQYNCAFIWQKDGVKKLNLYLIINYFKGGKLRFKKIKPEAFEANRFYTVINKKSGEIVPMEVNFNFDDPNLIILPLAFGKRQGREFIWNDLLSLETGSLQLANGRVIEKTLYNRRTRQDEPALFVALTFERREVLDSSNIKPMNLIGVDRGENIPAVIALTDPEGCPLSRFKDSLGNPTHILRIGESYKEKQRTIQAKKEVEQRRAGGYSRKYASKAKNLADDMVRNTARDLLYYAVTQDAMLIFENLSRGFGRQGKRTFMAERQYTRMEDWLTAKLAYEGLPSKTYLSKTLAQYTSKTCSNCGFTITSADYDRVLEKLKKTATGWMTTINGKELKVEGQITYYNRYKRQNVVKDLSVELDRLSEESVNNDISSWTKGRSGEALSLLKKRFSHRPVQEKFVCLNCGFETHADEQAALNIARSWLFLRSQEYKKYQTNKTTGNTDKRAFVETWQSFYRKKLKEVWKPAV

SEQ ID NO: 34612 - protein, 978 aa, synthetic construct
  REGION 1..978: note = engineered CasX variant
QEIKRINKIRRRLVKDSNTKKAGKTGPMKTLLVRVMTPDLRERLENLRKKPENIPQPISNTSRANLNKLLTDYTEMKKAILHVYDEEFQKDPVGLMSRVAQPASKKIDQNKLKPEMDEKGNLTTAGFACSQCGQPLFVYKLEQVSEKGKAYTNYFGRCNVAEHEKLILLAQLKPEKDSDEAVTYSLGKFGQRALDFYSIHVTKESTHPVKPLAQIAGNRYASVPVGKALSDACMGTIASFLSKYQDIIIEHQKVVKGNQKRLESLRELAGKENLEYPSVTLPPQPHTKEGVDAYNEVIARVRMWVNLNLWQKLKLSRDDAKPLLRLKGFPSFPLVERQANEVDWWDMVCNVKKLINEKKEDGKVFWQNLAGYKRQEALRPYLSSEEDRKKGKKFARYQLGDLLLHLEKKHGEDWGKVYDEAWERIDKKVEGLSKHIKLEEERRSEDAQSKAALTDWLRAKASFVIEGLKEADKDEFCRCELKLQKWYGDLRGKPFAIEAENSILDISGFSKQYNCAFIWQKDGVKKLNLYLIINYFKGGKLRFKKIKPEAFEANRFYTVINKKSGEIVPMEVNFNFDDPNLIILPLAFGKRQGREFIWNDLLSLETGSLQLANGRVIEKTLYNRRTRQDEPALFVALTFERREVLDSSNIKPMNLIGVDRGENIPAVIALTDPEGCPLSRFKDSLGNPTHILRIGESYKEKQRTIQAKKEVEQRRAGGYSRKYASKAKNLADDMVRNTARDLLYYAVTQDAMLIFENLSRGFGRQGKRTFMAERQYTRMEDWLTAKLAYEGLPSKTYLSKTLAQYTSKTCSNCGFTITSADYDRVLEKLKKTATGWMTTINGKELKVEGQITYYNRYKRQNVVKDLSVELDRLSEESVNNDISSWTKGRSGEALSLLKKRFSHRPVQEKFVCLNCGFETHADEQAALNIARSWLFLRSQEYKKYQTNKTTGNTDKRAFVETWQSFYRKKLKEVWKPAV

SEQ ID NO: 34613 - protein, 978 aa, synthetic construct
  REGION 1..978: note = engineered CasX variant
QEIKRINKIRRRLVKDSNTKKAGKTGPMKTLLVRVMTPDLRERLENLRKKPENIPQPISNTSRANLNKLLTDYTEMKKAILHVYDEEFQKDPVGLMSRVAQPASKKIDQNKLKPEMDEKGNLTTAGFACSQCGQPLFVYKLEQVSEKGKAYTNYFGRCNVAEHEKLIKLAQLKPEKDSDEAVTYSLGKFGQRALDFYSIHVTKESTHPVKPLAQIAGNRYASGPVGKALSDACMGTIASFLSKYQDIIIEHQKVVKGNQKRLESLRELAGKENLEYPSVTLPPQPHTKEGVDAYNEVIARVRMWVNLNLWQKLKLSRDDAKPLLRLKGFPSFPLVERQANEVDWWDMVCNVKKLINEKKEDGKVFWQNLAGYKRQEALRPYLSSEEDRKKGKKFARYQLGDLLLHLEKKHGEDWGKVYDEAWERIDKKVEGLSKHIKLEEERRSEDAQSKAALTDWLRAKASFVIEGLKEADKDEFCRCELKLQKWYGDLRGKPFAIEAENSILDISGFSKQYNCAFIWQKDGVKKLNLYLIINYFKGGKLRFKKIKPEAFEANRFYTVINKKSGEIVPMEVNFNFDDPNLIILPLAFGKRQGREFIWNDLLSLETGSLQLANGRVIEKTLYNRRTRQDEPALFVALTFERREVLDSSNIKPMNLIGVDRGENIPAVIALTDPEGCPLSRFKDSLGNPTHILRIGESYKEKQRTIQAKKEVEQRRAGGYSRKYASKAKNLADDMVRNTARDLLYYAVTQDAMLIFENLSRGFGRQGKRTFMAERQYTRMEDWLTAKLAYEGLPSKTYLSKTLAQYTSKTCSNCGFTITSADYDRVLEKLKKTATGWMTTINGKELKVEGQITYYNRYKRQNVVKDLSVELDRLSEESVNNDISSWTKGRSGEALSLLKKRFSHRPVQEKFVCLNCGFETHADEQAALNIARSWLFLRSQEYKKYQTNKTTGNTDKRAFVETWQSFYRKKLKEVWKPAV

SEQ ID NO: 34614 - protein, 977 aa, synthetic construct
  REGION 1..977: note = engineered CasX variant
QEIKRINKIRRRLVKDSNTKKAGKTGPMKTLLVRVMTPDLRERLENLRKKPENIPQPISNTSRANLNKLLTDYTEMKKAILHVYDEEFQKDPVGLMSRVAQPASKKIDQNKLKPEMDEKGNLTTAGFACSQCGQPLFVYKLEQVSEKGKAYTNYFGRCNVAEHEKLILLAQLKPEKDSDEAVTYSLGKFGQRALDFYSIHVTKESTHPVKPLAQIAGNRYASPVGKALSDACMGTIASFLSKYQDIIIEHQKVVKGNQKRLESLRELAGKENLEYPSVTLPPQPHTKEGVDAYNEVIARVRMWVNLNLWQKLKLSRDDAKPLLRLKGFPSFPLVERQANEVDWWDMVCNVKKLINEKKEDGKVFWQNLAGYKRQEALRPYLSSEEDRKKGKKFARYQLGDLLLHLEKKHGEDWGKVYDEAWERIDKKVEGLSKHIKLEEERRSEDAQSKAALTDWLRAKASFVIEGLKEADKDEFCRCELKLQKWYGDLRGKPFAIEAENSILDISGFSKQYNCAFIWQKDGVKKLNLYLIINYFKGGKLRFKKIKPEAFEANRFYTVINKKSGEIVPMEVNFNFDDPNLIILPLAFGKRQGREFIWNDLLSLETGSLQLANGRVIEKTLYNRRTRQDEPALFVALTFERREVLDSSNIKPMNLIGVDRGENIPAVIALTDPEGCPLSRFKDSLGNPTHILRIGESYKEKQRTIQAKKEVEQRRAGGYSRKYASKAKNLADDMVRNTARDLLYYAVTQDAMLIFENLSRGFGRQGKRTFMAERQYTRMEDWLTAKLAYEGLPSKTYLSKTLAQYTSKTCSNCGFTITSADYDRVLEKLKKTATGWMTTINGKELKVEGQITYYNRYKRQNVVKDLSVELDRLSEESVNNDISSWTKGRSGEALSLLKKRFSHRPVQEKFVCLNCGFETHADEQAALNIARSWLFLRSQEYKKYQTNKTTGNTDKRAFVETWQSFYRKKLKEVWKPAV

SEQ ID NO: 34615 - protein, 978 aa, synthetic construct
  REGION 1..978: note = engineered CasX variant
QEIKRINKIRRRLVKDSNTKKAGKTGPMKTLLVRVMTPDLRERLENLRKKPENIPQPISNTSRANLNKLLTDYTEMKKAILHVYWEEFQKDPVGLMSRVAQPASKKIDQNKLKPEMDEKGNLTTAGFACSQCGQPLFVYKLEQVSEKGKAYTNYFGRCNVAEHEKLIKLYQLKPEKDSDEAVTYSLGKFGQRALDFYSIHVTKESTHPVKPLAQIAGNRYASYPVGKALSDACMGTIASFLSKYQDIIIEHQKVVKGNQKRLESLRELAGKENLEYPSVTLPPQPHTKEGVDAYNEVIARVRMWVNLNLWQKLKLSRDDAKPLLRLKGFPSFPLVERQANEVDWWDMVCNVKKLINEKKEDGKVFWQNLAGYKRQEALRPYLSSEEDRKKGKKFARYQLGDLLLHLEKKHGEDWGKVYDEAWERIDKKVEGLSKHIKLEEERRSEDAQSKAALTDWLRAKASFVIEGLKEADKDEFCRCELKLQKWYGDLRGKPFAIEAENSILDISGFSKQYNCAFIWQKDGVKKLNLYLIINYFKGGKLRFKKIKPEAFEANRFYTVINKKSGEIVPMEVNFNFDDPNLIILPLAFGKRQGREFIWNDLLSLETGSLKLANGRVIEKTLYNRRTRQDEPALFVALTFERREVLDSSNIKPMNLIGVDRGENIPAVIALTDPEGCPLSRFKDSLGNPTHILRIGESYKEKQRTIQAKKEVEQRRAGGYSRKYASKAKNLADDMVRNTARDLLYYAVTQDAMLIFENLSRGFGRQGKRTFMAERQYTRMEDWLTAKLAYEGLPSKTYLSKTLAQYTSKTCSNCGFTITSADYDRVLEKLKKTATGWMTTINGKELKVEGQITYYNRYKRQNVVKDLSVELDRLSEESVNNDISSWTKGRSGEALSLLKKRFSHRPVQEKFVCLNCGFETHADEQAALNIARSWLFLRSQEYKKYQTNKTTGNTDKRAFVETWQSFYRKKLKEVWKPAV

SEQ ID NO: 34616 - protein, 978 aa, synthetic construct
  REGION 1..978: note = engineered CasX variant
QEIKRINKIRRRLVKDSNTKKAGKTGPMKTLLVRVMTPDLRERLENLRKKPENIPQPISNTSRANLNKLLTDYTEMKKAILHVYWEEFQKDPVGLMSRVAQPASKKIDQNKLKPEMDEKGNLTTAGFACSQCGQPLFVYKLEQVSEKGKAYTNYFGRCNVAEHEKLIKLYQLKPEKDSDEAVTYSLGKFGQRALDFYSIHVTKESTHPVKPLAQIAGNRYASHPVGKALSDACMGTIASFLSKYQDIIIEHQKVVKGNQKRLESLRELAGKENLEYPSVTLPPQPHTKEGVDAYNEVIARVRMWVNLNLWQKLKLSRDDAKPLLRLKGFPSFPLVERQANEVDWWDMVCNVKKLINEKKEDGKVFWQNLAGYKRQEALRPYLSSEEDRKKGKKFARYQLGDLLLHLEKKHGEDWGKVYDEAWERIDKKVEGLSKHIKLEEERRSEDAQSKAALTDWLRAKASFVIEGLKEADKDEFCRCELKLQKWYGDLRGKPFAIEAENSILDISGFSKQYNCAFIWQKDGVKKLNLYLIINYFKGGKLRFKKIKPEAFEANRFYTVINKKSGEIVPMEVNFNFDDPNLIILPLAFGKRQGREFIWNDLLSLETGSLKLANGRVIEKTLYNRRTRQDEPALFVALTFERREVLDSSNIKPMNLIGVDRGENIPAVIALTDPEGCPLSRFKDSLGNPTHILRIGESYKEKQRTIQAKKEVEQRRAGGYSRKYASKAKNLADDMVRNTARDLLYYAVTQDAMLIFENLSRGFGRQGKRTFMAERQYTRMEDWLTAKLAYEGLPSKTYLSKTLAQYTSKTCSNCGFTITSADYDRVLEKLKKTATGWMTTINGKELKVEGQITYYNRYKRQNVVKDLSVELDRLSEESVNNDISSWTKGRSGEALSLLKKRFSHRPVQEKFVCLNCGFETHADEQAALNIARSWLFLRSQEYKKYQTNKTTGNTDKRAFVETWQSFYRKKLKEVWKPAV

SEQ ID NO: 34617 - protein, 978 aa, synthetic construct
  REGION 1..978: note = engineered CasX variant
QEIKRINKIRRRLVKDSNTKKAGKTGPMKTLLVRVMTPDLRERLENLRKKPENIPQPISNTSRANLNKLLTDYTEMKKAILHVYWEEFQKDPVGLMSRVAQPASKKIDQNKLKPEMDEKGNLTTAGFACSQCGQPLFVYKLEQVSEKGKAYTNYFGRCNVAEHEKLIKLYQLKPEKDSDEAVTYSLGKFGQRALDFYSIHVTKESTHPVKPLAQIAGNRYASTPVGKALSDACMGTIASFLSKYQDIIIEHQKVVKGNQKRLESLRELAGKENLEYPSVTLPPQPHTKEGVDAYNEVIARVRMWVNLNLWQKLKLSRDDAKPLLRLKGFPSFPLVERQANEVDWWDMVCNVKKLINEKKEDGKVFWQNLAGYKRQEALRPYLSSEEDRKKGKKFARYQLGDLLLHLEKKHGEDWGKVYDEAWERIDKKVEGLSKHIKLEEERRSEDAQSKAALTDWLRAKASFVIEGLKEADKDEFCRCELKLQKWYGDLRGKPFAIEAENSILDISGFSKQYNCAFIWQKDGVKKLNLYLIINYFKGGKLRFKKIKPEAFEANRFYTVINKKSGEIVPMEVNFNFDDPNLIILPLAFGKRQGREFIWNDLLSLETGSLKLANGRVIEKTLYNRRTRQDEPALFVALTFERREVLDSSNIKPMNLIGVDRGENIPAVIALTDPEGCPLSRFKDSLGNPTHILRIGESYKEKQRTIQAKKEVEQRRAGGYSRKYASKAKNLADDMVRNTARDLLYYAVTQDAMLIFENLSRGFGRQGKRTFMAERQYTRMEDWLTAKLAYEGLPSKTYLSKTLAQYTSKTCSNCGFTITSADYDRVLEKLKKTATGWMTTINGKELKVEGQITYYNRYKRQNVVKDLSVELDRLSEESVNNDISSWTKGRSGEALSLLKKRFSHRPVQEKFVCLNCGFETHADEQAALNIARSWLFLRSQEYKKYQTNKTTGNTDKRAFVETWQSFYRKKLKEVWKPAV

SEQ ID NO: 34618 - protein, 978 aa, synthetic construct
  REGION 1..978: note = engineered CasX variant
QEIKRINKIRRRLVKDSNTKKAGKTGPMKTLLVRVMTPDLRERLENLRKKPENIPQPISNTSRANLNKLLTDYTEMKKAILHVYWEEFQKDPVGLMSRVAQPASKKIDQNKLKPEMDEKGNLTTAGFACSQCGQPLFVYKLEQVSEKGKAYTNYFGRCNVAEHEKLIKLYQLKPEKDSDEAVTYSLGKFGQRALDFYSIHVTKESTHPVKPLAQIAGNRYASAPVGKALSDACMGTIASFLSKYQDIIIEHQKVVKGNQKRLESLRELAGKENLEYPSVTLPPQPHTKEGVDAYNEVIARVRMWVNLNLWQKLKLSRDDAKPLLRLKGFPSFPLVERQANEVDWWDMVCNVKKLINEKKEDGKVFWQNLAGYKRQEALRPYLSSEEDRKKGKKFARYQLGDLLLHLEKKHGEDWGKVYDEAWERIDKKVEGLSKHIKLEEERRSEDAQSKAALTDWLRAKASFVIEGLKEADKDEFCRCELKLQKWYGDLRGKPFAIEAENSILDISGFSKQYNCAFIWQKDGVKKLNLYLIINYFKGGKLRFKKIKPEAFEANRFYTVINKKSGEIVPMEVNFNFDDPNLIILPLAFGKRQGREFIWNDLLSLETGSLKLANGRVIEKTLYNRRTRQDEPALFVALTFERREVLDSSNIKPMNLIGVDRGENIPAVIALTDPEGCPLSRFKDSLGNPTHILRIGESYKEKQRTIQAKKEVEQRRAGGYSRKYASKAKNLADDMVRNTARDLLYYAVTQDAMLIFENLSRGFGRQGKRTFMAERQYTRMEDWLTAKLAYEGLPSKTYLSKTLAQYTSKTCSNCGFTITSADYDRVLEKLKKTATGWMTTINGKELKVEGQITYYNRYKRQNVVKDLSVELDRLSEESVNNDISSWTKGRSGEALSLLKKRFSHRPVQEKFVCLNCGFETHADEQAALNIARSWLFLRSQEYKKYQTNKTTGNTDKRAFVETWQSFYRKKLKEVWKPAV

SEQ ID NO: 34619 - protein, 978 aa, synthetic construct
  REGION 1..978: note = engineered CasX variant
QEIKRINKIRRRLVKDSNTKKAGKTGPMKTLLVRVMTPDLRERLENLRKKPENIPQPISNTSRANLNKLLTDYTEMKKAILHVYWEEFQKDPVGLMSRVAQPASKKIDQNKLKPEMDEKGNLTTAGFACSQCGQPLFVYKLEQVSEKGKAYTNYFGRCNVAEHEKLIKLYQLKPEKDSDEAVTYSLGKFGQRALDFYSIHVTKESTHPVKPLAQIAGNRYASVPVGKALSDACMGTIASFLSKYQDIIIEHQKVVKGNQKRLESLRELAGKENLEYPSVTLPPQPHTKEGVDAYNEVIARVRMWVNLNLWQKLKLSRDDAKPLLRLKGFPSFPLVERQANEVDWWDMVCNVKKLINEKKEDGKVFWQNLAGYKRQEALRPYLSSEEDRKKGKKFARYQLGDLLLHLEKKHGEDWGKVYDEAWERIDKKVEGLSKHIKLEEERRSEDAQSKAALTDWLRAKASFVIEGLKEADKDEFCRCELKLQKWYGDLRGKPFAIEAENSILDISGFSKQYNCAFIWQKDGVKKLNLYLIINYFKGGKLRFKKIKPEAFEANRFYTVINKKSGEIVPMEVNFNFDDPNLIILPLAFGKRQGREFIWNDLLSLETGSLKLANGRVIEKTLYNRRTRQDEPALFVALTFERREVLDSSNIKPMNLIGVDRGENIPAVIALTDPEGCPLSRFKDSLGNPTHILRIGESYKEKQRTIQAKKEVEQRRAGGYSRKYASKAKNLADDMVRNTARDLLYYAVTQDAMLIFENLSRGFGRQGKRTFMAERQYTRMEDWLTAKLAYEGLPSKTYLSKTLAQYTSKTCSNCGFTITSADYDRVLEKLKKTATGWMTTINGKELKVEGQITYYNRYKRQNVVKDLSVELDRLSEESVNNDISSWTKGRSGEALSLLKKRFSHRPVQEKFVCLNCGFETHADEQAALNIARSWLFLRSQEYKKYQTNKTTGNTDKRAFVETWQSFYRKKLKEVWKPAV

SEQ ID NO: 34620 - protein, 979 aa, synthetic construct
  REGION 1..979: note = engineered CasX variant
QEIKRINKIRRRLVKDSNTKKAGKTGPMKTLLVRVMTPDLRERLENLRKKPENIPQPISNTSRANLNKLLTDYTEMKKAILHVYWEEFQKDPVGLMSRVAQPASKKIDQNKLKPEMDEKGNLTTAGFACSQCGQPLFVYKLEQVSEKGKAYTNYFGRCNVAEHEKLIKKLYQLKPEKDSDEAVTYSLGKFGQRALDFYSIHVTKESTHPVKPLAQIAGNRYASGPVGKALSDACMGTIASFLSKYQDIIIEHQKVVKGNQKRLESLRELAGKENLEYPSVTLPPQPHTKEGVDAYNEVIARVRMWVNLNLWQKLKLSRDDAKPLLRLKGFPSFPLVERQANEVDWWDMVCNVKKLINEKKEDGKVFWQNLAGYKRQEALRPYLSSEEDRKKGKKFARYQLGDLLLHLEKKHGEDWGKVYDEAWERIDKKVEGLSKHIKLEEERRSEDAQSKAALTDWLRAKASFVIEGLKEADKDEFCRCELKLQKWYGDLRGKPFAIEAENSILDISGFSKQYNCAFIWQKDGVKKLNLYLIINYFKGGKLRFKKIKPEAFEANRFYTVINKKSGEIVPMEVNFNFDDPNLIILPLAFGKRQGREFIWNDLLSLETGSLKLANGRVIEKTLYNRRTRQDEPALFVALTFERREVLDSSNIKPMNLIGVDRGENIPAVIALTDPEGCPLSRFKDSLGNPTHILRIGESYKEKQRTIQAKKEVEQRRAGGYSRKYASKAKNLADDMVRNTARDLLYYAVTQDAMLIFENLSRGFGRQGKRTFMAERQYTRMEDWLTAKLAYEGLPSKTYLSKTLAQYTSKTCSNCGFTITSADYDRVLEKLKKTATGWMTTINGKELKVEGQITYYNRYKRQNVVKDLSVELDRLSEESVNNDISSWTKGRSGEALSLLKKRFSHRPVQEKFVCLNCGFETHADEQAALNIARSWLFLRSQEYKKYQTNKTTGNTDKRAFVETWQSFYRKKLKEVWKPAV

SEQ ID NO: 34621 - protein, 977 aa, synthetic construct
  REGION 1..977: note = engineered CasX variant
QEIKRINKIRRRLVKDSNTKKAGKTGPMKTLLVRVMTPDLRERLENLRKKPENIPQPISNTSRANLNKLLTDYTEMKKAILHVYWEEFQKDPVGLMSRVAQPASKKIDQNKLKPEMDEKGNLTTAGFACSQCGQPLFVYKLEQVSEKGKAYTNYFGRCNVAEHEKLIKLYQLKPEKDSDEAVTYSLGKFGQRALDFYSIHVTKESTHPVKPLAQIAGNRYASPVGKALSDACMGTIASFLSKYQDIIIEHQKVVKGNQKRLESLRELAGKENLEYPSVTLPPQPHTKEGVDAYNEVIARVRMWVNLNLWQKLKLSRDDAKPLLRLKGFPSFPLVERQANEVDWWDMVCNVKKLINEKKEDGKVFWQNLAGYKRQEALRPYLSSEEDRKKGKKFARYQLGDLLLHLEKKHGEDWGKVYDEAWERIDKKVEGLSKHIKLEEERRSEDAQSKAALTDWLRAKASFVIEGLKEADKDEFCRCELKLQKWYGDLRGKPFAIEAENSILDISGFSKQYNCAFIWQKDGVKKLNLYLIINYFKGGKLRFKKIKPEAFEANRFYTVINKKSGEIVPMEVNFNFDDPNLIILPLAFGKRQGREFIWNDLLSLETGSLKLANGRVIEKTLYNRRTRQDEPALFVALTFERREVLDSSNIKPMNLIGVDRGENIPAVIALTDPEGCPLSRFKDSLGNPTHILRIGESYKEKQRTIQAKKEVEQRRAGGYSRKYASKAKNLADDMVRNTARDLLYYAVTQDAMLIFENLSRGFGRQGKRTFMAERQYTRMEDWLTAKLAYEGLPSKTYLSKTLAQYTSKTCSNCGFTITSADYDRVLEKLKKTATGWMTTINGKELKVEGQITYYNRYKRQNVVKDLSVELDRLSEESVNNDISSWTKGRSGEALSLLKKRFSHRPVQEKFVCLNCGFETHADEQAALNIARSWLFLRSQEYKKYQTNKTTGNTDKRAFVETWQSFYRKKLKEVWKPAV

SEQ ID NO: 34622 - protein, 978 aa, synthetic construct
  REGION 1..978: note = engineered CasX variant
QEIKRINKIRRRLVKDSNTKKAGKTGPMKTLLVRVMTPDLRERLENLRKKPENIPQPISNTSRANLNKLLTDYTEMKKAILHVYWEEFQKDPVGLMSRVAQPASKKIDQNKLKPEMDEKGNLTTAGFACSQCGQPLFVYKLEQVSEKGKAYTNYFGRCNVAEHEKLIKLSQLKPEKDSDEAVTYSLGKFGQRALDFYSIHVTKESTHPVKPLAQIAGNRYASYPVGKALSDACMGTIASFLSKYQDIIIEHQKVVKGNQKRLESLRELAGKENLEYPSVTLPPQPHTKEGVDAYNEVIARVRMWVNLNLWQKLKLSRDDAKPLLRLKGFPSFPLVERQANEVDWWDMVCNVKKLINEKKEDGKVFWQNLAGYKRQEALRPYLSSEEDRKKGKKFARYQLGDLLLHLEKKHGEDWGKVYDEAWERIDKKVEGLSKHIKLEEERRSEDAQSKAALTDWLRAKASFVIEGLKEADKDEFCRCELKLQKWYGDLRGKPFAIEAENSILDISGFSKQYNCAFIWQKDGVKKLNLYLIINYFKGGKLRFKKIKPEAFEANRFYTVINKKSGEIVPMEVNFNFDDPNLIILPLAFGKRQGREFIWNDLLSLETGSLKLANGRVIEKTLYNRRTRQDEPALFVALTFERREVLDSSNIKPMNLIGVDRGENIPAVIALTDPEGCPLSRFKDSLGNPTHILRIGESYKEKQRTIQAKKEVEQRRAGGYSRKYASKAKNLADDMVRNTARDLLYYAVTQDAMLIFENLSRGFGRQGKRTFMAERQYTRMEDWLTAKLAYEGLPSKTYLSKTLAQYTSKTCSNCGFTITSADYDRVLEKLKKTATGWMTTINGKELKVEGQITYYNRYKRQNVVKDLSVELDRLSEESVNNDISSWTKGRSGEALSLLKKRFSHRPVQEKFVCLNCGFETHADEQAALNIARSWLFLRSQEYKKYQTNKTTGNTDKRAFVETWQSFYRKKLKEVWKPAV

SEQ ID NO: 34623 - protein, 978 aa, synthetic construct
  REGION 1..978: note = engineered CasX variant
QEIKRINKIRRRLVKDSNTKKAGKTGPMKTLLVRVMTPDLRERLENLRKKPENIPQPISNTSRANLNKLLTDYTEMKKAILHVYWEEFQKDPVGLMSRVAQPASKKIDQNKLKPEMDEKGNLTTAGFACSQCGQPLFVYKLEQVSEKGKAYTNYFGRCNVAEHEKLIKLSQLKPEKDSDEAVTYSLGKFGQRALDFYSIHVTKESTHPVKPLAQIAGNRYASHPVGKALSDACMGTIASFLSKYQDIIIEHQKVVKGNQKRLESLRELAGKENLEYPSVTLPPQPHTKEGVDAYNEVIARVRMWVNLNLWQKLKLSRDDAKPLLRLKGFPSFPLVERQANEVDWWDMVCNVKKLINEKKEDGKVFWQNLAGYKRQEALRPYLSSEEDRKKGKKFARYQLGDLLLHLEKKHGEDWGKVYDEAWERIDKKVEGLSKHIKLEEERRSEDAQSKAALTDWLRAKASFVIEGLKEADKDEFCRCELKLQKWYGDLRGKPFAIEAENSILDISGFSKQYNCAFIWQKDGVKKLNLYLIINYFKGGKLRFKKIKPEAFEANRFYTVINKKSGEIVPMEVNFNFDDPNLIILPLAFGKRQGREFIWNDLLSLETGSLKLANGRVIEKTLYNRRTRQDEPALFVALTFERREVLDSSNIKPMNLIGVDRGENIPAVIALTDPEGCPLSRFKDSLGNPTHILRIGESYKEKQRTIQAKKEVEQRRAGGYSRKYASKAKNLADDMVRNTARDLLYYAVTQDAMLIFENLSRGFGRQGKRTFMAERQYTRMEDWLTAKLAYEGLPSKTYLSKTLAQYTSKTCSNCGFTITSADYDRVLEKLKKTATGWMTTINGKELKVEGQITYYNRYKRQNVVKDLSVELDRLSEESVNNDISSWTKGRSGEALSLLKKRFSHRPVQEKFVCLNCGFETHADEQAALNIARSWLFLRSQEYKKYQTNKTTGNTDKRAFVETWQSFYRKKLKEVWKPAV

SEQ ID NO: 34624 - protein, 978 aa, synthetic construct
  REGION 1..978: note = engineered CasX variant
QEIKRINKIRRRLVKDSNTKKAGKTGPMKTLLVRVMTPDLRERLENLRKKPENIPQPISNTSRANLNKLLTDYTEMKKAILHVYWEEFQKDPVGLMSRVAQPASKKIDQNKLKPEMDEKGNLTTAGFACSQCGQPLFVYKLEQVSEKGKAYTNYFGRCNVAEHEKLIKLSQLKPEKDSDEAVTYSLGKFGQRALDFYSIHVTKESTHPVKPLAQIAGNRYASTPVGKALSDACMGTIASFLSKYQDIIIEHQKVVKGNQKRLESLRELAGKENLEYPSVTLPPQPHTKEGVDAYNEVIARVRMWVNLNLWQKLKLSRDDAKPLLRLKGFPSFPLVERQANEVDWWDMVCNVKKLINEKKEDGKVFWQNLAGYKRQEALRPYLSSEEDRKKGKKFARYQLGDLLLHLEKKHGEDWGKVYDEAWERIDKKVEGLSKHIKLEEERRSEDAQSKAALTDWLRAKASFVIEGLKEADKDEFCRCELKLQKWYGDLRGKPFAIEAENSILDISGFSKQYNCAFIWQKDGVKKLNLYLIINYFKGGKLRFKKIKPEAFEANRFYTVINKKSGEIVPMEVNFNFDDPNLIILPLAFGKRQGREFIWNDLLSLETGSLKLANGRVIEKTLYNRRTRQDEPALFVALTFERREVLDSSNIKPMNLIGVDRGENIPAVIALTDPEGCPLSRFKDSLGNPTHILRIGESYKEKQRTIQAKKEVEQRRAGGYSRKYASKAKNLADDMVRNTARDLLYYAVTQDAMLIFENLSRGFGRQGKRTFMAERQYTRMEDWLTAKLAYEGLPSKTYLSKTLAQYTSKTCSNCGFTITSADYDRVLEKLKKTATGWMTTINGKELKVEGQITYYNRYKRQNVVKDLSVELDRLSEESVNNDISSWTKGRSGEALSLLKKRFSHRPVQEKFVCLNCGFETHADEQAALNIARSWLFLRSQEYKKYQTNKTTGNTDKRAFVETWQSFYRKKLKEVWKPAV

SEQ ID NO: 34625 - protein, 978 aa, synthetic construct
  REGION 1..978: note = engineered CasX variant
QEIKRINKIRRRLVKDSNTKKAGKTGPMKTLLVRVMTPDLRERLENLRKKPENIPQPISNTSRANLNKLLTDYTEMKKAILHVYWEEFQKDPVGLMSRVAQPASKKIDQNKLKPEMDEKGNLTTAGFACSQCGQPLFVYKLEQVSEKGKAYTNYFGRCNVAEHEKLIKLSQLKPEKDSDEAVTYSLGKFGQRALDFYSIHVTKESTHPVKPLAQIAGNRYASAPVGKALSDACMGTIASFLSKYQDIIIEHQKVVKGNQKRLESLRELAGKENLEYPSVTLPPQPHTKEGVDAYNEVIARVRMWVNLNLWQKLKLSRDDAKPLLRLKGFPSFPLVERQANEVDWWDMVCNVKKLINEKKEDGKVFWQNLAGYKRQEALRPYLSSEEDRKKGKKFARYQLGDLLLHLEKKHGEDWGKVYDEAWERIDKKVEGLSKHIKLEEERRSEDAQSKAALTDWLRAKASFVIEGLKEADKDEFCRCELKLQKWYGDLRGKPFAIEAENSILDISGFSKQYNCAFIWQKDGVKKLNLYLIINYFKGGKLRFKKIKPEAFEANRFYTVINKKSGEIVPMEVNFNFDDPNLIILPLAFGKRQGREFIWNDLLSLETGSLKLANGRVIEKTLYNRRTRQDEPALFVALTFERREVLDSSNIKPMNLIGVDRGENIPAVIALTDPEGCPLSRFKDSLGNPTHILRIGESYKEKQRTIQAKKEVEQRRAGGYSRKYASKAKNLADDMVRNTARDLLYYAVTQDAMLIFENLSRGFGRQGKRTFMAERQYTRMEDWLTAKLAYEGLPSKTYLSKTLAQYTSKTCSNCGFTITSADYDRVLEKLKKTATGWMTTINGKELKVEGQITYYNRYKRQNVVKDLSVELDRLSEESVNNDISSWTKGRSGEALSLLKKRFSHRPVQEKFVCLNCGFETHADEQAALNIARSWLFLRSQEYKKYQTNKTTGNTDKRAFVETWQSFYRKKLKEVWKPAV

SEQ ID NO: 34626 - protein, 978 aa, synthetic construct
  REGION 1..978: note = engineered CasX variant
QEIKRINKIRRRLVKDSNTKKAGKTGPMKTLLVRVMTPDLRERLENLRKKPENIPQPISNTSRANLNKLLTDYTEMKKAILHVYWEEFQKDPVGLMSRVAQPASKKIDQNKLKPEMDEKGNLTTAGFACSQCGQPLFVYKLEQVSEKGKAYTNYFGRCNVAEHEKLIKLSQLKPEKDSDEAVTYSLGKFGQRALDFYSIHVTKESTHPVKPLAQIAGNRYASVPVGKALSDACMGTIASFLSKYQDIIIEHQKVVKGNQKRLESLRELAGKENLEYPSVTLPPQPHTKEGVDAYNEVIARVRMWVNLNLWQKLKLSRDDAKPLLRLKGFPSFPLVERQANEVDWWDMVCNVKKLINEKKEDGKVFWQNLAGYKRQEALRPYLSSEEDRKKGKKFARYQLGDLLLHLEKKHGEDWGKVYDEAWERIDKKVEGLSKHIKLEEERRSEDAQSKAALTDWLRAKASFVIEGLKEADKDEFCRCELKLQKWYGDLRGKPFAIEAENSILDISGFSKQYNCAFIWQKDGVKKLNLYLIINYFKGGKLRFKKIKPEAFEANRFYTVINKKSGEIVPMEVNFNFDDPNLIILPLAFGKRQGREFIWNDLLSLETGSLKLANGRVIEKTLYNRRTRQDEPALFVALTFERREVLDSSNIKPMNLIGVDRGENIPAVIALTDPEGCPLSRFKDSLGNPTHILRIGESYKEKQRTIQAKKEVEQRRAGGYSRKYASKAKNLADDMVRNTARDLLYYAVTQDAMLIFENLSRGFGRQGKRTFMAERQYTRMEDWLTAKLAYEGLPSKTYLSKTLAQYTSKTCSNCGFTITSADYDRVLEKLKKTATGWMTTINGKELKVEGQITYYNRYKRQNVVKDLSVELDRLSEESVNNDISSWTKGRSGEALSLLKKRFSHRPVQEKFVCLNCGFETHADEQAALNIARSWLFLRSQEYKKYQTNKTTGNTDKRAFVETWQSFYRKKLKEVWKPAV

SEQ ID NO: 34627 - protein, 979 aa, synthetic construct
  REGION 1..979: note = engineered CasX variant
QEIKRINKIRRRLVKDSNTKKAGKTGPMKTLLVRVMTPDLRERLENLRKKPENIPQPISNTSRANLNKLLTDYTEMKKAILHVYWEEFQKDPVGLMSRVAQPASKKIDQNKLKPEMDEKGNLTTAGFACSQCGQPLFVYKLEQVSEKGKAYTNYFGRCNVAEHEKLIKKLSQLKPEKDSDEAVTYSLGKFGQRALDFYSIHVTKESTHPVKPLAQIAGNRYASGPVGKALSDACMGTIASFLSKYQDIIIEHQKVVKGNQKRLESLRELAGKENLEYPSVTLPPQPHTKEGVDAYNEVIARVRMWVNLNLWQKLKLSRDDAKPLLRLKGFPSFPLVERQANEVDWWDMVCNVKKLINEKKEDGKVFWQNLAGYKRQEALRPYLSSEEDRKKGKKFARYQLGDLLLHLEKKHGEDWGKVYDEAWERIDKKVEGLSKHIKLEEERRSEDAQSKAALTDWLRAKASFVIEGLKEADKDEFCRCELKLQKWYGDLRGKPFAIEAENSILDISGFSKQYNCAFIWQKDGVKKLNLYLIINYFKGGKLRFKKIKPEAFEANRFYTVINKKSGEIVPMEVNFNFDDPNLIILPLAFGKRQGREFIWNDLLSLETGSLKLANGRVIEKTLYNRRTRQDEPALFVALTFERREVLDSSNIKPMNLIGVDRGENIPAVIALTDPEGCPLSRFKDSLGNPTHILRIGESYKEKQRTIQAKKEVEQRRAGGYSRKYASKAKNLADDMVRNTARDLLYYAVTQDAMLIFENLSRGFGRQGKRTFMAERQYTRMEDWLTAKLAYEGLPSKTYLSKTLAQYTSKTCSNCGFTITSADYDRVLEKLKKTATGWMTTINGKELKVEGQITYYNRYKRQNVVKDLSVELDRLSEESVNNDISSWTKGRSGEALSLLKKRFSHRPVQEKFVCLNCGFETHADEQAALNIARSWLFLRSQEYKKYQTNKTTGNTDKRAFVETWQSFYRKKLKEVWKPAV

SEQ ID NO: 34628 - protein, 977 aa, synthetic construct
  REGION 1..977: note = engineered CasX variant
QEIKRINKIRRRLVKDSNTKKAGKTGPMKTLLVRVMTPDLRERLENLRKKPENIPQPISNTSRANLNKLLTDYTEMKKAILHVYWEEFQKDPVGLMSRVAQPASKKIDQNKLKPEMDEKGNLTTAGFACSQCGQPLFVYKLEQVSEKGKAYTNYFGRCNVAEHEKLIKLSQLKPEKDSDEAVTYSLGKFGQRALDFYSIHVTKESTHPVKPLAQIAGNRYASPVGKALSDACMGTIASFLSKYQDIIIEHQKVVKGNQKRLESLRELAGKENLEYPSVTLPPQPHTKEGVDAYNEVIARVRMWVNLNLWQKLKLSRDDAKPLLRLKGFPSFPLVERQANEVDWWDMVCNVKKLINEKKEDGKVFWQNLAGYKRQEALRPYLSSEEDRKKGKKFARYQLGDLLLHLEKKHGEDWGKVYDEAWERIDKKVEGLSKHIKLEEERRSEDAQSKAALTDWLRAKASFVIEGLKEADKDEFCRCELKLQKWYGDLRGKPFAIEAENSILDISGFSKQYNCAFIWQKDGVKKLNLYLIINYFKGGKLRFKKIKPEAFEANRFYTVINKKSGEIVPMEVNFNFDDPNLIILPLAFGKRQGREFIWNDLLSLETGSLKLANGRVIEKTLYNRRTRQDEPALFVALTFERREVLDSSNIKPMNLIGVDRGENIPAVIALTDPEGCPLSRFKDSLGNPTHILRIGESYKEKQRTIQAKKEVEQRRAGGYSRKYASKAKNLADDMVRNTARDLLYYAVTQDAMLIFENLSRGFGRQGKRTFMAERQYTRMEDWLTAKLAYEGLPSKTYLSKTLAQYTSKTCSNCGFTITSADYDRVLEKLKKTATGWMTTINGKELKVEGQITYYNRYKRQNVVKDLSVELDRLSEESVNNDISSWTKGRSGEALSLLKKRFSHRPVQEKFVCLNCGFETHADEQAALNIARSWLFLRSQEYKKYQTNKTTGNTDKRAFVETWQSFYRKKLKEVWKPAV

SEQ ID NO: 34629 - protein, 978 aa, synthetic construct
  REGION 1..978: note = engineered CasX variant
QEIKRINKIRRRLVKDSNTKKAGKTGPMKTLLVRVMTPDLRERLENLRKKPENIPQPISNTSRANLNKLLTDYTEMKKAILHVYWEEFQKDPVGLMSRVAQPASKKIDQNKLKPEMDEKGNLTTAGFACSQCGQPLFVYKLEQVSEKGKAYTNYFGRCNVAEHEKLIKLAQLKPEKDSDEAVTYSLGKFGQRALDFYSIHVTKESTHPVKPLAQIAGNRYASYPVGKALSDACMGTIASFLSKYQDIIIEHQKVVKGNQKRLESLRELAGKENLEYPSVTLPPQPHTKEGVDAYNEVIARVRMWVNLNLWQKLKLSRDDAKPLLRLKGFPSFPLVERQANEVDWWDMVCNVKKLINEKKEDGKVFWQNLAGYKRQEALRPYLSSEEDRKKGKKFARYQLGDLLLHLEKKHGEDWGKVYDEAWERIDKKVEGLSKHIKLEEERRSEDAQSKAALTDWLRAKASFVIEGLKEADKDEFCRCELKLQKWYGDLRGKPFAIEAENSILDISGFSKQYNCAFIWQKDGVKKLNLYLIINYFKGGKLRFKKIKPEAFEANRFYTVINKKSGEIVPMEVNFNFDDPNLIILPLAFGKRQGREFIWNDLLSLETGSLKLANGRVIEKTLYNRRTRQDEPALFVALTFERREVLDSSNIKPMNLIGVDRGENIPAVIALTDPEGCPLSRFKDSLGNPTHILRIGESYKEKQRTIQAKKEVEQRRAGGYSRKYASKAKNLADDMVRNTARDLLYYAVTQDAMLIFENLSRGFGRQGKRTFMAERQYTRMEDWLTAKLAYEGLPSKTYLSKTLAQYTSKTCSNCGFTITSADYDRVLEKLKKTATGWMTTINGKELKVEGQITYYNRYKRQNVVKDLSVELDRLSEESVNNDISSWTKGRSGEALSLLKKRFSHRPVQEKFVCLNCGFETHADEQAALNIARSWLFLRSQEYKKYQTNKTTGNTDKRAFVETWQSFYRKKLKEVWKPAV

SEQ ID NO: 34630 - protein, 978 aa, synthetic construct
  REGION 1..978: note = engineered CasX variant
QEIKRINKIRRRLVKDSNTKKAGKTGPMKTLLVRVMTPDLRERLENLRKKPENIPQPISNTSRANLNKLLTDYTEMKKAILHVYWEEFQKDPVGLMSRVAQPASKKIDQNKLKPEMDEKGNLTTAGFACSQCGQPLFVYKLEQVSEKGKAYTNYFGRCNVAEHEKLIKLAQLKPEKDSDEAVTYSLGKFGQRALDFYSIHVTKESTHPVKPLAQIAGNRYASHPVGKALSDACMGTIASFLSKYQDIIIEHQKVVKGNQKRLESLRELAGKENLEYPSVTLPPQPHTKEGVDAYNEVIARVRMWVNLNLWQKLKLSRDDAKPLLRLKGFPSFPLVERQANEVDWWDMVCNVKKLINEKKEDGKVFWQNLAGYKRQEALRPYLSSEEDRKKGKKFARYQLGDLLLHLEKKHGEDWGKVYDEAWERIDKKVEGLSKHIKLEEERRSEDAQSKAALTDWLRAKASFVIEGLKEADKDEFCRCELKLQKWYGDLRGKPFAIEAENSILDISGFSKQYNCAFIWQKDGVKKLNLYLIINYFKGGKLRFKKIKPEAFEANRFYTVINKKSGEIVPMEVNFNFDDPNLIILPLAFGKRQGREFIWNDLLSLETGSLKLANGRVIEKTLYNRRTRQDEPALFVALTFERREVLDSSNIKPMNLIGVDRGENIPAVIALTDPEGCPLSRFKDSLGNPTHILRIGESYKEKQRTIQAKKEVEQRRAGGYSRKYASKAKNLADDMVRNTARDLLYYAVTQDAMLIFENLSRGFGRQGKRTFMAERQYTRMEDWLTAKLAYEGLPSKTYLSKTLAQYTSKTCSNCGFTITSADYDRVLEKLKKTATGWMTTINGKELKVEGQITYYNRYKRQNVVKDLSVELDRLSEESVNNDISSWTKGRSGEALSLLKKRFSHRPVQEKFVCLNCGFETHADEQAALNIARSWLFLRSQEYKKYQTNKTTGNTDKRAFVETWQSFYRKKLKEVWKPAV

SEQ ID NO: 34631 - protein, 978 aa, synthetic construct
  REGION 1..978: note = engineered CasX variant
QEIKRINKIRRRLVKDSNTKKAGKTGPMKTLLVRVMTPDLRERLENLRKKPENIPQPISNTSRANLNKLLTDYTEMKKAILHVYWEEFQKDPVGLMSRVAQPASKKIDQNKLKPEMDEKGNLTTAGFACSQCGQPLFVYKLEQVSEKGKAYTNYFGRCNVAEHEKLIKLAQLKPEKDSDEAVTYSLGKFGQRALDFYSIHVTKESTHPVKPLAQIAGNRYASTPVGKALSDACMGTIASFLSKYQDIIIEHQKVVKGNQKRLESLRELAGKENLEYPSVTLPPQPHTKEGVDAYNEVIARVRMWVNLNLWQKLKLSRDDAKPLLRLKGFPSFPLVERQANEVDWWDMVCNVKKLINEKKEDGKVFWQNLAGYKRQEALRPYLSSEEDRKKGKKFARYQLGDLLLHLEKKHGEDWGKVYDEAWERIDKKVEGLSKHIKLEEERRSEDAQSKAALTDWLRAKASFVIEGLKEADKDEFCRCELKLQKWYGDLRGKPFAIEAENSILDISGFSKQYNCAFIWQKDGVKKLNLYLIINYFKGGKLRFKKIKPEAFEANRFYTVINKKSGEIVPMEVNFNFDDPNLIILPLAFGKRQGREFIWNDLLSLETGSLKLANGRVIEKTLYNRRTRQDEPALFVALTFERREVLDSSNIKPMNLIGVDRGENIPAVIALTDPEGCPLSRFKDSLGNPTHILRIGESYKEKQRTIQAKKEVEQRRAGGYSRKYASKAKNLADDMVRNTARDLLYYAVTQDAMLIFENLSRGFGRQGKRTFMAERQYTRMEDWLTAKLAYEGLPSKTYLSKTLAQYTSKTCSNCGFTITSADYDRVLEKLKKTATGWMTTINGKELKVEGQITYYNRYKRQNVVKDLSVELDRLSEESVNNDISSWTKGRSGEALSLLKKRFSHRPVQEKFVCLNCGFETHADEQAALNIARSWLFLRSQEYKKYQTNKTTGNTDKRAFVETWQSFYRKKLKEVWKPAV

SEQ ID NO: 34632 - protein, 978 aa, synthetic construct
  REGION 1..978: note = engineered CasX variant
QEIKRINKIRRRLVKDSNTKKAGKTGPMKTLLVRVMTPDLRERLENLRKKPENIPQPISNTSRANLNKLLTDYTEMKKAILHVYWEEFQKDPVGLMSRVAQPASKKIDQNKLKPEMDEKGNLTTAGFACSQCGQPLFVYKLEQVSEKGKAYTNYFGRCNVAEHEKLIKLAQLKPEKDSDEAVTYSLGKFGQRALDFYSIHVTKESTHPVKPLAQIAGNRYASAPVGKALSDACMGTIASFLSKYQDIIIEHQKVVKGNQKRLESLRELAGKENLEYPSVTLPPQPHTKEGVDAYNEVIARVRMWVNLNLWQKLKLSRDDAKPLLRLKGFPSFPLVERQANEVDWWDMVCNVKKLINEKKEDGKVFWQNLAGYKRQEALRPYLSSEEDRKKGKKFARYQLGDLLLHLEKKHGEDWGKVYDEAWERIDKKVEGLSKHIKLEEERRSEDAQSKAALTDWLRAKASFVIEGLKEADKDEFCRCELKLQKWYGDLRGKPFAIEAENSILDISGFSKQYNCAFIWQKDGVKKLNLYLIINYFKGGKLRFKKIKPEAFEANRFYTVINKKSGEIVPMEVNFNFDDPNLIILPLAFGKRQGREFIWNDLLSLETGSLKLANGRVIEKTLYNRRTRQDEPALFVALTFERREVLDSSNIKPMNLIGVDRGENIPAVIALTDPEGCPLSRFKDSLGNPTHILRIGESYKEKQRTIQAKKEVEQRRAGGYSRKYASKAKNLADDMVRNTARDLLYYAVTQDAMLIFENLSRGFGRQGKRTFMAERQYTRMEDWLTAKLAYEGLPSKTYLSKTLAQYTSKTCSNCGFTITSADYDRVLEKLKKTATGWMTTINGKELKVEGQITYYNRYKRQNVVKDLSVELDRLSEESVNNDISSWTKGRSGEALSLLKKRFSHRPVQEKFVCLNCGFETHADEQAALNIARSWLFLRSQEYKKYQTNKTTGNTDKRAFVETWQSFYRKKLKEVWKPAV

SEQ ID NO: 34633 - protein, 978 aa, synthetic construct
  REGION 1..978: note = engineered CasX variant
QEIKRINKIRRRLVKDSNTKKAGKTGPMKTLLVRVMTPDLRERLENLRKKPENIPQPISNTSRANLNKLLTDYTEMKKAILHVYWEEFQKDPVGLMSRVAQPASKKIDQNKLKPEMDEKGNLTTAGFACSQCGQPLFVYKLEQVSEKGKAYTNYFGRCNVAEHEKLIKLAQLKPEKDSDEAVTYSLGKFGQRALDFYSIHVTKESTHPVKPLAQIAGNRYASVPVGKALSDACMGTIASFLSKYQDIIIEHQKVVKGNQKRLESLRELAGKENLEYPSVTLPPQPHTKEGVDAYNEVIARVRMWVNLNLWQKLKLSRDDAKPLLRLKGFPSFPLVERQANEVDWWDMVCNVKKLINEKKEDGKVFWQNLAGYKRQEALRPYLSSEEDRKKGKKFARYQLGDLLLHLEKKHGEDWGKVYDEAWERIDKKVEGLSKHIKLEEERRSEDAQSKAALTDWLRAKASFVIEGLKEADKDEFCRCELKLQKWYGDLRGKPFAIEAENSILDISGFSKQYNCAFIWQKDGVKKLNLYLIINYFKGGKLRFKKIKPEAFEANRFYTVINKKSGEIVPMEVNFNFDDPNLIILPLAFGKRQGREFIWNDLLSLETGSLKLANGRVIEKTLYNRRTRQDEPALFVALTFERREVLDSSNIKPMNLIGVDRGENIPAVIALTDPEGCPLSRFKDSLGNPTHILRIGESYKEKQRTIQAKKEVEQRRAGGYSRKYASKAKNLADDMVRNTARDLLYYAVTQDAMLIFENLSRGFGRQGKRTFMAERQYTRMEDWLTAKLAYEGLPSKTYLSKTLAQYTSKTCSNCGFTITSADYDRVLEKLKKTATGWMTTINGKELKVEGQITYYNRYKRQNVVKDLSVELDRLSEESVNNDISSWTKGRSGEALSLLKKRFSHRPVQEKFVCLNCGFETHADEQAALNIARSWLFLRSQEYKKYQTNKTTGNTDKRAFVETWQSFYRKKLKEVWKPAV

SEQ ID NO: 34634 - protein, 978 aa, synthetic construct
  REGION 1..978: note = engineered CasX variant
QEIKRINKIRRRLVKDSNTKKAGKTGPMKTLLVRVMTPDLRERLENLRKKPENIPQPISNTSRANLNKLLTDYTEMKKAILHVYWEEFQKDPVGLMSRVAQPASKKIDQNKLKPEMDEKGNLTTAGFACSQCGQPLFVYKLEQVSEKGKAYTNYFGRCNVAEHEKLIKKLAQLKPEKDSDEAVTYSLGKFGQRALDFYSIHVTKESTHPVKPLAQIAGNRYASPVGKALSDACMGTIASFLSKYQDIIIEHQKVVKGNQKRLESLRELAGKENLEYPSVTLPPQPHTKEGVDAYNEVIARVRMWVNLNLWQKLKLSRDDAKPLLRLKGFPSFPLVERQANEVDWWDMVCNVKKLINEKKEDGKVFWQNLAGYKRQEALRPYLSSEEDRKKGKKFARYQLGDLLLHLEKKHGEDWGKVYDEAWERIDKKVEGLSKHIKLEEERRSEDAQSKAALTDWLRAKASFVIEGLKEADKDEFCRCELKLQKWYGDLRGKPFAIEAENSILDISGFSKQYNCAFIWQKDGVKKLNLYLIINYFKGGKLRFKKIKPEAFEANRFYTVINKKSGEIVPMEVNFNFDDPNLIILPLAFGKRQGREFIWNDLLSLETGSLKLANGRVIEKTLYNRRTRQDEPALFVALTFERREVLDSSNIKPMNLIGVDRGENIPAVIALTDPEGCPLSRFKDSLGNPTHILRIGESYKEKQRTIQAKKEVEQRRAGGYSRKYASKAKNLADDMVRNTARDLLYYAVTQDAMLIFENLSRGFGRQGKRTFMAERQYTRMEDWLTAKLAYEGLPSKTYLSKTLAQYTSKTCSNCGFTITSADYDRVLEKLKKTATGWMTTINGKELKVEGQITYYNRYKRQNVVKDLSVELDRLSEESVNNDISSWTKGRSGEALSLLKKRFSHRPVQEKFVCLNCGFETHADEQAALNIARSWLFLRSQEYKKYQTNKTTGNTDKRAFVETWQSFYRKKLKEVWKPAV

SEQ ID NO: 34635 - protein, 978 aa, synthetic construct
  REGION 1..978: note = engineered CasX variant
QEIKRINKIRRRLVKDSNTKKAGKTGPMKTLLVRVMTPDLRERLENLRKKPENIPQPISNTSRANLNKLLTDYTEMKKAILHVYWEEFQKDPVGLMSRVAQPASKKIDQNKLKPEMDEKGNLTTAGFACSQCGQPLFVYKLEQVSEKGKAYTNYFGRCNVAEHEKLIKLAQLKPEKDSDEAVTYSLGKFGQRALDFYSIHVTKESTHPVKPLAQIAGNRYASYPVGKALSDACMGTIASFLSKYQDIIIEHQKVVKGNQKRLESLRELAGKENLEYPSVTLPPQPHTSEGVDAYNEVIARVRMWVNLNLWQKLKLSRDDAKPLLRLKGFPSFPLVERQANEVDWWDMVCNVKKLINEKKEDGKVFWQNLAGYKRQEALRPYLSSEEDRKKGKKFARYQLGDLLLHLEKKHGEDWGKVYDEAWERIDKKVEGLSKHIKLEEERRSEDAQSKAALTDWLRAKASFVIEGLKEADKDEFCRCELKLQKWYGDLRGKPFAIEAENSILDISGFSKQYNCAFIWQKDGVKKLNLYLIINYFKGGKLRFKKIKPEAFEANRFYTVINKKSGEIVPMEVNFNFDDPNLIILPLAFGKRQGREFIWNDLLSLETGSLKLANGRVIEKTLYNRRTRQDEPALFVALTFERREVLDSSNIKPMNLIGVDRGENIPAVIALTDPEGCPLSRFKDSLGNPTHILRIGESYKEKQRTIQAKKEVEQRRAGGYSRKYASKAKNLADDMVRNTARDLLYYAVTQDAMLIFENLSRGFGRQGKRTFMAERQYTRMEDWLTAKLAYEGLPSKTYLSKTLAQYTSKTCSNCGFTITSADYDRVLEKLKKTATGWMTTINGKELKVEGQITYYNRYKRQNVVKDLSVELDRLSEESVNNDISSWTKGRSGEALSLLKKRFSHRPVQEKFVCLNCGFETHADEQAALNIARSWLFLRSQEYKKYQTNKTTGNTDKRAFVETWQSFYRKKLKEVWKPAV

SEQ ID NO: 34636 - protein, 978 aa, synthetic construct
  REGION 1..978: note = engineered CasX variant
QEIKRINKIRRRLVKDSNTKKAGKTGPMKTLLVRVMTPDLRERLENLRKKPENIPQPISNTSRANLNKLLTDYTEMKKAILHVYWEEFQKDPVGLMSRVAQPASKKIDQNKLKPEMDEKGNLTTAGFACSQCGQPLFVYKLEQVSEKGKAYTNYFGRCNVAEHEKLIKLAQLKPEKDSDEAVTYSLGKFGQRALDFYSIHVTKESTHPVKPLAQIAGNRYASHPVGKALSDACMGTIASFLSKYQDIIIEHQKVVKGNQKRLESLRELAGKENLEYPSVTLPPQPHTSEGVDAYNEVIARVRMWVNLNLWQKLKLSRDDAKPLLRLKGFPSFPLVERQANEVDWWDMVCNVKKLINEKKEDGKVFWQNLAGYKRQEALRPYLSSEEDRKKGKKFARYQLGDLLLHLEKKHGEDWGKVYDEAWERIDKKVEGLSKHIKLEEERRSEDAQSKAALTDWLRAKASFVIEGLKEADKDEFCRCELKLQKWYGDLRGKPFAIEAENSILDISGFSKQYNCAFIWQKDGVKKLNLYLIINYFKGGKLRFKKIKPEAFEANRFYTVINKKSGEIVPMEVNFNFDDPNLIILPLAFGKRQGREFIWNDLLSLETGSLKLANGRVIEKTLYNRRTRQDEPALFVALTFERREVLDSSNIKPMNLIGVDRGENIPAVIALTDPEGCPLSRFKDSLGNPTHILRIGESYKEKQRTIQAKKEVEQRRAGGYSRKYASKAKNLADDMVRNTARDLLYYAVTQDAMLIFENLSRGFGRQGKRTFMAERQYTRMEDWLTAKLAYEGLPSKTYLSKTLAQYTSKTCSNCGFTITSADYDRVLEKLKKTATGWMTTINGKELKVEGQITYYNRYKRQNVVKDLSVELDRLSEESVNNDISSWTKGRSGEALSLLKKRFSHRPVQEKFVCLNCGFETHADEQAALNIARSWLFLRSQEYKKYQTNKTTGNTDKRAFVETWQSFYRKKLKEVWKPAV

SEQ ID NO: 34637 - protein, 978 aa, synthetic construct
  REGION 1..978: note = engineered CasX variant
QEIKRINKIRRRLVKDSNTKKAGKTGPMKTLLVRVMTPDLRERLENLRKKPENIPQPISNTSRANLNKLLTDYTEMKKAILHVYWEEFQKDPVGLMSRVAQPASKKIDQNKLKPEMDEKGNLTTAGFACSQCGQPLFVYKLEQVSEKGKAYTNYFGRCNVAEHEKLIKLAQLKPEKDSDEAVTYSLGKFGQRALDFYSIHVTKESTHPVKPLAQIAGNRYASTPVGKALSDACMGTIASFLSKYQDIIIEHQKVVKGNQKRLESLRELAGKENLEYPSVTLPPQPHTSEGVDAYNEVIARVRMWVNLNLWQKLKLSRDDAKPLLRLKGFPSFPLVERQANEVDWWDMVCNVKKLINEKKEDGKVFWQNLAGYKRQEALRPYLSSEEDRKKGKKFARYQLGDLLLHLEKKHGEDWGKVYDEAWERIDKKVEGLSKHIKLEEERRSEDAQSKAALTDWLRAKASFVIEGLKEADKDEFCRCELKLQKWYGDLRGKPFAIEAENSILDISGFSKQYNCAFIWQKDGVKKLNLYLIINYFKGGKLRFKKIKPEAFEANRFYTVINKKSGEIVPMEVNFNFDDPNLIILPLAFGKRQGREFIWNDLLSLETGSLKLANGRVIEKTLYNRRTRQDEPALFVALTFERREVLDSSNIKPMNLIGVDRGENIPAVIALTDPEGCPLSRFKDSLGNPTHILRIGESYKEKQRTIQAKKEVEQRRAGGYSRKYASKAKNLADDMVRNTARDLLYYAVTQDAMLIFENLSRGFGRQGKRTFMAERQYTRMEDWLTAKLAYEGLPSKTYLSKTLAQYTSKTCSNCGFTITSADYDRVLEKLKKTATGWMTTINGKELKVEGQITYYNRYKRQNVVKDLSVELDRLSEESVNNDISSWTKGRSGEALSLLKKRFSHRPVQEKFVCLNCGFETHADEQAALNIARSWLFLRSQEYKKYQTNKTTGNTDKRAFVETWQSFYRKKLKEVWKPAV

SEQ ID NO: 34638 - protein, 978 aa, synthetic construct
  REGION 1..978: note = engineered CasX variant
QEIKRINKIRRRLVKDSNTKKAGKTGPMKTLLVRVMTPDLRERLENLRKKPENIPQPISNTSRANLNKLLTDYTEMKKAILHVYWEEFQKDPVGLMSRVAQPASKKIDQNKLKPEMDEKGNLTTAGFACSQCGQPLFVYKLEQVSEKGKAYTNYFGRCNVAEHEKLIKLAQLKPEKDSDEAVTYSLGKFGQRALDFYSIHVTKESTHPVKPLAQIAGNRYASAPVGKALSDACMGTIASFLSKYQDIIIEHQKVVKGNQKRLESLRELAGKENLEYPSVTLPPQPHTSEGVDAYNEVIARVRMWVNLNLWQKLKLSRDDAKPLLRLKGFPSFPLVERQANEVDWWDMVCNVKKLINEKKEDGKVFWQNLAGYKRQEALRPYLSSEEDRKKGKKFARYQLGDLLLHLEKKHGEDWGKVYDEAWERIDKKVEGLSKHIKLEEERRSEDAQSKAALTDWLRAKASFVIEGLKEADKDEFCRCELKLQKWYGDLRGKPFAIEAENSILDISGFSKQYNCAFIWQKDGVKKLNLYLIINYFKGGKLRFKKIKPEAFEANRFYTVINKKSGEIVPMEVNFNFDDPNLIILPLAFGKRQGREFIWNDLLSLETGSLKLANGRVIEKTLYNRRTRQDEPALFVALTFERREVLDSSNIKPMNLIGVDRGENIPAVIALTDPEGCPLSRFKDSLGNPTHILRIGESYKEKQRTIQAKKEVEQRRAGGYSRKYASKAKNLADDMVRNTARDLLYYAVTQDAMLIFENLSRGFGRQGKRTFMAERQYTRMEDWLTAKLAYEGLPSKTYLSKTLAQYTSKTCSNCGFTITSADYDRVLEKLKKTATGWMTTINGKELKVEGQITYYNRYKRQNVVKDLSVELDRLSEESVNNDISSWTKGRSGEALSLLKKRFSHRPVQEKFVCLNCGFETHADEQAALNIARSWLFLRSQEYKKYQTNKTTGNTDKRAFVETWQSFYRKKLKEVWKPAV

SEQ ID NO: 34639 - protein, 978 aa, synthetic construct
  REGION 1..978: note = engineered CasX variant
QEIKRINKIRRRLVKDSNTKKAGKTGPMKTLLVRVMTPDLRERLENLRKKPENIPQPISNTSRANLNKLLTDYTEMKKAILHVYWEEFQKDPVGLMSRVAQPASKKIDQNKLKPEMDEKGNLTTAGFACSQCGQPLFVYKLEQVSEKGKAYTNYFGRCNVAEHEKLIKLAQLKPEKDSDEAVTYSLGKFGQRALDFYSIHVTKESTHPVKPLAQIAGNRYASVPVGKALSDACMGTIASFLSKYQDIIIEHQKVVKGNQKRLESLRELAGKENLEYPSVTLPPQPHTSEGVDAYNEVIARVRMWVNLNLWQKLKLSRDDAKPLLRLKGFPSFPLVERQANEVDWWDMVCNVKKLINEKKEDGKVFWQNLAGYKRQEALRPYLSSEEDRKKGKKFARYQLGDLLLHLEKKHGEDWGKVYDEAWERIDKKVEGLSKHIKLEEERRSEDAQSKAALTDWLRAKASFVIEGLKEADKDEFCRCELKLQKWYGDLRGKPFAIEAENSILDISGFSKQYNCAFIWQKDGVKKLNLYLIINYFKGGKLRFKKIKPEAFEANRFYTVINKKSGEIVPMEVNFNFDDPNLIILPLAFGKRQGREFIWNDLLSLETGSLKLANGRVIEKTLYNRRTRQDEPALFVALTFERREVLDSSNIKPMNLIGVDRGENIPAVIALTDPEGCPLSRFKDSLGNPTHILRIGESYKEKQRTIQAKKEVEQRRAGGYSRKYASKAKNLADDMVRNTARDLLYYAVTQDAMLIFENLSRGFGRQGKRTFMAERQYTRMEDWLTAKLAYEGLPSKTYLSKTLAQYTSKTCSNCGFTITSADYDRVLEKLKKTATGWMTTINGKELKVEGQITYYNRYKRQNVVKDLSVELDRLSEESVNNDISSWTKGRSGEALSLLKKRFSHRPVQEKFVCLNCGFETHADEQAALNIARSWLFLRSQEYKKYQTNKTTGNTDKRAFVETWQSFYRKKLKEVWKPAV

SEQ ID NO: 34640 - protein, 979 aa, synthetic construct
  REGION 1..979: note = engineered CasX variant
QEIKRINKIRRRLVKDSNTKKAGKTGPMKTLLVRVMTPDLRERLENLRKKPENIPQPISNTSRANLNKLLTDYTEMKKAILHVYWEEFQKDPVGLMSRVAQPASKKIDQNKLKPEMDEKGNLTTAGFACSQCGQPLFVYKLEQVSEKGKAYTNYFGRCNVAEHEKLIKKLAQLKPEKDSDEAVTYSLGKFGQRALDFYSIHVTKESTHPVKPLAQIAGNRYASGPVGKALSDACMGTIASFLSKYQDIIIEHQKVVKGNQKRLESLRELAGKENLEYPSVTLPPQPHTSEGVDAYNEVIARVRMWVNLNLWQKLKLSRDDAKPLLRLKGFPSFPLVERQANEVDWWDMVCNVKKLINEKKEDGKVFWQNLAGYKRQEALRPYLSSEEDRKKGKKFARYQLGDLLLHLEKKHGEDWGKVYDEAWERIDKKVEGLSKHIKLEEERRSEDAQSKAALTDWLRAKASFVIEGLKEADKDEFCRCELKLQKWYGDLRGKPFAIEAENSILDISGFSKQYNCAFIWQKDGVKKLNLYLIINYFKGGKLRFKKIKPEAFEANRFYTVINKKSGEIVPMEVNFNFDDPNLIILPLAFGKRQGREFIWNDLLSLETGSLKLANGRVIEKTLYNRRTRQDEPALFVALTFERREVLDSSNIKPMNLIGVDRGENIPAVIALTDPEGCPLSRFKDSLGNPTHILRIGESYKEKQRTIQAKKEVEQRRAGGYSRKYASKAKNLADDMVRNTARDLLYYAVTQDAMLIFENLSRGFGRQGKRTFMAERQYTRMEDWLTAKLAYEGLPSKTYLSKTLAQYTSKTCSNCGFTITSADYDRVLEKLKKTATGWMTTINGKELKVEGQITYYNRYKRQNVVKDLSVELDRLSEESVNNDISSWTKGRSGEALSLLKKRFSHRPVQEKFVCLNCGFETHADEQAALNIARSWLFLRSQEYKKYQTNKTTGNTDKRAFVETWQSFYRKKLKEVWKPAV

SEQ ID NO: 34641 - protein, 977 aa, synthetic construct
  REGION 1..977: note = engineered CasX variant
QEIKRINKIRRRLVKDSNTKKAGKTGPMKTLLVRVMTPDLRERLENLRKKPENIPQPISNTSRANLNKLLTDYTEMKKAILHVYWEEFQKDPVGLMSRVAQPASKKIDQNKLKPEMDEKGNLTTAGFACSQCGQPLFVYKLEQVSEKGKAYTNYFGRCNVAEHEKLIKLAQLKPEKDSDEAVTYSLGKFGQRALDFYSIHVTKESTHPVKPLAQIAGNRYASPVGKALSDACMGTIASFLSKYQDIIIEHQKVVKGNQKRLESLRELAGKENLEYPSVTLPPQPHTSEGVDAYNEVIARVRMWVNLNLWQKLKLSRDDAKPLLRLKGFPSFPLVERQANEVDWWDMVCNVKKLINEKKEDGKVFWQNLAGYKRQEALRPYLSSEEDRKKGKKFARYQLGDLLLHLEKKHGEDWGKVYDEAWERIDKKVEGLSKHIKLEEERRSEDAQSKAALTDWLRAKASFVIEGLKEADKDEFCRCELKLQKWYGDLRGKPFAIEAENSILDISGFSKQYNCAFIWQKDGVKKLNLYLIINYFKGGKLRFKKIKPEAFEANRFYTVINKKSGEIVPMEVNFNFDDPNLIILPLAFGKRQGREFIWNDLLSLETGSLKLANGRVIEKTLYNRRTRQDEPALFVALTFERREVLDSSNIKPMNLIGVDRGENIPAVIALTDPEGCPLSRFKDSLGNPTHILRIGESYKEKQRTIQAKKEVEQRRAGGYSRKYASKAKNLADDMVRNTARDLLYYAVTQDAMLIFENLSRGFGRQGKRTFMAERQYTRMEDWLTAKLAYEGLPSKTYLSKTLAQYTSKTCSNCGFTITSADYDRVLEKLKKTATGWMTTINGKELKVEGQITYYNRYKRQNVVKDLSVELDRLSEESVNNDISSWTKGRSGEALSLLKKRFSHRPVQEKFVCLNCGFETHADEQAALNIARSWLFLRSQEYKKYQTNKTTGNTDKRAFVETWQSFYRKKLKEVWKPAV

SEQ ID NO: 34642 - protein, 978 aa, synthetic construct
  REGION 1..978: note = engineered CasX variant
QEIKRINKIRRRLVKDSNTKKAGKTGPMKTLLVRVMTPDLRERLENLRKKPENIPQPISNTSRANLNKLLTDYTEMKKAILHVYWEEFQKDPVGLMSRVAQPASKKIDQNKLKPEMDEKGNLTTAGFACSQCGQPLFVYKLEQVSEKGKAYTNYFGRCNVAEHEKLIKLAQLKPEKDSDEAVTYSLGKFGQRALDFYSIHVTKESTHPVKPLAQIAGNRYASYPVGKALSDACMGTIASFLSKYQDIIIEHQKVVKGNQKRLESLRELAGKENLEYPSVTLPPQPHTKEGLDAYNEVIARVRMWVNLNLWQKLKLSRDDAKPLLRLKGFPSFPLVERQANEVDWWDMVCNVKKLINEKKEDGKVFWQNLAGYKRQEALRPYLSSEEDRKKGKKFARYQLGDLLLHLEKKHGEDWGKVYDEAWERIDKKVEGLSKHIKLEEERRSEDAQSKAALTDWLRAKASFVIEGLKEADKDEFCRCELKLQKWYGDLRGKPFAIEAENSILDISGFSKQYNCAFIWQKDGVKKLNLYLIINYFKGGKLRFKKIKPEAFEANRFYTVINKKSGEIVPMEVNFNFDDPNLIILPLAFGKRQGREFIWNDLLSLETGSLKLANGRVIEKTLYNRRTRQDEPALFVALTFERREVLDSSNIKPMNLIGVDRGENIPAVIALTDPEGCPLSRFKDSLGNPTHILRIGESYKEKQRTIQAKKEVEQRRAGGYSRKYASKAKNLADDMVRNTARDLLYYAVTQDAMLIFENLSRGFGRQGKRTFMAERQYTRMEDWLTAKLAYEGLPSKTYLSKTLAQYTSKTCSNCGFTITSADYDRVLEKLKKTATGWMTTINGKELKVEGQITYYNRYKRQNVVKDLSVELDRLSEESVNNDISSWTKGRSGEALSLLKKRFSHRPVQEKFVCLNCGFETHADEQAALNIARSWLFLRSQEYKKYQTNKTTGNTDKRAFVETWQSFYRKKLKEVWKPAV

SEQ ID NO: 34643 - protein, 978 aa, synthetic construct
  REGION 1..978: note = engineered CasX variant
QEIKRINKIRRRLVKDSNTKKAGKTGPMKTLLVRVMTPDLRERLENLRKKPENIPQPISNTSRANLNKLLTDYTEMKKAILHVYWEEFQKDPVGLMSRVAQPASKKIDQNKLKPEMDEKGNLTTAGFACSQCGQPLFVYKLEQVSEKGKAYTNYFGRCNVAEHEKLIKLAQLKPEKDSDEAVTYSLGKFGQRALDFYSIHVTKESTHPVKPLAQIAGNRYASHPVGKALSDACMGTIASFLSKYQDIIIEHQKVVKGNQKRLESLRELAGKENLEYPSVTLPPQPHTKEGLDAYNEVIARVRMWVNLNLWQKLKLSRDDAKPLLRLKGFPSFPLVERQANEVDWWDMVCNVKKLINEKKEDGKVFWQNLAGYKRQEALRPYLSSEEDRKKGKKFARYQLGDLLLHLEKKHGEDWGKVYDEAWERIDKKVEGLSKHIKLEEERRSEDAQSKAALTDWLRAKASFVIEGLKEADKDEFCRCELKLQKWYGDLRGKPFAIEAENSILDISGFSKQYNCAFIWQKDGVKKLNLYLIINYFKGGKLRFKKIKPEAFEANRFYTVINKKSGEIVPMEVNFNFDDPNLIILPLAFGKRQGREFIWNDLLSLETGSLKLANGRVIEKTLYNRRTRQDEPALFVALTFERREVLDSSNIKPMNLIGVDRGENIPAVIALTDPEGCPLSRFKDSLGNPTHILRIGESYKEKQRTIQAKKEVEQRRAGGYSRKYASKAKNLADDMVRNTARDLLYYAVTQDAMLIFENLSRGFGRQGKRTFMAERQYTRMEDWLTAKLAYEGLPSKTYLSKTLAQYTSKTCSNCGFTITSADYDRVLEKLKKTATGWMTTINGKELKVEGQITYYNRYKRQNVVKDLSVELDRLSEESVNNDISSWTKGRSGEALSLLKKRFSHRPVQEKFVCLNCGFETHADEQAALNIARSWLFLRSQEYKKYQTNKTTGNTDKRAFVETWQSFYRKKLKEVWKPAV

SEQ ID NO: 34644 - protein, 978 aa, synthetic construct
  REGION 1..978: note = engineered CasX variant
QEIKRINKIRRRLVKDSNTKKAGKTGPMKTLLVRVMTPDLRERLENLRKKPENIPQPISNTSRANLNKLLTDYTEMKKAILHVYWEEFQKDPVGLMSRVAQPASKKIDQNKLKPEMDEKGNLTTAGFACSQCGQPLFVYKLEQVSEKGKAYTNYFGRCNVAEHEKLIKLAQLKPEKDSDEAVTYSLGKFGQRALDFYSIHVTKESTHPVKPLAQIAGNRYASTPVGKALSDACMGTIASFLSKYQDIIIEHQKVVKGNQKRLESLRELAGKENLEYPSVTLPPQPHTKEGLDAYNEVIARVRMWVNLNLWQKLKLSRDDAKPLLRLKGFPSFPLVERQANEVDWWDMVCNVKKLINEKKEDGKVFWQNLAGYKRQEALRPYLSSEEDRKKGKKFARYQLGDLLLHLEKKHGEDWGKVYDEAWERIDKKVEGLSKHIKLEEERRSEDAQSKAALTDWLRAKASFVIEGLKEADKDEFCRCELKLQKWYGDLRGKPFAIEAENSILDISGFSKQYNCAFIWQKDGVKKLNLYLIINYFKGGKLRFKKIKPEAFEANRFYTVINKKSGEIVPMEVNFNFDDPNLIILPLAFGKRQGREFIWNDLLSLETGSLKLANGRVIEKTLYNRRTRQDEPALFVALTFERREVLDSSNIKPMNLIGVDRGENIPAVIALTDPEGCPLSRFKDSLGNPTHILRIGESYKEKQRTIQAKKEVEQRRAGGYSRKYASKAKNLADDMVRNTARDLLYYAVTQDAMLIFENLSRGFGRQGKRTFMAERQYTRMEDWLTAKLAYEGLPSKTYLSKTLAQYTSKTCSNCGFTITSADYDRVLEKLKKTATGWMTTINGKELKVEGQITYYNRYKRQNVVKDLSVELDRLSEESVNNDISSWTKGRSGEALSLLKKRFSHRPVQEKFVCLNCGFETHADEQAALNIARSWLFLRSQEYKKYQTNKTTGNTDKRAFVETWQSFYRKKLKEVWKPAV

SEQ ID NO: 34645 - protein, 978 aa, synthetic construct
  REGION 1..978: note = engineered CasX variant
QEIKRINKIRRRLVKDSNTKKAGKTGPMKTLLVRVMTPDLRERLENLRKKPENIPQPISNTSRANLNKLLTDYTEMKKAILHVYWEEFQKDPVGLMSRVAQPASKKIDQNKLKPEMDEKGNLTTAGFACSQCGQPLFVYKLEQVSEKGKAYTNYFGRCNVAEHEKLIKLAQLKPEKDSDEAVTYSLGKFGQRALDFYSIHVTKESTHPVKPLAQIAGNRYASAPVGKALSDACMGTIASFLSKYQDIIIEHQKVVKGNQKRLESLRELAGKENLEYPSVTLPPQPHTKEGLDAYNEVIARVRMWVNLNLWQKLKLSRDDAKPLLRLKGFPSFPLVERQANEVDWWDMVCNVKKLINEKKEDGKVFWQNLAGYKRQEALRPYLSSEEDRKKGKKFARYQLGDLLLHLEKKHGEDWGKVYDEAWERIDKKVEGLSKHIKLEEERRSEDAQSKAALTDWLRAKASFVIEGLKEADKDEFCRCELKLQKWYGDLRGKPFAIEAENSILDISGFSKQYNCAFIWQKDGVKKLNLYLIINYFKGGKLRFKKIKPEAFEANRFYTVINKKSGEIVPMEVNFNFDDPNLIILPLAFGKRQGREFIWNDLLSLETGSLKLANGRVIEKTLYNRRTRQDEPALFVALTFERREVLDSSNIKPMNLIGVDRGENIPAVIALTDPEGCPLSRFKDSLGNPTHILRIGESYKEKQRTIQAKKEVEQRRAGGYSRKYASKAKNLADDMVRNTARDLLYYAVTQDAMLIFENLSRGFGRQGKRTFMAERQYTRMEDWLTAKLAYEGLPSKTYLSKTLAQYTSKTCSNCGFTITSADYDRVLEKLKKTATGWMTTINGKELKVEGQITYYNRYKRQNVVKDLSVELDRLSEESVNNDISSWTKGRSGEALSLLKKRFSHRPVQEKFVCLNCGFETHADEQAALNIARSWLFLRSQEYKKYQTNKTTGNTDKRAFVETWQSFYRKKLKEVWKPAV

SEQ ID NO: 34646 - protein, 978 aa, synthetic construct
  REGION 1..978: note = engineered CasX variant
QEIKRINKIRRRLVKDSNTKKAGKTGPMKTLLVRVMTPDLRERLENLRKKPENIPQPISNTSRANLNKLLTDYTEMKKAILHVYWEEFQKDPVGLMSRVAQPASKKIDQNKLKPEMDEKGNLTTAGFACSQCGQPLFVYKLEQVSEKGKAYTNYFGRCNVAEHEKLIKLAQLKPEKDSDEAVTYSLGKFGQRALDFYSIHVTKESTHPVKPLAQIAGNRYASVPVGKALSDACMGTIASFLSKYQDIIIEHQKVVKGNQKRLESLRELAGKENLEYPSVTLPPQPHTKEGLDAYNEVIARVRMWVNLNLWQKLKLSRDDAKPLLRLKGFPSFPLVERQANEVDWWDMVCNVKKLINEKKEDGKVFWQNLAGYKRQEALRPYLSSEEDRKKGKKFARYQLGDLLLHLEKKHGEDWGKVYDEAWERIDKKVEGLSKHIKLEEERRSEDAQSKAALTDWLRAKASFVIEGLKEADKDEFCRCELKLQKWYGDLRGKPFAIEAENSILDISGFSKQYNCAFIWQKDGVKKLNLYLIINYFKGGKLRFKKIKPEAFEANRFYTVINKKSGEIVPMEVNFNFDDPNLIILPLAFGKRQGREFIWNDLLSLETGSLKLANGRVIEKTLYNRRTRQDEPALFVALTFERREVLDSSNIKPMNLIGVDRGENIPAVIALTDPEGCPLSRFKDSLGNPTHILRIGESYKEKQRTIQAKKEVEQRRAGGYSRKYASKAKNLADDMVRNTARDLLYYAVTQDAMLIFENLSRGFGRQGKRTFMAERQYTRMEDWLTAKLAYEGLPSKTYLSKTLAQYTSKTCSNCGFTITSADYDRVLEKLKKTATGWMTTINGKELKVEGQITYYNRYKRQNVVKDLSVELDRLSEESVNNDISSWTKGRSGEALSLLKKRFSHRPVQEKFVCLNCGFETHADEQAALNIARSWLFLRSQEYKKYQTNKTTGNTDKRAFVETWQSFYRKKLKEVWKPAV

SEQ ID NO: 34647 - protein, 979 aa, synthetic construct
  REGION 1..979: note = engineered CasX variant
QEIKRINKIRRRLVKDSNTKKAGKTGPMKTLLVRVMTPDLRERLENLRKKPENIPQPISNTSRANLNKLLTDYTEMKKAILHVYWEEFQKDPVGLMSRVAQPASKKIDQNKLKPEMDEKGNLTTAGFACSQCGQPLFVYKLEQVSEKGKAYTNYFGRCNVAEHEKLIKKLAQLKPEKDSDEAVTYSLGKFGQRALDFYSIHVTKESTHPVKPLAQIAGNRYASGPVGKALSDACMGTIASFLSKYQDIIIEHQKVVKGNQKRLESLRELAGKENLEYPSVTLPPQPHTKEGLDAYNEVIARVRMWVNLNLWQKLKLSRDDAKPLLRLKGFPSFPLVERQANEVDWWDMVCNVKKLINEKKEDGKVFWQNLAGYKRQEALRPYLSSEEDRKKGKKFARYQLGDLLLHLEKKHGEDWGKVYDEAWERIDKKVEGLSKHIKLEEERRSEDAQSKAALTDWLRAKASFVIEGLKEADKDEFCRCELKLQKWYGDLRGKPFAIEAENSILDISGFSKQYNCAFIWQKDGVKKLNLYLIINYFKGGKLRFKKIKPEAFEANRFYTVINKKSGEIVPMEVNFNFDDPNLIILPLAFGKRQGREFIWNDLLSLETGSLKLANGRVIEKTLYNRRTRQDEPALFVALTFERREVLDSSNIKPMNLIGVDRGENIPAVIALTDPEGCPLSRFKDSLGNPTHILRIGESYKEKQRTIQAKKEVEQRRAGGYSRKYASKAKNLADDMVRNTARDLLYYAVTQDAMLIFENLSRGFGRQGKRTFMAERQYTRMEDWLTAKLAYEGLPSKTYLSKTLAQYTSKTCSNCGFTITSADYDRVLEKLKKTATGWMTTINGKELKVEGQITYYNRYKRQNVVKDLSVELDRLSEESVNNDISSWTKGRSGEALSLLKKRFSHRPVQEKFVCLNCGFETHADEQAALNIARSWLFLRSQEYKKYQTNKTTGNTDKRAFVETWQSFYRKKLKEVWKPAV

SEQ ID NO: 34648 - protein, 977 aa, synthetic construct
  REGION 1..977: note = engineered CasX variant
QEIKRINKIRRRLVKDSNTKKAGKTGPMKTLLVRVMTPDLRERLENLRKKPENIPQPISNTSRANLNKLLTDYTEMKKAILHVYWEEFQKDPVGLMSRVAQPASKKIDQNKLKPEMDEKGNLTTAGFACSQCGQPLFVYKLEQVSEKGKAYTNYFGRCNVAEHEKLIKLAQLKPEKDSDEAVTYSLGKFGQRALDFYSIHVTKESTHPVKPLAQIAGNRYASPVGKALSDACMGTIASFLSKYQDIIIEHQKVVKGNQKRLESLRELAGKENLEYPSVTLPPQPHTKEGLDAYNEVIARVRMWVNLNLWQKLKLSRDDAKPLLRLKGFPSFPLVERQANEVDWWDMVCNVKKLINEKKEDGKVFWQNLAGYKRQEALRPYLSSEEDRKKGKKFARYQLGDLLLHLEKKHGEDWGKVYDEAWERIDKKVEGLSKHIKLEEERRSEDAQSKAALTDWLRAKASFVIEGLKEADKDEFCRCELKLQKWYGDLRGKPFAIEAENSILDISGFSKQYNCAFIWQKDGVKKLNLYLIINYFKGGKLRFKKIKPEAFEANRFYTVINKKSGEIVPMEVNFNFDDPNLIILPLAFGKRQGREFIWNDLLSLETGSLKLANGRVIEKTLYNRRTRQDEPALFVALTFERREVLDSSNIKPMNLIGVDRGENIPAVIALTDPEGCPLSRFKDSLGNPTHILRIGESYKEKQRTIQAKKEVEQRRAGGYSRKYASKAKNLADDMVRNTARDLLYYAVTQDAMLIFENLSRGFGRQGKRTFMAERQYTRMEDWLTAKLAYEGLPSKTYLSKTLAQYTSKTCSNCGFTITSADYDRVLEKLKKTATGWMTTINGKELKVEGQITYYNRYKRQNVVKDLSVELDRLSEESVNNDISSWTKGRSGEALSLLKKRFSHRPVQEKFVCLNCGFETHADEQAALNIARSWLFLRSQEYKKYQTNKTTGNTDKRAFVETWQSFYRKKLKEVWKPAV

SEQ ID NO: 34649 - protein, 978 aa, synthetic construct
  REGION 1..978: note = engineered CasX variant
QEIKRINKIRRRLVKDSNTKKAGKTGPMKTLLVRVMTPDLRERLENLRKKPENIPQPISNTSRANLNKLLTDYTEMKKAILHVYWEEFQKDPVGLMSRVAQPASKKIDQNKLKPEMDEKGNLTTAGFACSQCGQPLFVYKLEQVSEKGKAYTNYFGRCNVAEHEKLIKLAQLKPEKDSDEAVTYSLGKFGQRALDFYSIHVTKESTHPVKPLAQIAGNRYASYPVGKALSDACMGTIASFLSKYQDIIIEHQKVVKGNQKRLESLRELAGKENLEYPSVTLPPQPHTKEGVDAYNEVIARVRTWVNLNLWQKLKLSRDDAKPLLRLKGFPSFPLVERQANEVDWWDMVCNVKKLINEKKEDGKVFWQNLAGYKRQEALRPYLSSEEDRKKGKKFARYQLGDLLLHLEKKHGEDWGKVYDEAWERIDKKVEGLSKHIKLEEERRSEDAQSKAALTDWLRAKASFVIEGLKEADKDEFCRCELKLQKWYGDLRGKPFAIEAENSILDISGFSKQYNCAFIWQKDGVKKLNLYLIINYFKGGKLRFKKIKPEAFEANRFYTVINKKSGEIVPMEVNFNFDDPNLIILPLAFGKRQGREFIWNDLLSLETGSLKLANGRVIEKTLYNRRTRQDEPALFVALTFERREVLDSSNIKPMNLIGVDRGENIPAVIALTDPEGCPLSRFKDSLGNPTHILRIGESYKEKQRTIQAKKEVEQRRAGGYSRKYASKAKNLADDMVRNTARDLLYYAVTQDAMLIFENLSRGFGRQGKRTFMAERQYTRMEDWLTAKLAYEGLPSKTYLSKTLAQYTSKTCSNCGFTITSADYDRVLEKLKKTATGWMTTINGKELKVEGQITYYNRYKRQNVVKDLSVELDRLSEESVNNDISSWTKGRSGEALSLLKKRFSHRPVQEKFVCLNCGFETHADEQAALNIARSWLFLRSQEYKKYQTNKTTGNTDKRAFVETWQSFYRKKLKEVWKPAV

SEQ ID NO: 34650 - protein, 978 aa, synthetic construct
  REGION 1..978: note = engineered CasX variant
QEIKRINKIRRRLVKDSNTKKAGKTGPMKTLLVRVMTPDLRERLENLRKKPENIPQPISNTSRANLNKLLTDYTEMKKAILHVYWEEFQKDPVGLMSRVAQPASKKIDQNKLKPEMDEKGNLTTAGFACSQCGQPLFVYKLEQVSEKGKAYTNYFGRCNVAEHEKLIKLAQLKPEKDSDEAVTYSLGKFGQRALDFYSIHVTKESTHPVKPLAQIAGNRYASHPVGKALSDACMGTIASFLSKYQDIIIEHQKVVKGNQKRLESLRELAGKENLEYPSVTLPPQPHTKEGVDAYNEVIARVRTWVNLNLWQKLKLSRDDAKPLLRLKGFPSFPLVERQANEVDWWDMVCNVKKLINEKKEDGKVFWQNLAGYKRQEALRPYLSSEEDRKKGKKFARYQLGDLLLHLEKKHGEDWGKVYDEAWERIDKKVEGLSKHIKLEEERRSEDAQSKAALTDWLRAKASFVIEGLKEADKDEFCRCELKLQKWYGDLRGKPFAIEAENSILDISGFSKQYNCAFIWQKDGVKKLNLYLIINYFKGGKLRFKKIKPEAFEANRFYTVINKKSGEIVPMEVNFNFDDPNLIILPLAFGKRQGREFIWNDLLSLETGSLKLANGRVIEKTLYNRRTRQDEPALFVALTFERREVLDSSNIKPMNLIGVDRGENIPAVIALTDPEGCPLSRFKDSLGNPTHILRIGESYKEKQRTIQAKKEVEQRRAGGYSRKYASKAKNLADDMVRNTARDLLYYAVTQDAMLIFENLSRGFGRQGKRTFMAERQYTRMEDWLTAKLAYEGLPSKTYLSKTLAQYTSKTCSNCGFTITSADYDRVLEKLKKTATGWMTTINGKELKVEGQITYYNRYKRQNVVKDLSVELDRLSEESVNNDISSWTKGRSGEALSLLKKRFSHRPVQEKFVCLNCGFETHADEQAALNIARSWLFLRSQEYKKYQTNKTTGNTDKRAFVETWQSFYRKKLKEVWKPAV

SEQ ID NO: 34651 - protein, 978 aa, synthetic construct
  REGION 1..978: note = engineered CasX variant
QEIKRINKIRRRLVKDSNTKKAGKTGPMKTLLVRVMTPDLRERLENLRKKPENIPQPISNTSRANLNKLLTDYTEMKKAILHVYWEEFQKDPVGLMSRVAQPASKKIDQNKLKPEMDEKGNLTTAGFACSQCGQPLFVYKLEQVSEKGKAYTNYFGRCNVAEHEKLIKLAQLKPEKDSDEAVTYSLGKFGQRALDFYSIHVTKESTHPVKPLAQIAGNRYASTPVGKALSDACMGTIASFLSKYQDIIIEHQKVVKGNQKRLESLRELAGKENLEYPSVTLPPQPHTKEGVDAYNEVIARVRTWVNLNLWQKLKLSRDDAKPLLRLKGFPSFPLVERQANEVDWWDMVCNVKKLINEKKEDGKVFWQNLAGYKRQEALRPYLSSEEDRKKGKKFARYQLGDLLLHLEKKHGEDWGKVYDEAWERIDKKVEGLSKHIKLEEERRSEDAQSKAALTDWLRAKASFVIEGLKEADKDEFCRCELKLQKWYGDLRGKPFAIEAENSILDISGFSKQYNCAFIWQKDGVKKLNLYLIINYFKGGKLRFKKIKPEAFEANRFYTVINKKSGEIVPMEVNFNFDDPNLIILPLAFGKRQGREFIWNDLLSLETGSLKLANGRVIEKTLYNRRTRQDEPALFVALTFERREVLDSSNIKPMNLIGVDRGENIPAVIALTDPEGCPLSRFKDSLGNPTHILRIGESYKEKQRTIQAKKEVEQRRAGGYSRKYASKAKNLADDMVRNTARDLLYYAVTQDAMLIFENLSRGFGRQGKRTFMAERQYTRMEDWLTAKLAYEGLPSKTYLSKTLAQYTSKTCSNCGFTITSADYDRVLEKLKKTATGWMTTINGKELKVEGQITYYNRYKRQNVVKDLSVELDRLSEESVNNDISSWTKGRSGEALSLLKKRFSHRPVQEKFVCLNCGFETHADEQAALNIARSWLFLRSQEYKKYQTNKTTGNTDKRAFVETWQSFYRKKLKEVWKPAV

SEQ ID NO: 34652 - protein, 978 aa, synthetic construct
  REGION 1..978: note = engineered CasX variant
QEIKRINKIRRRLVKDSNTKKAGKTGPMKTLLVRVMTPDLRERLENLRKKPENIPQPISNTSRANLNKLLTDYTEMKKAILHVYWEEFQKDPVGLMSRVAQPASKKIDQNKLKPEMDEKGNLTTAGFACSQCGQPLFVYKLEQVSEKGKAYTNYFGRCNVAEHEKLIKLAQLKPEKDSDEAVTYSLGKFGQRALDFYSIHVTKESTHPVKPLAQIAGNRYASAPVGKALSDACMGTIASFLSKYQDIIIEHQKVVKGNQKRLESLRELAGKENLEYPSVTLPPQPHTKEGVDAYNEVIARVRTWVNLNLWQKLKLSRDDAKPLLRLKGFPSFPLVERQANEVDWWDMVCNVKKLINEKKEDGKVFWQNLAGYKRQEALRPYLSSEEDRKKGKKFARYQLGDLLLHLEKKHGEDWGKVYDEAWERIDKKVEGLSKHIKLEEERRSEDAQSKAALTDWLRAKASFVIEGLKEADKDEFCRCELKLQKWYGDLRGKPFAIEAENSILDISGFSKQYNCAFIWQKDGVKKLNLYLIINYFKGGKLRFKKIKPEAFEANRFYTVINKKSGEIVPMEVNFNFDDPNLIILPLAFGKRQGREFIWNDLLSLETGSLKLANGRVIEKTLYNRRTRQDEPALFVALTFERREVLDSSNIKPMNLIGVDRGENIPAVIALTDPEGCPLSRFKDSLGNPTHILRIGESYKEKQRTIQAKKEVEQRRAGGYSRKYASKAKNLADDMVRNTARDLLYYAVTQDAMLIFENLSRGFGRQGKRTFMAERQYTRMEDWLTAKLAYEGLPSKTYLSKTLAQYTSKTCSNCGFTITSADYDRVLEKLKKTATGWMTTINGKELKVEGQITYYNRYKRQNVVKDLSVELDRLSEESVNNDISSWTKGRSGEALSLLKKRFSHRPVQEKFVCLNCGFETHADEQAALNIARSWLFLRSQEYKKYQTNKTTGNTDKRAFVETWQSFYRKKLKEVWKPAV

SEQ ID NO: 34653 - protein, 978 aa, synthetic construct
  REGION 1..978: note = engineered CasX variant
QEIKRINKIRRRLVKDSNTKKAGKTGPMKTLLVRVMTPDLRERLENLRKKPENIPQPISNTSRANLNKLLTDYTEMKKAILHVYWEEFQKDPVGLMSRVAQPASKKIDQNKLKPEMDEKGNLTTAGFACSQCGQPLFVYKLEQVSEKGKAYTNYFGRCNVAEHEKLIKLAQLKPEKDSDEAVTYSLGKFGQRALDFYSIHVTKESTHPVKPLAQIAGNRYASVPVGKALSDACMGTIASFLSKYQDIIIEHQKVVKGNQKRLESLRELAGKENLEYPSVTLPPQPHTKEGVDAYNEVIARVRTWVNLNLWQKLKLSRDDAKPLLRLKGFPSFPLVERQANEVDWWDMVCNVKKLINEKKEDGKVFWQNLAGYKRQEALRPYLSSEEDRKKGKKFARYQLGDLLLHLEKKHGEDWGKVYDEAWERIDKKVEGLSKHIKLEEERRSEDAQSKAALTDWLRAKASFVIEGLKEADKDEFCRCELKLQKWYGDLRGKPFAIEAENSILDISGFSKQYNCAFIWQKDGVKKLNLYLIINYFKGGKLRFKKIKPEAFEANRFYTVINKKSGEIVPMEVNFNFDDPNLIILPLAFGKRQGREFIWNDLLSLETGSLKLANGRVIEKTLYNRRTRQDEPALFVALTFERREVLDSSNIKPMNLIGVDRGENIPAVIALTDPEGCPLSRFKDSLGNPTHILRIGESYKEKQRTIQAKKEVEQRRAGGYSRKYASKAKNLADDMVRNTARDLLYYAVTQDAMLIFENLSRGFGRQGKRTFMAERQYTRMEDWLTAKLAYEGLPSKTYLSKTLAQYTSKTCSNCGFTITSADYDRVLEKLKKTATGWMTTINGKELKVEGQITYYNRYKRQNVVKDLSVELDRLSEESVNNDISSWTKGRSGEALSLLKKRFSHRPVQEKFVCLNCGFETHADEQAALNIARSWLFLRSQEYKKYQTNKTTGNTDKRAFVETWQSFYRKKLKEVWKPAV

SEQ ID NO: 34654 - protein, 979 aa, synthetic construct
  REGION 1..979: note = engineered CasX variant
QEIKRINKIRRRLVKDSNTKKAGKTGPMKTLLVRVMTPDLRERLENLRKKPENIPQPISNTSRANLNKLLTDYTEMKKAILHVYWEEFQKDPVGLMSRVAQPASKKIDQNKLKPEMDEKGNLTTAGFACSQCGQPLFVYKLEQVSEKGKAYTNYFGRCNVAEHEKLIKKLAQLKPEKDSDEAVTYSLGKFGQRALDFYSIHVTKESTHPVKPLAQIAGNRYASGPVGKALSDACMGTIASFLSKYQDIIIEHQKVVKGNQKRLESLRELAGKENLEYPSVTLPPQPHTKEGVDAYNEVIARVRTWVNLNLWQKLKLSRDDAKPLLRLKGFPSFPLVERQANEVDWWDMVCNVKKLINEKKEDGKVFWQNLAGYKRQEALRPYLSSEEDRKKGKKFARYQLGDLLLHLEKKHGEDWGKVYDEAWERIDKKVEGLSKHIKLEEERRSEDAQSKAALTDWLRAKASFVIEGLKEADKDEFCRCELKLQKWYGDLRGKPFAIEAENSILDISGFSKQYNCAFIWQKDGVKKLNLYLIINYFKGGKLRFKKIKPEAFEANRFYTVINKKSGEIVPMEVNFNFDDPNLIILPLAFGKRQGREFIWNDLLSLETGSLKLANGRVIEKTLYNRRTRQDEPALFVALTFERREVLDSSNIKPMNLIGVDRGENIPAVIALTDPEGCPLSRFKDSLGNPTHILRIGESYKEKQRTIQAKKEVEQRRAGGYSRKYASKAKNLADDMVRNTARDLLYYAVTQDAMLIFENLSRGFGRQGKRTFMAERQYTRMEDWLTAKLAYEGLPSKTYLSKTLAQYTSKTCSNCGFTITSADYDRVLEKLKKTATGWMTTINGKELKVEGQITYYNRYKRQNVVKDLSVELDRLSEESVNNDISSWTKGRSGEALSLLKKRFSHRPVQEKFVCLNCGFETHADEQAALNIARSWLFLRSQEYKKYQTNKTTGNTDKRAFVETWQSFYRKKLKEVWKPAV

SEQ ID NO: 34655 - protein, 977 aa, synthetic construct
  REGION 1..977: note = engineered CasX variant
QEIKRINKIRRRLVKDSNTKKAGKTGPMKTLLVRVMTPDLRERLENLRKKPENIPQPISNTSRANLNKLLTDYTEMKKAILHVYWEEFQKDPVGLMSRVAQPASKKIDQNKLKPEMDEKGNLTTAGFACSQCGQPLFVYKLEQVSEKGKAYTNYFGRCNVAEHEKLIKLAQLKPEKDSDEAVTYSLGKFGQRALDFYSIHVTKESTHPVKPLAQIAGNRYASPVGKALSDACMGTIASFLSKYQDIIIEHQKVVKGNQKRLESLRELAGKENLEYPSVTLPPQPHTKEGVDAYNEVIARVRTWVNLNLWQKLKLSRDDAKPLLRLKGFPSFPLVERQANEVDWWDMVCNVKKLINEKKEDGKVFWQNLAGYKRQEALRPYLSSEEDRKKGKKFARYQLGDLLLHLEKKHGEDWGKVYDEAWERIDKKVEGLSKHIKLEEERRSEDAQSKAALTDWLRAKASFVIEGLKEADKDEFCRCELKLQKWYGDLRGKPFAIEAENSILDISGFSKQYNCAFIWQKDGVKKLNLYLIINYFKGGKLRFKKIKPEAFEANRFYTVINKKSGEIVPMEVNFNFDDPNLIILPLAFGKRQGREFIWNDLLSLETGSLKLANGRVIEKTLYNRRTRQDEPALFVALTFERREVLDSSNIKPMNLIGVDRGENIPAVIALTDPEGCPLSRFKDSLGNPTHILRIGESYKEKQRTIQAKKEVEQRRAGGYSRKYASKAKNLADDMVRNTARDLLYYAVTQDAMLIFENLSRGFGRQGKRTFMAERQYTRMEDWLTAKLAYEGLPSKTYLSKTLAQYTSKTCSNCGFTITSADYDRVLEKLKKTATGWMTTINGKELKVEGQITYYNRYKRQNVVKDLSVELDRLSEESVNNDISSWTKGRSGEALSLLKKRFSHRPVQEKFVCLNCGFETHADEQAALNIARSWLFLRSQEYKKYQTNKTTGNTDKRAFVETWQSFYRKKLKEVWKPAV

SEQ ID NO: 34656 - protein, 978 aa, synthetic construct
  REGION 1..978: note = engineered CasX variant
QEIKRINKIRRRLVKDSNTKKAGKTGPMKTLLVRVMTPDLRERLENLRKKPENIPQPISNTSRANLNKLLTDYTEMKKAILHVYWEEFQKDPVGLMSRVAQPASKKIDQNKLKPEMDEKGNLTTAGFACSQCGQPLFVYKLEQVSEKGKAYTNYFGRCNVAEHEKLIKLAQLKPEKDSDEAVTYSLGKFGQRALDFYSIHVTKESTHPVKPLAQIAGNRYASYPVGKALSDACMGTIASFLSKYQDIIIEHQKVVKGNQKRLESLRELAGKENLEYPSVTLPPQPHTKEGVDAYNEVIARVRWWVNLNLWQKLKLSRDDAKPLLRLKGFPSFPLVERQANEVDWWDMVCNVKKLINEKKEDGKVFWQNLAGYKRQEALRPYLSSEEDRKKGKKFARYQLGDLLLHLEKKHGEDWGKVYDEAWERIDKKVEGLSKHIKLEEERRSEDAQSKAALTDWLRAKASFVIEGLKEADKDEFCRCELKLQKWYGDLRGKPFAIEAENSILDISGFSKQYNCAFIWQKDGVKKLNLYLIINYFKGGKLRFKKIKPEAFEANRFYTVINKKSGEIVPMEVNFNFDDPNLIILPLAFGKRQGREFIWNDLLSLETGSLKLANGRVIEKTLYNRRTRQDEPALFVALTFERREVLDSSNIKPMNLIGVDRGENIPAVIALTDPEGCPLSRFKDSLGNPTHILRIGESYKEKQRTIQAKKEVEQRRAGGYSRKYASKAKNLADDMVRNTARDLLYYAVTQDAMLIFENLSRGFGRQGKRTFMAERQYTRMEDWLTAKLAYEGLPSKTYLSKTLAQYTSKTCSNCGFTITSADYDRVLEKLKKTATGWMTTINGKELKVEGQITYYNRYKRQNVVKDLSVELDRLSEESVNNDISSWTKGRSGEALSLLKKRFSHRPVQEKFVCLNCGFETHADEQAALNIARSWLFLRSQEYKKYQTNKTTGNTDKRAFVETWQSFYRKKLKEVWKPAV

SEQ ID NO: 34657 - protein, 978 aa, synthetic construct
  REGION 1..978: note = engineered CasX variant
QEIKRINKIRRRLVKDSNTKKAGKTGPMKTLLVRVMTPDLRERLENLRKKPENIPQPISNTSRANLNKLLTDYTEMKKAILHVYWEEFQKDPVGLMSRVAQPASKKIDQNKLKPEMDEKGNLTTAGFACSQCGQPLFVYKLEQVSEKGKAYTNYFGRCNVAEHEKLIKLAQLKPEKDSDEAVTYSLGKFGQRALDFYSIHVTKESTHPVKPLAQIAGNRYASHPVGKALSDACMGTIASFLSKYQDIIIEHQKVVKGNQKRLESLRELAGKENLEYPSVTLPPQPHTKEGVDAYNEVIARVRWWVNLNLWQKLKLSRDDAKPLLRLKGFPSFPLVERQANEVDWWDMVCNVKKLINEKKEDGKVFWQNLAGYKRQEALRPYLSSEEDRKKGKKFARYQLGDLLLHLEKKHGEDWGKVYDEAWERIDKKVEGLSKHIKLEEERRSEDAQSKAALTDWLRAKASFVIEGLKEADKDEFCRCELKLQKWYGDLRGKPFAIEAENSILDISGFSKQYNCAFIWQKDGVKKLNLYLIINYFKGGKLRFKKIKPEAFEANRFYTVINKKSGEIVPMEVNFNFDDPNLIILPLAFGKRQGREFIWNDLLSLETGSLKLANGRVIEKTLYNRRTRQDEPALFVALTFERREVLDSSNIKPMNLIGVDRGENIPAVIALTDPEGCPLSRFKDSLGNPTHILRIGESYKEKQRTIQAKKEVEQRRAGGYSRKYASKAKNLADDMVRNTARDLLYYAVTQDAMLIFENLSRGFGRQGKRTFMAERQYTRMEDWLTAKLAYEGLPSKTYLSKTLAQYTSKTCSNCGFTITSADYDRVLEKLKKTATGWMTTINGKELKVEGQITYYNRYKRQNVVKDLSVELDRLSEESVNNDISSWTKGRSGEALSLLKKRFSHRPVQEKFVCLNCGFETHADEQAALNIARSWLFLRSQEYKKYQTNKTTGNTDKRAFVETWQSFYRKKLKEVWKPAV

SEQ ID NO: 34658 - protein, 978 aa, synthetic construct
  REGION 1..978: note = engineered CasX variant
QEIKRINKIRRRLVKDSNTKKAGKTGPMKTLLVRVMTPDLRERLENLRKKPENIPQPISNTSRANLNKLLTDYTEMKKAILHVYWEEFQKDPVGLMSRVAQPASKKIDQNKLKPEMDEKGNLTTAGFACSQCGQPLFVYKLEQVSEKGKAYTNYFGRCNVAEHEKLIKLAQLKPEKDSDEAVTYSLGKFGQRALDFYSIHVTKESTHPVKPLAQIAGNRYASTPVGKALSDACMGTIASFLSKYQDIIIEHQKVVKGNQKRLESLRELAGKENLEYPSVTLPPQPHTKEGVDAYNEVIARVRWWVNLNLWQKLKLSRDDAKPLLRLKGFPSFPLVERQANEVDWWDMVCNVKKLINEKKEDGKVFWQNLAGYKRQEALRPYLSSEEDRKKGKKFARYQLGDLLLHLEKKHGEDWGKVYDEAWERIDKKVEGLSKHIKLEEERRSEDAQSKAALTDWLRAKASFVIEGLKEADKDEFCRCELKLQKWYGDLRGKPFAIEAENSILDISGFSKQYNCAFIWQKDGVKKLNLYLIINYFKGGKLRFKKIKPEAFEANRFYTVINKKSGEIVPMEVNFNFDDPNLIILPLAFGKRQGREFIWNDLLSLETGSLKLANGRVIEKTLYNRRTRQDEPALFVALTFERREVLDSSNIKPMNLIGVDRGENIPAVIALTDPEGCPLSRFKDSLGNPTHILRIGESYKEKQRTIQAKKEVEQRRAGGYSRKYASKAKNLADDMVRNTARDLLYYAVTQDAMLIFENLSRGFGRQGKRTFMAERQYTRMEDWLTAKLAYEGLPSKTYLSKTLAQYTSKTCSNCGFTITSADYDRVLEKLKKTATGWMTTINGKELKVEGQITYYNRYKRQNVVKDLSVELDRLSEESVNNDISSWTKGRSGEALSLLKKRFSHRPVQEKFVCLNCGFETHADEQAALNIARSWLFLRSQEYKKYQTNKTTGNTDKRAFVETWQSFYRKKLKEVWKPAV

SEQ ID NO: 34659 - protein, 978 aa, synthetic construct
  REGION 1..978: note = engineered CasX variant
QEIKRINKIRRRLVKDSNTKKAGKTGPMKTLLVRVMTPDLRERLENLRKKPENIPQPISNTSRANLNKLLTDYTEMKKAILHVYWEEFQKDPVGLMSRVAQPASKKIDQNKLKPEMDEKGNLTTAGFACSQCGQPLFVYKLEQVSEKGKAYTNYFGRCNVAEHEKLIKLAQLKPEKDSDEAVTYSLGKFGQRALDFYSIHVTKESTHPVKPLAQIAGNRYASAPVGKALSDACMGTIASFLSKYQDIIIEHQKVVKGNQKRLESLRELAGKENLEYPSVTLPPQPHTKEGVDAYNEVIARVRWWVNLNLWQKLKLSRDDAKPLLRLKGFPSFPLVERQANEVDWWDMVCNVKKLINEKKEDGKVFWQNLAGYKRQEALRPYLSSEEDRKKGKKFARYQLGDLLLHLEKKHGEDWGKVYDEAWERIDKKVEGLSKHIKLEEERRSEDAQSKAALTDWLRAKASFVIEGLKEADKDEFCRCELKLQKWYGDLRGKPFAIEAENSILDISGFSKQYNCAFIWQKDGVKKLNLYLIINYFKGGKLRFKKIKPEAFEANRFYTVINKKSGEIVPMEVNFNFDDPNLIILPLAFGKRQGREFIWNDLLSLETGSLKLANGRVIEKTLYNRRTRQDEPALFVALTFERREVLDSSNIKPMNLIGVDRGENIPAVIALTDPEGCPLSRFKDSLGNPTHILRIGESYKEKQRTIQAKKEVEQRRAGGYSRKYASKAKNLADDMVRNTARDLLYYAVTQDAMLIFENLSRGFGRQGKRTFMAERQYTRMEDWLTAKLAYEGLPSKTYLSKTLAQYTSKTCSNCGFTITSADYDRVLEKLKKTATGWMTTINGKELKVEGQITYYNRYKRQNVVKDLSVELDRLSEESVNNDISSWTKGRSGEALSLLKKRFSHRPVQEKFVCLNCGFETHADEQAALNIARSWLFLRSQEYKKYQTNKTTGNTDKRAFVETWQSFYRKKLKEVWKPAV

SEQ ID NO: 34660 - protein, 978 aa, synthetic construct
  REGION 1..978: note = engineered CasX variant
QEIKRINKIRRRLVKDSNTKKAGKTGPMKTLLVRVMTPDLRERLENLRKKPENIPQPISNTSRANLNKLLTDYTEMKKAILHVYWEEFQKDPVGLMSRVAQPASKKIDQNKLKPEMDEKGNLTTAGFACSQCGQPLFVYKLEQVSEKGKAYTNYFGRCNVAEHEKLIKLAQLKPEKDSDEAVTYSLGKFGQRALDFYSIHVTKESTHPVKPLAQIAGNRYASVPVGKALSDACMGTIASFLSKYQDIIIEHQKVVKGNQKRLESLRELAGKENLEYPSVTLPPQPHTKEGVDAYNEVIARVRWWVNLNLWQKLKLSRDDAKPLLRLKGFPSFPLVERQANEVDWWDMVCNVKKLINEKKEDGKVFWQNLAGYKRQEALRPYLSSEEDRKKGKKFARYQLGDLLLHLEKKHGEDWGKVYDEAWERIDKKVEGLSKHIKLEEERRSEDAQSKAALTDWLRAKASFVIEGLKEADKDEFCRCELKLQKWYGDLRGKPFAIEAENSILDISGFSKQYNCAFIWQKDGVKKLNLYLIINYFKGGKLRFKKIKPEAFEANRFYTVINKKSGEIVPMEVNFNFDDPNLIILPLAFGKRQGREFIWNDLLSLETGSLKLANGRVIEKTLYNRRTRQDEPALFVALTFERREVLDSSNIKPMNLIGVDRGENIPAVIALTDPEGCPLSRFKDSLGNPTHILRIGESYKEKQRTIQAKKEVEQRRAGGYSRKYASKAKNLADDMVRNTARDLLYYAVTQDAMLIFENLSRGFGRQGKRTFMAERQYTRMEDWLTAKLAYEGLPSKTYLSKTLAQYTSKTCSNCGFTITSADYDRVLEKLKKTATGWMTTINGKELKVEGQITYYNRYKRQNVVKDLSVELDRLSEESVNNDISSWTKGRSGEALSLLKKRFSHRPVQEKFVCLNCGFETHADEQAALNIARSWLFLRSQEYKKYQTNKTTGNTDKRAFVETWQSFYRKKLKEVWKPAV

SEQ ID NO: 34661 - protein, 979 aa, synthetic construct
  REGION 1..979: note = engineered CasX variant
QEIKRINKIRRRLVKDSNTKKAGKTGPMKTLLVRVMTPDLRERLENLRKKPENIPQPISNTSRANLNKLLTDYTEMKKAILHVYWEEFQKDPVGLMSRVAQPASKKIDQNKLKPEMDEKGNLTTAGFACSQCGQPLFVYKLEQVSEKGKAYTNYFGRCNVAEHEKLIKKLAQLKPEKDSDEAVTYSLGKFGQRALDFYSIHVTKESTHPVKPLAQIAGNRYASGPVGKALSDACMGTIASFLSKYQDIIIEHQKVVKGNQKRLESLRELAGKENLEYPSVTLPPQPHTKEGVDAYNEVIARVRWWVNLNLWQKLKLSRDDAKPLLRLKGFPSFPLVERQANEVDWWDMVCNVKKLINEKKEDGKVFWQNLAGYKRQEALRPYLSSEEDRKKGKKFARYQLGDLLLHLEKKHGEDWGKVYDEAWERIDKKVEGLSKHIKLEEERRSEDAQSKAALTDWLRAKASFVIEGLKEADKDEFCRCELKLQKWYGDLRGKPFAIEAENSILDISGFSKQYNCAFIWQKDGVKKLNLYLIINYFKGGKLRFKKIKPEAFEANRFYTVINKKSGEIVPMEVNFNFDDPNLIILPLAFGKRQGREFIWNDLLSLETGSLKLANGRVIEKTLYNRRTRQDEPALFVALTFERREVLDSSNIKPMNLIGVDRGENIPAVIALTDPEGCPLSRFKDSLGNPTHILRIGESYKEKQRTIQAKKEVEQRRAGGYSRKYASKAKNLADDMVRNTARDLLYYAVTQDAMLIFENLSRGFGRQGKRTFMAERQYTRMEDWLTAKLAYEGLPSKTYLSKTLAQYTSKTCSNCGFTITSADYDRVLEKLKKTATGWMTTINGKELKVEGQITYYNRYKRQNVVKDLSVELDRLSEESVNNDISSWTKGRSGEALSLLKKRFSHRPVQEKFVCLNCGFETHADEQAALNIARSWLFLRSQEYKKYQTNKTTGNTDKRAFVETWQSFYRKKLKEVWKPAV

SEQ ID NO: 34662 - protein, 977 aa, synthetic construct
  REGION 1..977: note = engineered CasX variant
QEIKRINKIRRRLVKDSNTKKAGKTGPMKTLLVRVMTPDLRERLENLRKKPENIPQPISNTSRANLNKLLTDYTEMKKAILHVYWEEFQKDPVGLMSRVAQPASKKIDQNKLKPEMDEKGNLTTAGFACSQCGQPLFVYKLEQVSEKGKAYTNYFGRCNVAEHEKLIKLAQLKPEKDSDEAVTYSLGKFGQRALDFYSIHVTKESTHPVKPLAQIAGNRYASPVGKALSDACMGTIASFLSKYQDIIIEHQKVVKGNQKRLESLRELAGKENLEYPSVTLPPQPHTKEGVDAYNEVIARVRWWVNLNLWQKLKLSRDDAKPLLRLKGFPSFPLVERQANEVDWWDMVCNVKKLINEKKEDGKVFWQNLAGYKRQEALRPYLSSEEDRKKGKKFARYQLGDLLLHLEKKHGEDWGKVYDEAWERIDKKVEGLSKHIKLEEERRSEDAQSKAALTDWLRAKASFVIEGLKEADKDEFCRCELKLQKWYGDLRGKPFAIEAENSILDISGFSKQYNCAFIWQKDGVKKLNLYLIINYFKGGKLRFKKIKPEAFEANRFYTVINKKSGEIVPMEVNFNFDDPNLIILPLAFGKRQGREFIWNDLLSLETGSLKLANGRVIEKTLYNRRTRQDEPALFVALTFERREVLDSSNIKPMNLIGVDRGENIPAVIALTDPEGCPLSRFKDSLGNPTHILRIGESYKEKQRTIQAKKEVEQRRAGGYSRKYASKAKNLADDMVRNTARDLLYYAVTQDAMLIFENLSRGFGRQGKRTFMAERQYTRMEDWLTAKLAYEGLPSKTYLSKTLAQYTSKTCSNCGFTITSADYDRVLEKLKKTATGWMTTINGKELKVEGQITYYNRYKRQNVVKDLSVELDRLSEESVNNDISSWTKGRSGEALSLLKKRFSHRPVQEKFVCLNCGFETHADEQAALNIARSWLFLRSQEYKKYQTNKTTGNTDKRAFVETWQSFYRKKLKEVWKPAV

SEQ ID NO: 34663 - protein, 979 aa, synthetic construct
  REGION 1..979: note = engineered CasX variant
QEIKRINKIRRRLVKDSNTKKAGKTGPMKTLLVRVMTPDLRERLENLRKKPENIPQPISNTSRANLNKLLTDYTEMKKAILHVYWEEFQKDPVGLMSRVAQPASKKIDQNKLKPEMDEKGNLTTAGFACSQCGQPLFVYKLEQVSEKGKAYTNYFGRCNVAEHEKLIKLAQLKPEKDSDEAVTYSLGKFGQRALDFYSIHVTKESTHPVKPLAQIAGNRYASYPVGKALSDACMGTIASFLSKYQDIIIEHQKVVKGNQKRLESLRELAGKENLEYPSVTLPPQPHTKEGVDAYNEVIARVRMWVNLNLWQKLKLSRDDAKPLLRLKGFPSFPLVERQQANEVDWWDMVCNVKKLINEKKEDGKVFWQNLAGYKRQEALRPYLSSEEDRKKGKKFARYQLGDLLLHLEKKHGEDWGKVYDEAWERIDKKVEGLSKHIKLEEERRSEDAQSKAALTDWLRAKASFVIEGLKEADKDEFCRCELKLQKWYGDLRGKPFAIEAENSILDISGFSKQYNCAFIWQKDGVKKLNLYLIINYFKGGKLRFKKIKPEAFEANRFYTVINKKSGEIVPMEVNFNFDDPNLIILPLAFGKRQGREFIWNDLLSLETGSLKLANGRVIEKTLYNRRTRQDEPALFVALTFERREVLDSSNIKPMNLIGVDRGENIPAVIALTDPEGCPLSRFKDSLGNPTHILRIGESYKEKQRTIQAKKEVEQRRAGGYSRKYASKAKNLADDMVRNTARDLLYYAVTQDAMLIFENLSRGFGRQGKRTFMAERQYTRMEDWLTAKLAYEGLPSKTYLSKTLAQYTSKTCSNCGFTITSADYDRVLEKLKKTATGWMTTINGKELKVEGQITYYNRYKRQNVVKDLSVELDRLSEESVNNDISSWTKGRSGEALSLLKKRFSHRPVQEKFVCLNCGFETHADEQAALNIARSWLFLRSQEYKKYQTNKTTGNTDKRAFVETWQSFYRKKLKEVWKPAV

SEQ ID NO: 34664 - protein, 979 aa, synthetic construct
  REGION 1..979: note = engineered CasX variant
QEIKRINKIRRRLVKDSNTKKAGKTGPMKTLLVRVMTPDLRERLENLRKKPENIPQPISNTSRANLNKLLTDYTEMKKAILHVYWEEFQKDPVGLMSRVAQPASKKIDQNKLKPEMDEKGNLTTAGFACSQCGQPLFVYKLEQVSEKGKAYTNYFGRCNVAEHEKLIKLAQLKPEKDSDEAVTYSLGKFGQRALDFYSIHVTKESTHPVKPLAQIAGNRYASHPVGKALSDACMGTIASFLSKYQDIIIEHQKVVKGNQKRLESLRELAGKENLEYPSVTLPPQPHTKEGVDAYNEVIARVRMWVNLNLWQKLKLSRDDAKPLLRLKGFPSFPLVERQQANEVDWWDMVCNVKKLINEKKEDGKVFWQNLAGYKRQEALRPYLSSEEDRKKGKKFARYQLGDLLLHLEKKHGEDWGKVYDEAWERIDKKVEGLSKHIKLEEERRSEDAQSKAALTDWLRAKASFVIEGLKEADKDEFCRCELKLQKWYGDLRGKPFAIEAENSILDISGFSKQYNCAFIWQKDGVKKLNLYLIINYFKGGKLRFKKIKPEAFEANRFYTVINKKSGEIVPMEVNFNFDDPNLIILPLAFGKRQGREFIWNDLLSLETGSLKLANGRVIEKTLYNRRTRQDEPALFVALTFERREVLDSSNIKPMNLIGVDRGENIPAVIALTDPEGCPLSRFKDSLGNPTHILRIGESYKEKQRTIQAKKEVEQRRAGGYSRKYASKAKNLADDMVRNTARDLLYYAVTQDAMLIFENLSRGFGRQGKRTFMAERQYTRMEDWLTAKLAYEGLPSKTYLSKTLAQYTSKTCSNCGFTITSADYDRVLEKLKKTATGWMTTINGKELKVEGQITYYNRYKRQNVVKDLSVELDRLSEESVNNDISSWTKGRSGEALSLLKKRFSHRPVQEKFVCLNCGFETHADEQAALNIARSWLFLRSQEYKKYQTNKTTGNTDKRAFVETWQSFYRKKLKEVWKPAV

SEQ ID NO: 34665 - protein, 979 aa, synthetic construct
  REGION 1..979: note = engineered CasX variant
QEIKRINKIRRRLVKDSNTKKAGKTGPMKTLLVRVMTPDLRERLENLRKKPENIPQPISNTSRANLNKLLTDYTEMKKAILHVYWEEFQKDPVGLMSRVAQPASKKIDQNKLKPEMDEKGNLTTAGFACSQCGQPLFVYKLEQVSEKGKAYTNYFGRCNVAEHEKLIKLAQLKPEKDSDEAVTYSLGKFGQRALDFYSIHVTKESTHPVKPLAQIAGNRYASTPVGKALSDACMGTIASFLSKYQDIIIEHQKVVKGNQKRLESLRELAGKENLEYPSVTLPPQPHTKEGVDAYNEVIARVRMWVNLNLWQKLKLSRDDAKPLLRLKGFPSFPLVERQQANEVDWWDMVCNVKKLINEKKEDGKVFWQNLAGYKRQEALRPYLSSEEDRKKGKKFARYQLGDLLLHLEKKHGEDWGKVYDEAWERIDKKVEGLSKHIKLEEERRSEDAQSKAALTDWLRAKASFVIEGLKEADKDEFCRCELKLQKWYGDLRGKPFAIEAENSILDISGFSKQYNCAFIWQKDGVKKLNLYLIINYFKGGKLRFKKIKPEAFEANRFYTVINKKSGEIVPMEVNFNFDDPNLIILPLAFGKRQGREFIWNDLLSLETGSLKLANGRVIEKTLYNRRTRQDEPALFVALTFERREVLDSSNIKPMNLIGVDRGENIPAVIALTDPEGCPLSRFKDSLGNPTHILRIGESYKEKQRTIQAKKEVEQRRAGGYSRKYASKAKNLADDMVRNTARDLLYYAVTQDAMLIFENLSRGFGRQGKRTFMAERQYTRMEDWLTAKLAYEGLPSKTYLSKTLAQYTSKTCSNCGFTITSADYDRVLEKLKKTATGWMTTINGKELKVEGQITYYNRYKRQNVVKDLSVELDRLSEESVNNDISSWTKGRSGEALSLLKKRFSHRPVQEKFVCLNCGFETHADEQAALNIARSWLFLRSQEYKKYQTNKTTGNTDKRAFVETWQSFYRKKLKEVWKPAV

SEQ ID NO: 34666 - protein, 979 aa, synthetic construct
  REGION 1..979: note = engineered CasX variant
QEIKRINKIRRRLVKDSNTKKAGKTGPMKTLLVRVMTPDLRERLENLRKKPENIPQPISNTSRANLNKLLTDYTEMKKAILHVYWEEFQKDPVGLMSRVAQPASKKIDQNKLKPEMDEKGNLTTAGFACSQCGQPLFVYKLEQVSEKGKAYTNYFGRCNVAEHEKLIKLAQLKPEKDSDEAVTYSLGKFGQRALDFYSIHVTKESTHPVKPLAQIAGNRYASAPVGKALSDACMGTIASFLSKYQDIIIEHQKVVKGNQKRLESLRELAGKENLEYPSVTLPPQPHTKEGVDAYNEVIARVRMWVNLNLWQKLKLSRDDAKPLLRLKGFPSFPLVERQQANEVDWWDMVCNVKKLINEKKEDGKVFWQNLAGYKRQEALRPYLSSEEDRKKGKKFARYQLGDLLLHLEKKHGEDWGKVYDEAWERIDKKVEGLSKHIKLEEERRSEDAQSKAALTDWLRAKASFVIEGLKEADKDEFCRCELKLQKWYGDLRGKPFAIEAENSILDISGFSKQYNCAFIWQKDGVKKLNLYLIINYFKGGKLRFKKIKPEAFEANRFYTVINKKSGEIVPMEVNFNFDDPNLIILPLAFGKRQGREFIWNDLLSLETGSLKLANGRVIEKTLYNRRTRQDEPALFVALTFERREVLDSSNIKPMNLIGVDRGENIPAVIALTDPEGCPLSRFKDSLGNPTHILRIGESYKEKQRTIQAKKEVEQRRAGGYSRKYASKAKNLADDMVRNTARDLLYYAVTQDAMLIFENLSRGFGRQGKRTFMAERQYTRMEDWLTAKLAYEGLPSKTYLSKTLAQYTSKTCSNCGFTITSADYDRVLEKLKKTATGWMTTINGKELKVEGQITYYNRYKRQNVVKDLSVELDRLSEESVNNDISSWTKGRSGEALSLLKKRFSHRPVQEKFVCLNCGFETHADEQAALNIARSWLFLRSQEYKKYQTNKTTGNTDKRAFVETWQSFYRKKLKEVWKPAV

SEQ ID NO: 34667 - protein, 979 aa, synthetic construct
  REGION 1..979: note = engineered CasX variant
QEIKRINKIRRRLVKDSNTKKAGKTGPMKTLLVRVMTPDLRERLENLRKKPENIPQPISNTSRANLNKLLTDYTEMKKAILHVYWEEFQKDPVGLMSRVAQPASKKIDQNKLKPEMDEKGNLTTAGFACSQCGQPLFVYKLEQVSEKGKAYTNYFGRCNVAEHEKLIKLAQLKPEKDSDEAVTYSLGKFGQRALDFYSIHVTKESTHPVKPLAQIAGNRYASVPVGKALSDACMGTIASFLSKYQDIIIEHQKVVKGNQKRLESLRELAGKENLEYPSVTLPPQPHTKEGVDAYNEVIARVRMWVNLNLWQKLKLSRDDAKPLLRLKGFPSFPLVERQQANEVDWWDMVCNVKKLINEKKEDGKVFWQNLAGYKRQEALRPYLSSEEDRKKGKKFARYQLGDLLLHLEKKHGEDWGKVYDEAWERIDKKVEGLSKHIKLEEERRSEDAQSKAALTDWLRAKASFVIEGLKEADKDEFCRCELKLQKWYGDLRGKPFAIEAENSILDISGFSKQYNCAFIWQKDGVKKLNLYLIINYFKGGKLRFKKIKPEAFEANRFYTVINKKSGEIVPMEVNFNFDDPNLIILPLAFGKRQGREFIWNDLLSLETGSLKLANGRVIEKTLYNRRTRQDEPALFVALTFERREVLDSSNIKPMNLIGVDRGENIPAVIALTDPEGCPLSRFKDSLGNPTHILRIGESYKEKQRTIQAKKEVEQRRAGGYSRKYASKAKNLADDMVRNTARDLLYYAVTQDAMLIFENLSRGFGRQGKRTFMAERQYTRMEDWLTAKLAYEGLPSKTYLSKTLAQYTSKTCSNCGFTITSADYDRVLEKLKKTATGWMTTINGKELKVEGQITYYNRYKRQNVVKDLSVELDRLSEESVNNDISSWTKGRSGEALSLLKKRFSHRPVQEKFVCLNCGFETHADEQAALNIARSWLFLRSQEYKKYQTNKTTGNTDKRAFVETWQSFYRKKLKEVWKPAV

SEQ ID NO: 34668 - protein, 980 aa, synthetic construct
  REGION 1..980: note = engineered CasX variant
QEIKRINKIRRRLVKDSNTKKAGKTGPMKTLLVRVMTPDLRERLENLRKKPENIPQPISNTSRANLNKLLTDYTEMKKAILHVYWEEFQKDPVGLMSRVAQPASKKIDQNKLKPEMDEKGNLTTAGFACSQCGQPLFVYKLEQVSEKGKAYTNYFGRCNVAEHEKLIKKLAQLKPEKDSDEAVTYSLGKFGQRALDFYSIHVTKESTHPVKPLAQIAGNRYASGPVGKALSDACMGTIASFLSKYQDIIIEHQKVVKGNQKRLESLRELAGKENLEYPSVTLPPQPHTKEGVDAYNEVIARVRMWVNLNLWQKLKLSRDDAKPLLRLKGFPSFPLVERQQANEVDWWDMVCNVKKLINEKKEDGKVFWQNLAGYKRQEALRPYLSSEEDRKKGKKFARYQLGDLLLHLEKKHGEDWGKVYDEAWERIDKKVEGLSKHIKLEEERRSEDAQSKAALTDWLRAKASFVIEGLKEADKDEFCRCELKLQKWYGDLRGKPFAIEAENSILDISGFSKQYNCAFIWQKDGVKKLNLYLIINYFKGGKLRFKKIKPEAFEANRFYTVINKKSGEIVPMEVNFNFDDPNLIILPLAFGKRQGREFIWNDLLSLETGSLKLANGRVIEKTLYNRRTRQDEPALFVALTFERREVLDSSNIKPMNLIGVDRGENIPAVIALTDPEGCPLSRFKDSLGNPTHILRIGESYKEKQRTIQAKKEVEQRRAGGYSRKYASKAKNLADDMVRNTARDLLYYAVTQDAMLIFENLSRGFGRQGKRTFMAERQYTRMEDWLTAKLAYEGLPSKTYLSKTLAQYTSKTCSNCGFTITSADYDRVLEKLKKTATGWMTTINGKELKVEGQITYYNRYKRQNVVKDLSVELDRLSEESVNNDISSWTKGRSGEALSLLKKRFSHRPVQEKFVCLNCGFETHADEQAALNIARSWLFLRSQEYKKYQTNKTTGNTDKRAFVETWQSFYRKKLKEVWKPAV

SEQ ID NO: 34669 - protein, 978 aa, synthetic construct
  REGION 1..978: note = engineered CasX variant
QEIKRINKIRRRLVKDSNTKKAGKTGPMKTLLVRVMTPDLRERLENLRKKPENIPQPISNTSRANLNKLLTDYTEMKKAILHVYWEEFQKDPVGLMSRVAQPASKKIDQNKLKPEMDEKGNLTTAGFACSQCGQPLFVYKLEQVSEKGKAYTNYFGRCNVAEHEKLIKLAQLKPEKDSDEAVTYSLGKFGQRALDFYSIHVTKESTHPVKPLAQIAGNRYASPVGKALSDACMGTIASFLSKYQDIIIEHQKVVKGNQKRLESLRELAGKENLEYPSVTLPPQPHTKEGVDAYNEVIARVRMWVNLNLWQKLKLSRDDAKPLLRLKGFPSFPLVERQQANEVDWWDMVCNVKKLINEKKEDGKVFWQNLAGYKRQEALRPYLSSEEDRKKGKKFARYQLGDLLLHLEKKHGEDWGKVYDEAWERIDKKVEGLSKHIKLEEERRSEDAQSKAALTDWLRAKASFVIEGLKEADKDEFCRCELKLQKWYGDLRGKPFAIEAENSILDISGFSKQYNCAFIWQKDGVKKLNLYLIINYFKGGKLRFKKIKPEAFEANRFYTVINKKSGEIVPMEVNFNFDDPNLIILPLAFGKRQGREFIWNDLLSLETGSLKLANGRVIEKTLYNRRTRQDEPALFVALTFERREVLDSSNIKPMNLIGVDRGENIPAVIALTDPEGCPLSRFKDSLGNPTHILRIGESYKEKQRTIQAKKEVEQRRAGGYSRKYASKAKNLADDMVRNTARDLLYYAVTQDAMLIFENLSRGFGRQGKRTFMAERQYTRMEDWLTAKLAYEGLPSKTYLSKTLAQYTSKTCSNCGFTITSADYDRVLEKLKKTATGWMTTINGKELKVEGQITYYNRYKRQNVVKDLSVELDRLSEESVNNDISSWTKGRSGEALSLLKKRFSHRPVQEKFVCLNCGFETHADEQAALNIARSWLFLRSQEYKKYQTNKTTGNTDKRAFVETWQSFYRKKLKEVWKPAV

SEQ ID NO: 34670 - protein, 979 aa, synthetic construct
  REGION 1..979: note = engineered CasX variant
QEIKRINKIRRRLVKDSNTKKAGKTGPMKTLLVRVMTPDLRERLENLRKKPENIPQPISNTSRANLNKLLTDYTEMKKAILHVYWEEFQKDPVGLMSRVAQPASKKIDQNKLKPEMDEKGNLTTAGFACSQCGQPLFVYKLEQVSEKGKAYTNYFGRCNVAEHEKLIKLAQLKPEKDSDEAVTYSLGKFGQRALDFYSIHVTKESTHPVKPLAQIAGNRYASYPVGKALSDACMGTIASFLSKYQDIIIEHQKVVKGNQKRLESLRELAGKENLEYPSVTLPPQPHTKEGVDAYNEVIARVRMWVNLNLWQKLKLSRDDAKPLLRLKGFPSFPLVERQANAEVDWWDMVCNVKKLINEKKEDGKVFWQNLAGYKRQEALRPYLSSEEDRKKGKKFARYQLGDLLLHLEKKHGEDWGKVYDEAWERIDKKVEGLSKHIKLEEERRSEDAQSKAALTDWLRAKASFVIEGLKEADKDEFCRCELKLQKWYGDLRGKPFAIEAENSILDISGFSKQYNCAFIWQKDGVKKLNLYLIINYFKGGKLRFKKIKPEAFEANRFYTVINKKSGEIVPMEVNFNFDDPNLIILPLAFGKRQGREFIWNDLLSLETGSLKLANGRVIEKTLYNRRTRQDEPALFVALTFERREVLDSSNIKPMNLIGVDRGENIPAVIALTDPEGCPLSRFKDSLGNPTHILRIGESYKEKQRTIQAKKEVEQRRAGGYSRKYASKAKNLADDMVRNTARDLLYYAVTQDAMLIFENLSRGFGRQGKRTFMAERQYTRMEDWLTAKLAYEGLPSKTYLSKTLAQYTSKTCSNCGFTITSADYDRVLEKLKKTATGWMTTINGKELKVEGQITYYNRYKRQNVVKDLSVELDRLSEESVNNDISSWTKGRSGEALSLLKKRFSHRPVQEKFVCLNCGFETHADEQAALNIARSWLFLRSQEYKKYQTNKTTGNTDKRAFVETWQSFYRKKLKEVWKPAV

SEQ ID NO: 34671 - protein, 979 aa, synthetic construct
  REGION 1..979: note = engineered CasX variant
QEIKRINKIRRRLVKDSNTKKAGKTGPMKTLLVRVMTPDLRERLENLRKKPENIPQPISNTSRANLNKLLTDYTEMKKAILHVYWEEFQKDPVGLMSRVAQPASKKIDQNKLKPEMDEKGNLTTAGFACSQCGQPLFVYKLEQVSEKGKAYTNYFGRCNVAEHEKLIKLAQLKPEKDSDEAVTYSLGKFGQRALDFYSIHVTKESTHPVKPLAQIAGNRYASHPVGKALSDACMGTIASFLSKYQDIIIEHQKVVKGNQKRLESLRELAGKENLEYPSVTLPPQPHTKEGVDAYNEVIARVRMWVNLNLWQKLKLSRDDAKPLLRLKGFPSFPLVERQANAEVDWWDMVCNVKKLINEKKEDGKVFWQNLAGYKRQEALRPYLSSEEDRKKGKKFARYQLGDLLLHLEKKHGEDWGKVYDEAWERIDKKVEGLSKHIKLEEERRSEDAQSKAALTDWLRAKASFVIEGLKEADKDEFCRCELKLQKWYGDLRGKPFAIEAENSILDISGFSKQYNCAFIWQKDGVKKLNLYLIINYFKGGKLRFKKIKPEAFEANRFYTVINKKSGEIVPMEVNFNFDDPNLIILPLAFGKRQGREFIWNDLLSLETGSLKLANGRVIEKTLYNRRTRQDEPALFVALTFERREVLDSSNIKPMNLIGVDRGENIPAVIALTDPEGCPLSRFKDSLGNPTHILRIGESYKEKQRTIQAKKEVEQRRAGGYSRKYASKAKNLADDMVRNTARDLLYYAVTQDAMLIFENLSRGFGRQGKRTFMAERQYTRMEDWLTAKLAYEGLPSKTYLSKTLAQYTSKTCSNCGFTITSADYDRVLEKLKKTATGWMTTINGKELKVEGQITYYNRYKRQNVVKDLSVELDRLSEESVNNDISSWTKGRSGEALSLLKKRFSHRPVQEKFVCLNCGFETHADEQAALNIARSWLFLRSQEYKKYQTNKTTGNTDKRAFVETWQSFYRKKLKEVWKPAV

SEQ ID NO: 34672 - protein, 979 aa, synthetic construct
  REGION 1..979: note = engineered CasX variant
QEIKRINKIRRRLVKDSNTKKAGKTGPMKTLLVRVMTPDLRERLENLRKKPENIPQPISNTSRANLNKLLTDYTEMKKAILHVYWEEFQKDPVGLMSRVAQPASKKIDQNKLKPEMDEKGNLTTAGFACSQCGQPLFVYKLEQVSEKGKAYTNYFGRCNVAEHEKLIKLAQLKPEKDSDEAVTYSLGKFGQRALDFYSIHVTKESTHPVKPLAQIAGNRYASTPVGKALSDACMGTIASFLSKYQDIIIEHQKVVKGNQKRLESLRELAGKENLEYPSVTLPPQPHTKEGVDAYNEVIARVRMWVNLNLWQKLKLSRDDAKPLLRLKGFPSFPLVERQANAEVDWWDMVCNVKKLINEKKEDGKVFWQNLAGYKRQEALRPYLSSEEDRKKGKKFARYQLGDLLLHLEKKHGEDWGKVYDEAWERIDKKVEGLSKHIKLEEERRSEDAQSKAALTDWLRAKASFVIEGLKEADKDEFCRCELKLQKWYGDLRGKPFAIEAENSILDISGFSKQYNCAFIWQKDGVKKLNLYLIINYFKGGKLRFKKIKPEAFEANRFYTVINKKSGEIVPMEVNFNFDDPNLIILPLAFGKRQGREFIWNDLLSLETGSLKLANGRVIEKTLYNRRTRQDEPALFVALTFERREVLDSSNIKPMNLIGVDRGENIPAVIALTDPEGCPLSRFKDSLGNPTHILRIGESYKEKQRTIQAKKEVEQRRAGGYSRKYASKAKNLADDMVRNTARDLLYYAVTQDAMLIFENLSRGFGRQGKRTFMAERQYTRMEDWLTAKLAYEGLPSKTYLSKTLAQYTSKTCSNCGFTITSADYDRVLEKLKKTATGWMTTINGKELKVEGQITYYNRYKRQNVVKDLSVELDRLSEESVNNDISSWTKGRSGEALSLLKKRFSHRPVQEKFVCLNCGFETHADEQAALNIARSWLFLRSQEYKKYQTNKTTGNTDKRAFVETWQSFYRKKLKEVWKPAV

SEQ ID NO: 34673 - protein, 979 aa, synthetic construct
  REGION 1..979: note = engineered CasX variant
QEIKRINKIRRRLVKDSNTKKAGKTGPMKTLLVRVMTPDLRERLENLRKKPENIPQPISNTSRANLNKLLTDYTEMKKAILHVYWEEFQKDPVGLMSRVAQPASKKIDQNKLKPEMDEKGNLTTAGFACSQCGQPLFVYKLEQVSEKGKAYTNYFGRCNVAEHEKLIKLAQLKPEKDSDEAVTYSLGKFGQRALDFYSIHVTKESTHPVKPLAQIAGNRYASAPVGKALSDACMGTIASFLSKYQDIIIEHQKVVKGNQKRLESLRELAGKENLEYPSVTLPPQPHTKEGVDAYNEVIARVRMWVNLNLWQKLKLSRDDAKPLLRLKGFPSFPLVERQANAEVDWWDMVCNVKKLINEKKEDGKVFWQNLAGYKRQEALRPYLSSEEDRKKGKKFARYQLGDLLLHLEKKHGEDWGKVYDEAWERIDKKVEGLSKHIKLEEERRSEDAQSKAALTDWLRAKASFVIEGLKEADKDEFCRCELKLQKWYGDLRGKPFAIEAENSILDISGFSKQYNCAFIWQKDGVKKLNLYLIINYFKGGKLRFKKIKPEAFEANRFYTVINKKSGEIVPMEVNFNFDDPNLIILPLAFGKRQGREFIWNDLLSLETGSLKLANGRVIEKTLYNRRTRQDEPALFVALTFERREVLDSSNIKPMNLIGVDRGENIPAVIALTDPEGCPLSRFKDSLGNPTHILRIGESYKEKQRTIQAKKEVEQRRAGGYSRKYASKAKNLADDMVRNTARDLLYYAVTQDAMLIFENLSRGFGRQGKRTFMAERQYTRMEDWLTAKLAYEGLPSKTYLSKTLAQYTSKTCSNCGFTITSADYDRVLEKLKKTATGWMTTINGKELKVEGQITYYNRYKRQNVVKDLSVELDRLSEESVNNDISSWTKGRSGEALSLLKKRFSHRPVQEKFVCLNCGFETHADEQAALNIARSWLFLRSQEYKKYQTNKTTGNTDKRAFVETWQSFYRKKLKEVWKPAV

SEQ ID NO: 34674 - protein, 979 aa, synthetic construct
  REGION 1..979: note = engineered CasX variant
QEIKRINKIRRRLVKDSNTKKAGKTGPMKTLLVRVMTPDLRERLENLRKKPENIPQPISNTSRANLNKLLTDYTEMKKAILHVYWEEFQKDPVGLMSRVAQPASKKIDQNKLKPEMDEKGNLTTAGFACSQCGQPLFVYKLEQVSEKGKAYTNYFGRCNVAEHEKLIKLAQLKPEKDSDEAVTYSLGKFGQRALDFYSIHVTKESTHPVKPLAQIAGNRYASVPVGKALSDACMGTIASFLSKYQDIIIEHQKVVKGNQKRLESLRELAGKENLEYPSVTLPPQPHTKEGVDAYNEVIARVRMWVNLNLWQKLKLSRDDAKPLLRLKGFPSFPLVERQANAEVDWWDMVCNVKKLINEKKEDGKVFWQNLAGYKRQEALRPYLSSEEDRKKGKKFARYQLGDLLLHLEKKHGEDWGKVYDEAWERIDKKVEGLSKHIKLEEERRSEDAQSKAALTDWLRAKASFVIEGLKEADKDEFCRCELKLQKWYGDLRGKPFAIEAENSILDISGFSKQYNCAFIWQKDGVKKLNLYLIINYFKGGKLRFKKIKPEAFEANRFYTVINKKSGEIVPMEVNFNFDDPNLIILPLAFGKRQGREFIWNDLLSLETGSLKLANGRVIEKTLYNRRTRQDEPALFVALTFERREVLDSSNIKPMNLIGVDRGENIPAVIALTDPEGCPLSRFKDSLGNPTHILRIGESYKEKQRTIQAKKEVEQRRAGGYSRKYASKAKNLADDMVRNTARDLLYYAVTQDAMLIFENLSRGFGRQGKRTFMAERQYTRMEDWLTAKLAYEGLPSKTYLSKTLAQYTSKTCSNCGFTITSADYDRVLEKLKKTATGWMTTINGKELKVEGQITYYNRYKRQNVVKDLSVELDRLSEESVNNDISSWTKGRSGEALSLLKKRFSHRPVQEKFVCLNCGFETHADEQAALNIARSWLFLRSQEYKKYQTNKTTGNTDKRAFVETWQSFYRKKLKEVWKPAV

SEQ ID NO: 34675 - protein, 980 aa, synthetic construct
  REGION 1..980: note = engineered CasX variant
QEIKRINKIRRRLVKDSNTKKAGKTGPMKTLLVRVMTPDLRERLENLRKKPENIPQPISNTSRANLNKLLTDYTEMKKAILHVYWEEFQKDPVGLMSRVAQPASKKIDQNKLKPEMDEKGNLTTAGFACSQCGQPLFVYKLEQVSEKGKAYTNYFGRCNVAEHEKLIKKLAQLKPEKDSDEAVTYSLGKFGQRALDFYSIHVTKESTHPVKPLAQIAGNRYASGPVGKALSDACMGTIASFLSKYQDIIIEHQKVVKGNQKRLESLRELAGKENLEYPSVTLPPQPHTKEGVDAYNEVIARVRMWVNLNLWQKLKLSRDDAKPLLRLKGFPSFPLVERQANAEVDWWDMVCNVKKLINEKKEDGKVFWQNLAGYKRQEALRPYLSSEEDRKKGKKFARYQLGDLLLHLEKKHGEDWGKVYDEAWERIDKKVEGLSKHIKLEEERRSEDAQSKAALTDWLRAKASFVIEGLKEADKDEFCRCELKLQKWYGDLRGKPFAIEAENSILDISGFSKQYNCAFIWQKDGVKKLNLYLIINYFKGGKLRFKKIKPEAFEANRFYTVINKKSGEIVPMEVNFNFDDPNLIILPLAFGKRQGREFIWNDLLSLETGSLKLANGRVIEKTLYNRRTRQDEPALFVALTFERREVLDSSNIKPMNLIGVDRGENIPAVIALTDPEGCPLSRFKDSLGNPTHILRIGESYKEKQRTIQAKKEVEQRRAGGYSRKYASKAKNLADDMVRNTARDLLYYAVTQDAMLIFENLSRGFGRQGKRTFMAERQYTRMEDWLTAKLAYEGLPSKTYLSKTLAQYTSKTCSNCGFTITSADYDRVLEKLKKTATGWMTTINGKELKVEGQITYYNRYKRQNVVKDLSVELDRLSEESVNNDISSWTKGRSGEALSLLKKRFSHRPVQEKFVCLNCGFETHADEQAALNIARSWLFLRSQEYKKYQTNKTTGNTDKRAFVETWQSFYRKKLKEVWKPAV

SEQ ID NO: 34676 - protein, 978 aa, synthetic construct
  REGION 1..978: note = engineered CasX variant
QEIKRINKIRRRLVKDSNTKKAGKTGPMKTLLVRVMTPDLRERLENLRKKPENIPQPISNTSRANLNKLLTDYTEMKKAILHVYWEEFQKDPVGLMSRVAQPASKKIDQNKLKPEMDEKGNLTTAGFACSQCGQPLFVYKLEQVSEKGKAYTNYFGRCNVAEHEKLIKLAQLKPEKDSDEAVTYSLGKFGQRALDFYSIHVTKESTHPVKPLAQIAGNRYASPVGKALSDACMGTIASFLSKYQDIIIEHQKVVKGNQKRLESLRELAGKENLEYPSVTLPPQPHTKEGVDAYNEVIARVRMWVNLNLWQKLKLSRDDAKPLLRLKGFPSFPLVERQANAEVDWWDMVCNVKKLINEKKEDGKVFWQNLAGYKRQEALRPYLSSEEDRKKGKKFARYQLGDLLLHLEKKHGEDWGKVYDEAWERIDKKVEGLSKHIKLEEERRSEDAQSKAALTDWLRAKASFVIEGLKEADKDEFCRCELKLQKWYGDLRGKPFAIEAENSILDISGFSKQYNCAFIWQKDGVKKLNLYLIINYFKGGKLRFKKIKPEAFEANRFYTVINKKSGEIVPMEVNFNFDDPNLIILPLAFGKRQGREFIWNDLLSLETGSLKLANGRVIEKTLYNRRTRQDEPALFVALTFERREVLDSSNIKPMNLIGVDRGENIPAVIALTDPEGCPLSRFKDSLGNPTHILRIGESYKEKQRTIQAKKEVEQRRAGGYSRKYASKAKNLADDMVRNTARDLLYYAVTQDAMLIFENLSRGFGRQGKRTFMAERQYTRMEDWLTAKLAYEGLPSKTYLSKTLAQYTSKTCSNCGFTITSADYDRVLEKLKKTATGWMTTINGKELKVEGQITYYNRYKRQNVVKDLSVELDRLSEESVNNDISSWTKGRSGEALSLLKKRFSHRPVQEKFVCLNCGFETHADEQAALNIARSWLFLRSQEYKKYQTNKTTGNTDKRAFVETWQSFYRKKLKEVWKPAV

SEQ ID NO: 34677 - protein, 978 aa, synthetic construct
  REGION 1..978: note = engineered CasX variant
QEIKRINKIRRRLVKDSNTKKAGKTGPMKTLLVRVMTPDLRERLENLRKKPENIPQPISNTSRANLNKLLTDYTEMKKAILHVYWEEFQKDPVGLMSRVAQPASKKIDQNKLKPEMDEKGNLTTAGFACSQCGQPLFVYKLEQVSEKGKAYTNYFGRCNVAEHEKLIKLAQLKPEKDSDEAVTYSLGKFGQRALDFYSIHVTKESTHPVKPLAQIAGNRYASYPVGKALSDACMGTIASFLSKYQDIIIEHQKVVKGNQKRLESLRELAGKENLEYPSVTLPPQPHTKEGVDAYNEVIARVRMWVNLNLWQKLKLSRDDAKPLLRLKGFPSFPLVERQANEVDWWDMVCNVKKLINEKKEDGKVFWQNLAGYKRQEALRPYLSSEEDRKKGKKFARTQLGDLLLHLEKKHGEDWGKVYDEAWERIDKKVEGLSKHIKLEEERRSEDAQSKAALTDWLRAKASFVIEGLKEADKDEFCRCELKLQKWYGDLRGKPFAIEAENSILDISGFSKQYNCAFIWQKDGVKKLNLYLIINYFKGGKLRFKKIKPEAFEANRFYTVINKKSGEIVPMEVNFNFDDPNLIILPLAFGKRQGREFIWNDLLSLETGSLKLANGRVIEKTLYNRRTRQDEPALFVALTFERREVLDSSNIKPMNLIGVDRGENIPAVIALTDPEGCPLSRFKDSLGNPTHILRIGESYKEKQRTIQAKKEVEQRRAGGYSRKYASKAKNLADDMVRNTARDLLYYAVTQDAMLIFENLSRGFGRQGKRTFMAERQYTRMEDWLTAKLAYEGLPSKTYLSKTLAQYTSKTCSNCGFTITSADYDRVLEKLKKTATGWMTTINGKELKVEGQITYYNRYKRQNVVKDLSVELDRLSEESVNNDISSWTKGRSGEALSLLKKRFSHRPVQEKFVCLNCGFETHADEQAALNIARSWLFLRSQEYKKYQTNKTTGNTDKRAFVETWQSFYRKKLKEVWKPAV

SEQ ID NO: 34678 - protein, 978 aa, synthetic construct
  REGION 1..978: note = engineered CasX variant
QEIKRINKIRRRLVKDSNTKKAGKTGPMKTLLVRVMTPDLRERLENLRKKPENIPQPISNTSRANLNKLLTDYTEMKKAILHVYWEEFQKDPVGLMSRVAQPASKKIDQNKLKPEMDEKGNLTTAGFACSQCGQPLFVYKLEQVSEKGKAYTNYFGRCNVAEHEKLIKLAQLKPEKDSDEAVTYSLGKFGQRALDFYSIHVTKESTHPVKPLAQIAGNRYASHPVGKALSDACMGTIASFLSKYQDIIIEHQKVVKGNQKRLESLRELAGKENLEYPSVTLPPQPHTKEGVDAYNEVIARVRMWVNLNLWQKLKLSRDDAKPLLRLKGFPSFPLVERQANEVDWWDMVCNVKKLINEKKEDGKVFWQNLAGYKRQEALRPYLSSEEDRKKGKKFARTQLGDLLLHLEKKHGEDWGKVYDEAWERIDKKVEGLSKHIKLEEERRSEDAQSKAALTDWLRAKASFVIEGLKEADKDEFCRCELKLQKWYGDLRGKPFAIEAENSILDISGFSKQYNCAFIWQKDGVKKLNLYLIINYFKGGKLRFKKIKPEAFEANRFYTVINKKSGEIVPMEVNFNFDDPNLIILPLAFGKRQGREFIWNDLLSLETGSLKLANGRVIEKTLYNRRTRQDEPALFVALTFERREVLDSSNIKPMNLIGVDRGENIPAVIALTDPEGCPLSRFKDSLGNPTHILRIGESYKEKQRTIQAKKEVEQRRAGGYSRKYASKAKNLADDMVRNTARDLLYYAVTQDAMLIFENLSRGFGRQGKRTFMAERQYTRMEDWLTAKLAYEGLPSKTYLSKTLAQYTSKTCSNCGFTITSADYDRVLEKLKKTATGWMTTINGKELKVEGQITYYNRYKRQNVVKDLSVELDRLSEESVNNDISSWTKGRSGEALSLLKKRFSHRPVQEKFVCLNCGFETHADEQAALNIARSWLFLRSQEYKKYQTNKTTGNTDKRAFVETWQSFYRKKLKEVWKPAV

SEQ ID NO: 34679 - protein, 978 aa, synthetic construct
  REGION 1..978: note = engineered CasX variant
QEIKRINKIRRRLVKDSNTKKAGKTGPMKTLLVRVMTPDLRERLENLRKKPENIPQPISNTSRANLNKLLTDYTEMKKAILHVYWEEFQKDPVGLMSRVAQPASKKIDQNKLKPEMDEKGNLTTAGFACSQCGQPLFVYKLEQVSEKGKAYTNYFGRCNVAEHEKLIKLAQLKPEKDSDEAVTYSLGKFGQRALDFYSIHVTKESTHPVKPLAQIAGNRYASTPVGKALSDACMGTIASFLSKYQDIIIEHQKVVKGNQKRLESLRELAGKENLEYPSVTLPPQPHTKEGVDAYNEVIARVRMWVNLNLWQKLKLSRDDAKPLLRLKGFPSFPLVERQANEVDWWDMVCNVKKLINEKKEDGKVFWQNLAGYKRQEALRPYLSSEEDRKKGKKFARTQLGDLLLHLEKKHGEDWGKVYDEAWERIDKKVEGLSKHIKLEEERRSEDAQSKAALTDWLRAKASFVIEGLKEADKDEFCRCELKLQKWYGDLRGKPFAIEAENSILDISGFSKQYNCAFIWQKDGVKKLNLYLIINYFKGGKLRFKKIKPEAFEANRFYTVINKKSGEIVPMEVNFNFDDPNLIILPLAFGKRQGREFIWNDLLSLETGSLKLANGRVIEKTLYNRRTRQDEPALFVALTFERREVLDSSNIKPMNLIGVDRGENIPAVIALTDPEGCPLSRFKDSLGNPTHILRIGESYKEKQRTIQAKKEVEQRRAGGYSRKYASKAKNLADDMVRNTARDLLYYAVTQDAMLIFENLSRGFGRQGKRTFMAERQYTRMEDWLTAKLAYEGLPSKTYLSKTLAQYTSKTCSNCGFTITSADYDRVLEKLKKTATGWMTTINGKELKVEGQITYYNRYKRQNVVKDLSVELDRLSEESVNNDISSWTKGRSGEALSLLKKRFSHRPVQEKFVCLNCGFETHADEQAALNIARSWLFLRSQEYKKYQTNKTTGNTDKRAFVETWQSFYRKKLKEVWKPAV

SEQ ID NO: 34680 - protein, 978 aa, synthetic construct
  REGION 1..978: note = engineered CasX variant
QEIKRINKIRRRLVKDSNTKKAGKTGPMKTLLVRVMTPDLRERLENLRKKPENIPQPISNTSRANLNKLLTDYTEMKKAILHVYWEEFQKDPVGLMSRVAQPASKKIDQNKLKPEMDEKGNLTTAGFACSQCGQPLFVYKLEQVSEKGKAYTNYFGRCNVAEHEKLIKLAQLKPEKDSDEAVTYSLGKFGQRALDFYSIHVTKESTHPVKPLAQIAGNRYASAPVGKALSDACMGTIASFLSKYQDIIIEHQKVVKGNQKRLESLRELAGKENLEYPSVTLPPQPHTKEGVDAYNEVIARVRMWVNLNLWQKLKLSRDDAKPLLRLKGFPSFPLVERQANEVDWWDMVCNVKKLINEKKEDGKVFWQNLAGYKRQEALRPYLSSEEDRKKGKKFARTQLGDLLLHLEKKHGEDWGKVYDEAWERIDKKVEGLSKHIKLEEERRSEDAQSKAALTDWLRAKASFVIEGLKEADKDEFCRCELKLQKWYGDLRGKPFAIEAENSILDISGFSKQYNCAFIWQKDGVKKLNLYLIINYFKGGKLRFKKIKPEAFEANRFYTVINKKSGEIVPMEVNFNFDDPNLIILPLAFGKRQGREFIWNDLLSLETGSLKLANGRVIEKTLYNRRTRQDEPALFVALTFERREVLDSSNIKPMNLIGVDRGENIPAVIALTDPEGCPLSRFKDSLGNPTHILRIGESYKEKQRTIQAKKEVEQRRAGGYSRKYASKAKNLADDMVRNTARDLLYYAVTQDAMLIFENLSRGFGRQGKRTFMAERQYTRMEDWLTAKLAYEGLPSKTYLSKTLAQYTSKTCSNCGFTITSADYDRVLEKLKKTATGWMTTINGKELKVEGQITYYNRYKRQNVVKDLSVELDRLSEESVNNDISSWTKGRSGEALSLLKKRFSHRPVQEKFVCLNCGFETHADEQAALNIARSWLFLRSQEYKKYQTNKTTGNTDKRAFVETWQSFYRKKLKEVWKPAV

SEQ ID NO: 34681 - protein, 978 aa, synthetic construct
  REGION 1..978: note = engineered CasX variant
QEIKRINKIRRRLVKDSNTKKAGKTGPMKTLLVRVMTPDLRERLENLRKKPENIPQPISNTSRANLNKLLTDYTEMKKAILHVYWEEFQKDPVGLMSRVAQPASKKIDQNKLKPEMDEKGNLTTAGFACSQCGQPLFVYKLEQVSEKGKAYTNYFGRCNVAEHEKLIKLAQLKPEKDSDEAVTYSLGKFGQRALDFYSIHVTKESTHPVKPLAQIAGNRYASVPVGKALSDACMGTIASFLSKYQDIIIEHQKVVKGNQKRLESLRELAGKENLEYPSVTLPPQPHTKEGVDAYNEVIARVRMWVNLNLWQKLKLSRDDAKPLLRLKGFPSFPLVERQANEVDWWDMVCNVKKLINEKKEDGKVFWQNLAGYKRQEALRPYLSSEEDRKKGKKFARTQLGDLLLHLEKKHGEDWGKVYDEAWERIDKKVEGLSKHIKLEEERRSEDAQSKAALTDWLRAKASFVIEGLKEADKDEFCRCELKLQKWYGDLRGKPFAIEAENSILDISGFSKQYNCAFIWQKDGVKKLNLYLIINYFKGGKLRFKKIKPEAFEANRFYTVINKKSGEIVPMEVNFNFDDPNLIILPLAFGKRQGREFIWNDLLSLETGSLKLANGRVIEKTLYNRRTRQDEPALFVALTFERREVLDSSNIKPMNLIGVDRGENIPAVIALTDPEGCPLSRFKDSLGNPTHILRIGESYKEKQRTIQAKKEVEQRRAGGYSRKYASKAKNLADDMVRNTARDLLYYAVTQDAMLIFENLSRGFGRQGKRTFMAERQYTRMEDWLTAKLAYEGLPSKTYLSKTLAQYTSKTCSNCGFTITSADYDRVLEKLKKTATGWMTTINGKELKVEGQITYYNRYKRQNVVKDLSVELDRLSEESVNNDISSWTKGRSGEALSLLKKRFSHRPVQEKFVCLNCGFETHADEQAALNIARSWLFLRSQEYKKYQTNKTTGNTDKRAFVETWQSFYRKKLKEVWKPAV

SEQ ID NO: 34682 - protein, 979 aa, synthetic construct
  REGION 1..979: note = engineered CasX variant
QEIKRINKIRRRLVKDSNTKKAGKTGPMKTLLVRVMTPDLRERLENLRKKPENIPQPISNTSRANLNKLLTDYTEMKKAILHVYWEEFQKDPVGLMSRVAQPASKKIDQNKLKPEMDEKGNLTTAGFACSQCGQPLFVYKLEQVSEKGKAYTNYFGRCNVAEHEKLIKKLAQLKPEKDSDEAVTYSLGKFGQRALDFYSIHVTKESTHPVKPLAQIAGNRYASGPVGKALSDACMGTIASFLSKYQDIIIEHQKVVKGNQKRLESLRELAGKENLEYPSVTLPPQPHTKEGVDAYNEVIARVRMWVNLNLWQKLKLSRDDAKPLLRLKGFPSFPLVERQANEVDWWDMVCNVKKLINEKKEDGKVFWQNLAGYKRQEALRPYLSSEEDRKKGKKFARTQLGDLLLHLEKKHGEDWGKVYDEAWERIDKKVEGLSKHIKLEEERRSEDAQSKAALTDWLRAKASFVIEGLKEADKDEFCRCELKLQKWYGDLRGKPFAIEAENSILDISGFSKQYNCAFIWQKDGVKKLNLYLIINYFKGGKLRFKKIKPEAFEANRFYTVINKKSGEIVPMEVNFNFDDPNLIILPLAFGKRQGREFIWNDLLSLETGSLKLANGRVIEKTLYNRRTRQDEPALFVALTFERREVLDSSNIKPMNLIGVDRGENIPAVIALTDPEGCPLSRFKDSLGNPTHILRIGESYKEKQRTIQAKKEVEQRRAGGYSRKYASKAKNLADDMVRNTARDLLYYAVTQDAMLIFENLSRGFGRQGKRTFMAERQYTRMEDWLTAKLAYEGLPSKTYLSKTLAQYTSKTCSNCGFTITSADYDRVLEKLKKTATGWMTTINGKELKVEGQITYYNRYKRQNVVKDLSVELDRLSEESVNNDISSWTKGRSGEALSLLKKRFSHRPVQEKFVCLNCGFETHADEQAALNIARSWLFLRSQEYKKYQTNKTTGNTDKRAFVETWQSFYRKKLKEVWKPAV

SEQ ID NO: 34683 - protein, 977 aa, synthetic construct
  REGION 1..977: note = engineered CasX variant
QEIKRINKIRRRLVKDSNTKKAGKTGPMKTLLVRVMTPDLRERLENLRKKPENIPQPISNTSRANLNKLLTDYTEMKKAILHVYWEEFQKDPVGLMSRVAQPASKKIDQNKLKPEMDEKGNLTTAGFACSQCGQPLFVYKLEQVSEKGKAYTNYFGRCNVAEHEKLIKLAQLKPEKDSDEAVTYSLGKFGQRALDFYSIHVTKESTHPVKPLAQIAGNRYASPVGKALSDACMGTIASFLSKYQDIIIEHQKVVKGNQKRLESLRELAGKENLEYPSVTLPPQPHTKEGVDAYNEVIARVRMWVNLNLWQKLKLSRDDAKPLLRLKGFPSFPLVERQANEVDWWDMVCNVKKLINEKKEDGKVFWQNLAGYKRQEALRPYLSSEEDRKKGKKFARTQLGDLLLHLEKKHGEDWGKVYDEAWERIDKKVEGLSKHIKLEEERRSEDAQSKAALTDWLRAKASFVIEGLKEADKDEFCRCELKLQKWYGDLRGKPFAIEAENSILDISGFSKQYNCAFIWQKDGVKKLNLYLIINYFKGGKLRFKKIKPEAFEANRFYTVINKKSGEIVPMEVNFNFDDPNLIILPLAFGKRQGREFIWNDLLSLETGSLKLANGRVIEKTLYNRRTRQDEPALFVALTFERREVLDSSNIKPMNLIGVDRGENIPAVIALTDPEGCPLSRFKDSLGNPTHILRIGESYKEKQRTIQAKKEVEQRRAGGYSRKYASKAKNLADDMVRNTARDLLYYAVTQDAMLIFENLSRGFGRQGKRTFMAERQYTRMEDWLTAKLAYEGLPSKTYLSKTLAQYTSKTCSNCGFTITSADYDRVLEKLKKTATGWMTTINGKELKVEGQITYYNRYKRQNVVKDLSVELDRLSEESVNNDISSWTKGRSGEALSLLKKRFSHRPVQEKFVCLNCGFETHADEQAALNIARSWLFLRSQEYKKYQTNKTTGNTDKRAFVETWQSFYRKKLKEVWKPAV

SEQ ID NO: 34684 - protein, 979 aa, synthetic construct
  REGION 1..979: note = engineered CasX variant
QEIKRINKIRRRLVKDSNTKKAGKTGPMKTLLVRVMTPDLRERLENLRKKPENIPQPISNTSRANLNKLLTDYTEMKKAILHVYWEEFQKDPVGLMSRVAQPASKKIDQNKLKPEMDEKGNLTTAGFACSQCGQPLFVYKLEQVSEKGKAYTNYFGRCNVAEHEKLIKLAQLKPEKDSDEAVTYSLGKFGQRALDFYSIHVTKESTHPVKPLAQIAGNRYASYPVGKALSDACMGTIASFLSKYQDIIIEHQKVVKGNQKRLESLRELAGKENLEYPSVTLPPQPHTKEGVDAYNEVIARVRMWVNLNLWQKLKLSRDDAKPLLRLKGFPSFPLVERQANEVDWWDMVCNVKKLINEKKEDGKVFWQNLAGYKRQEALRPYLSSEEDRKKGKKFARYQLGDLLLHLEKKHEGEDWGKVYDEAWERIDKKVEGLSKHIKLEEERRSEDAQSKAALTDWLRAKASFVIEGLKEADKDEFCRCELKLQKWYGDLRGKPFAIEAENSILDISGFSKQYNCAFIWQKDGVKKLNLYLIINYFKGGKLRFKKIKPEAFEANRFYTVINKKSGEIVPMEVNFNFDDPNLIILPLAFGKRQGREFIWNDLLSLETGSLKLANGRVIEKTLYNRRTRQDEPALFVALTFERREVLDSSNIKPMNLIGVDRGENIPAVIALTDPEGCPLSRFKDSLGNPTHILRIGESYKEKQRTIQAKKEVEQRRAGGYSRKYASKAKNLADDMVRNTARDLLYYAVTQDAMLIFENLSRGFGRQGKRTFMAERQYTRMEDWLTAKLAYEGLPSKTYLSKTLAQYTSKTCSNCGFTITSADYDRVLEKLKKTATGWMTTINGKELKVEGQITYYNRYKRQNVVKDLSVELDRLSEESVNNDISSWTKGRSGEALSLLKKRFSHRPVQEKFVCLNCGFETHADEQAALNIARSWLFLRSQEYKKYQTNKTTGNTDKRAFVETWQSFYRKKLKEVWKPAV

SEQ ID NO: 34685 - protein, 979 aa, synthetic construct
  REGION 1..979: note = engineered CasX variant
QEIKRINKIRRRLVKDSNTKKAGKTGPMKTLLVRVMTPDLRERLENLRKKPENIPQPISNTSRANLNKLLTDYTEMKKAILHVYWEEFQKDPVGLMSRVAQPASKKIDQNKLKPEMDEKGNLTTAGFACSQCGQPLFVYKLEQVSEKGKAYTNYFGRCNVAEHEKLIKLAQLKPEKDSDEAVTYSLGKFGQRALDFYSIHVTKESTHPVKPLAQIAGNRYASHPVGKALSDACMGTIASFLSKYQDIIIEHQKVVKGNQKRLESLRELAGKENLEYPSVTLPPQPHTKEGVDAYNEVIARVRMWVNLNLWQKLKLSRDDAKPLLRLKGFPSFPLVERQANEVDWWDMVCNVKKLINEKKEDGKVFWQNLAGYKRQEALRPYLSSEEDRKKGKKFARYQLGDLLLHLEKKHEGEDWGKVYDEAWERIDKKVEGLSKHIKLEEERRSEDAQSKAALTDWLRAKASFVIEGLKEADKDEFCRCELKLQKWYGDLRGKPFAIEAENSILDISGFSKQYNCAFIWQKDGVKKLNLYLIINYFKGGKLRFKKIKPEAFEANRFYTVINKKSGEIVPMEVNFNFDDPNLIILPLAFGKRQGREFIWNDLLSLETGSLKLANGRVIEKTLYNRRTRQDEPALFVALTFERREVLDSSNIKPMNLIGVDRGENIPAVIALTDPEGCPLSRFKDSLGNPTHILRIGESYKEKQRTIQAKKEVEQRRAGGYSRKYASKAKNLADDMVRNTARDLLYYAVTQDAMLIFENLSRGFGRQGKRTFMAERQYTRMEDWLTAKLAYEGLPSKTYLSKTLAQYTSKTCSNCGFTITSADYDRVLEKLKKTATGWMTTINGKELKVEGQITYYNRYKRQNVVKDLSVELDRLSEESVNNDISSWTKGRSGEALSLLKKRFSHRPVQEKFVCLNCGFETHADEQAALNIARSWLFLRSQEYKKYQTNKTTGNTDKRAFVETWQSFYRKKLKEVWKPAV

SEQ ID NO: 34686 - protein, 979 aa, synthetic construct
  REGION 1..979: note = engineered CasX variant
QEIKRINKIRRRLVKDSNTKKAGKTGPMKTLLVRVMTPDLRERLENLRKKPENIPQPISNTSRANLNKLLTDYTEMKKAILHVYWEEFQKDPVGLMSRVAQPASKKIDQNKLKPEMDEKGNLTTAGFACSQCGQPLFVYKLEQVSEKGKAYTNYFGRCNVAEHEKLIKLAQLKPEKDSDEAVTYSLGKFGQRALDFYSIHVTKESTHPVKPLAQIAGNRYASTPVGKALSDACMGTIASFLSKYQDIIIEHQKVVKGNQKRLESLRELAGKENLEYPSVTLPPQPHTKEGVDAYNEVIARVRMWVNLNLWQKLKLSRDDAKPLLRLKGFPSFPLVERQANEVDWWDMVCNVKKLINEKKEDGKVFWQNLAGYKRQEALRPYLSSEEDRKKGKKFARYQLGDLLLHLEKKHEGEDWGKVYDEAWERIDKKVEGLSKHIKLEEERRSEDAQSKAALTDWLRAKASFVIEGLKEADKDEFCRCELKLQKWYGDLRGKPFAIEAENSILDISGFSKQYNCAFIWQKDGVKKLNLYLIINYFKGGKLRFKKIKPEAFEANRFYTVINKKSGEIVPMEVNFNFDDPNLIILPLAFGKRQGREFIWNDLLSLETGSLKLANGRVIEKTLYNRRTRQDEPALFVALTFERREVLDSSNIKPMNLIGVDRGENIPAVIALTDPEGCPLSRFKDSLGNPTHILRIGESYKEKQRTIQAKKEVEQRRAGGYSRKYASKAKNLADDMVRNTARDLLYYAVTQDAMLIFENLSRGFGRQGKRTFMAERQYTRMEDWLTAKLAYEGLPSKTYLSKTLAQYTSKTCSNCGFTITSADYDRVLEKLKKTATGWMTTINGKELKVEGQITYYNRYKRQNVVKDLSVELDRLSEESVNNDISSWTKGRSGEALSLLKKRFSHRPVQEKFVCLNCGFETHADEQAALNIARSWLFLRSQEYKKYQTNKTTGNTDKRAFVETWQSFYRKKLKEVWKPAV

SEQ ID NO: 34687 - protein, 979 aa, synthetic construct
  REGION 1..979: note = engineered CasX variant
QEIKRINKIRRRLVKDSNTKKAGKTGPMKTLLVRVMTPDLRERLENLRKKPENIPQPISNTSRANLNKLLTDYTEMKKAILHVYWEEFQKDPVGLMSRVAQPASKKIDQNKLKPEMDEKGNLTTAGFACSQCGQPLFVYKLEQVSEKGKAYTNYFGRCNVAEHEKLIKLAQLKPEKDSDEAVTYSLGKFGQRALDFYSIHVTKESTHPVKPLAQIAGNRYASAPVGKALSDACMGTIASFLSKYQDIIIEHQKVVKGNQKRLESLRELAGKENLEYPSVTLPPQPHTKEGVDAYNEVIARVRMWVNLNLWQKLKLSRDDAKPLLRLKGFPSFPLVERQANEVDWWDMVCNVKKLINEKKEDGKVFWQNLAGYKRQEALRPYLSSEEDRKKGKKFARYQLGDLLLHLEKKHEGEDWGKVYDEAWERIDKKVEGLSKHIKLEEERRSEDAQSKAALTDWLRAKASFVIEGLKEADKDEFCRCELKLQKWYGDLRGKPFAIEAENSILDISGFSKQYNCAFIWQKDGVKKLNLYLIINYFKGGKLRFKKIKPEAFEANRFYTVINKKSGEIVPMEVNFNFDDPNLIILPLAFGKRQGREFIWNDLLSLETGSLKLANGRVIEKTLYNRRTRQDEPALFVALTFERREVLDSSNIKPMNLIGVDRGENIPAVIALTDPEGCPLSRFKDSLGNPTHILRIGESYKEKQRTIQAKKEVEQRRAGGYSRKYASKAKNLADDMVRNTARDLLYYAVTQDAMLIFENLSRGFGRQGKRTFMAERQYTRMEDWLTAKLAYEGLPSKTYLSKTLAQYTSKTCSNCGFTITSADYDRVLEKLKKTATGWMTTINGKELKVEGQITYYNRYKRQNVVKDLSVELDRLSEESVNNDISSWTKGRSGEALSLLKKRFSHRPVQEKFVCLNCGFETHADEQAALNIARSWLFLRSQEYKKYQTNKTTGNTDKRAFVETWQSFYRKKLKEVWKPAV

SEQ ID NO: 34688 - protein, 979 aa, synthetic construct
  REGION 1..979: note = engineered CasX variant
QEIKRINKIRRRLVKDSNTKKAGKTGPMKTLLVRVMTPDLRERLENLRKKPENIPQPISNTSRANLNKLLTDYTEMKKAILHVYWEEFQKDPVGLMSRVAQPASKKIDQNKLKPEMDEKGNLTTAGFACSQCGQPLFVYKLEQVSEKGKAYTNYFGRCNVAEHEKLIKLAQLKPEKDSDEAVTYSLGKFGQRALDFYSIHVTKESTHPVKPLAQIAGNRYASVPVGKALSDACMGTIASFLSKYQDIIIEHQKVVKGNQKRLESLRELAGKENLEYPSVTLPPQPHTKEGVDAYNEVIARVRMWVNLNLWQKLKLSRDDAKPLLRLKGFPSFPLVERQANEVDWWDMVCNVKKLINEKKEDGKVFWQNLAGYKRQEALRPYLSSEEDRKKGKKFARYQLGDLLLHLEKKHEGEDWGKVYDEAWERIDKKVEGLSKHIKLEEERRSEDAQSKAALTDWLRAKASFVIEGLKEADKDEFCRCELKLQKWYGDLRGKPFAIEAENSILDISGFSKQYNCAFIWQKDGVKKLNLYLIINYFKGGKLRFKKIKPEAFEANRFYTVINKKSGEIVPMEVNFNFDDPNLIILPLAFGKRQGREFIWNDLLSLETGSLKLANGRVIEKTLYNRRTRQDEPALFVALTFERREVLDSSNIKPMNLIGVDRGENIPAVIALTDPEGCPLSRFKDSLGNPTHILRIGESYKEKQRTIQAKKEVEQRRAGGYSRKYASKAKNLADDMVRNTARDLLYYAVTQDAMLIFENLSRGFGRQGKRTFMAERQYTRMEDWLTAKLAYEGLPSKTYLSKTLAQYTSKTCSNCGFTITSADYDRVLEKLKKTATGWMTTINGKELKVEGQITYYNRYKRQNVVKDLSVELDRLSEESVNNDISSWTKGRSGEALSLLKKRFSHRPVQEKFVCLNCGFETHADEQAALNIARSWLFLRSQEYKKYQTNKTTGNTDKRAFVETWQSFYRKKLKEVWKPAV

SEQ ID NO: 34689 - protein, 980 aa, synthetic construct
  REGION 1..980: note = engineered CasX variant
QEIKRINKIRRRLVKDSNTKKAGKTGPMKTLLVRVMTPDLRERLENLRKKPENIPQPISNTSRANLNKLLTDYTEMKKAILHVYWEEFQKDPVGLMSRVAQPASKKIDQNKLKPEMDEKGNLTTAGFACSQCGQPLFVYKLEQVSEKGKAYTNYFGRCNVAEHEKLIKKLAQLKPEKDSDEAVTYSLGKFGQRALDFYSIHVTKESTHPVKPLAQIAGNRYASGPVGKALSDACMGTIASFLSKYQDIIIEHQKVVKGNQKRLESLRELAGKENLEYPSVTLPPQPHTKEGVDAYNEVIARVRMWVNLNLWQKLKLSRDDAKPLLRLKGFPSFPLVERQANEVDWWDMVCNVKKLINEKKEDGKVFWQNLAGYKRQEALRPYLSSEEDRKKGKKFARYQLGDLLLHLEKKHEGEDWGKVYDEAWERIDKKVEGLSKHIKLEEERRSEDAQSKAALTDWLRAKASFVIEGLKEADKDEFCRCELKLQKWYGDLRGKPFAIEAENSILDISGFSKQYNCAFIWQKDGVKKLNLYLIINYFKGGKLRFKKIKPEAFEANRFYTVINKKSGEIVPMEVNFNFDDPNLIILPLAFGKRQGREFIWNDLLSLETGSLKLANGRVIEKTLYNRRTRQDEPALFVALTFERREVLDSSNIKPMNLIGVDRGENIPAVIALTDPEGCPLSRFKDSLGNPTHILRIGESYKEKQRTIQAKKEVEQRRAGGYSRKYASKAKNLADDMVRNTARDLLYYAVTQDAMLIFENLSRGFGRQGKRTFMAERQYTRMEDWLTAKLAYEGLPSKTYLSKTLAQYTSKTCSNCGFTITSADYDRVLEKLKKTATGWMTTINGKELKVEGQITYYNRYKRQNVVKDLSVELDRLSEESVNNDISSWTKGRSGEALSLLKKRFSHRPVQEKFVCLNCGFETHADEQAALNIARSWLFLRSQEYKKYQTNKTTGNTDKRAFVETWQSFYRKKLKEVWKPAV

SEQ ID NO: 34690 - protein, 978 aa, synthetic construct
  REGION 1..978: note = engineered CasX variant
QEIKRINKIRRRLVKDSNTKKAGKTGPMKTLLVRVMTPDLRERLENLRKKPENIPQPISNTSRANLNKLLTDYTEMKKAILHVYWEEFQKDPVGLMSRVAQPASKKIDQNKLKPEMDEKGNLTTAGFACSQCGQPLFVYKLEQVSEKGKAYTNYFGRCNVAEHEKLIKLAQLKPEKDSDEAVTYSLGKFGQRALDFYSIHVTKESTHPVKPLAQIAGNRYASPVGKALSDACMGTIASFLSKYQDIIIEHQKVVKGNQKRLESLRELAGKENLEYPSVTLPPQPHTKEGVDAYNEVIARVRMWVNLNLWQKLKLSRDDAKPLLRLKGFPSFPLVERQANEVDWWDMVCNVKKLINEKKEDGKVFWQNLAGYKRQEALRPYLSSEEDRKKGKKFARYQLGDLLLHLEKKHEGEDWGKVYDEAWERIDKKVEGLSKHIKLEEERRSEDAQSKAALTDWLRAKASFVIEGLKEADKDEFCRCELKLQKWYGDLRGKPFAIEAENSILDISGFSKQYNCAFIWQKDGVKKLNLYLIINYFKGGKLRFKKIKPEAFEANRFYTVINKKSGEIVPMEVNFNFDDPNLIILPLAFGKRQGREFIWNDLLSLETGSLKLANGRVIEKTLYNRRTRQDEPALFVALTFERREVLDSSNIKPMNLIGVDRGENIPAVIALTDPEGCPLSRFKDSLGNPTHILRIGESYKEKQRTIQAKKEVEQRRAGGYSRKYASKAKNLADDMVRNTARDLLYYAVTQDAMLIFENLSRGFGRQGKRTFMAERQYTRMEDWLTAKLAYEGLPSKTYLSKTLAQYTSKTCSNCGFTITSADYDRVLEKLKKTATGWMTTINGKELKVEGQITYYNRYKRQNVVKDLSVELDRLSEESVNNDISSWTKGRSGEALSLLKKRFSHRPVQEKFVCLNCGFETHADEQAALNIARSWLFLRSQEYKKYQTNKTTGNTDKRAFVETWQSFYRKKLKEVWKPAV

SEQ ID NO: 34691 - protein, 978 aa, synthetic construct
  REGION 1..978: note = engineered CasX variant
QEIKRINKIRRRLVKDSNTKKAGKTGPMKTLLVRVMTPDLRERLENLRKKPENIPQPISNTSRANLNKLLTDYTEMKKAILHVYWEEFQKDPVGLMSRVAQPASKKIDQNKLKPEMDEKGNLTTAGFACSQCGQPLFVYKLEQVSEKGKAYTNYFGRCNVAEHEKLIKLAQLKPEKDSDEAVTYSLGKFGQRALDFYSIHVTKESTHPVKPLAQIAGNRYASYPVGKALSDACMGTIASFLSKYQDIIIEHQKVVKGNQKRLESLRELAGKENLEYPSVTLPPQPHTKEGVDAYNEVIARVRMWVNLNLWQKLKLSRDDAKPLLRLKGFPSFPLVERQANEVDWWDMVCNVKKLINEKKEDGKVFWQNLAGYKRQEALRPYLSSEEDRKKGKKFARYQLGDLLLHLEKKHGEDWGKVYDEAWERIDKKVEGLSKHIKLEEERRSEDAQSKAALTDWLRAKASFVIEGLKEADKDEFCRCDLKLQKWYGDLRGKPFAIEAENSILDISGFSKQYNCAFIWQKDGVKKLNLYLIINYFKGGKLRFKKIKPEAFEANRFYTVINKKSGEIVPMEVNFNFDDPNLIILPLAFGKRQGREFIWNDLLSLETGSLKLANGRVIEKTLYNRRTRQDEPALFVALTFERREVLDSSNIKPMNLIGVDRGENIPAVIALTDPEGCPLSRFKDSLGNPTHILRIGESYKEKQRTIQAKKEVEQRRAGGYSRKYASKAKNLADDMVRNTARDLLYYAVTQDAMLIFENLSRGFGRQGKRTFMAERQYTRMEDWLTAKLAYEGLPSKTYLSKTLAQYTSKTCSNCGFTITSADYDRVLEKLKKTATGWMTTINGKELKVEGQITYYNRYKRQNVVKDLSVELDRLSEESVNNDISSWTKGRSGEALSLLKKRFSHRPVQEKFVCLNCGFETHADEQAALNIARSWLFLRSQEYKKYQTNKTTGNTDKRAFVETWQSFYRKKLKEVWKPAV

SEQ ID NO: 34692 - protein, 978 aa, synthetic construct
  REGION 1..978: note = engineered CasX variant
QEIKRINKIRRRLVKDSNTKKAGKTGPMKTLLVRVMTPDLRERLENLRKKPENIPQPISNTSRANLNKLLTDYTEMKKAILHVYWEEFQKDPVGLMSRVAQPASKKIDQNKLKPEMDEKGNLTTAGFACSQCGQPLFVYKLEQVSEKGKAYTNYFGRCNVAEHEKLIKLAQLKPEKDSDEAVTYSLGKFGQRALDFYSIHVTKESTHPVKPLAQIAGNRYASHPVGKALSDACMGTIASFLSKYQDIIIEHQKVVKGNQKRLESLRELAGKENLEYPSVTLPPQPHTKEGVDAYNEVIARVRMWVNLNLWQKLKLSRDDAKPLLRLKGFPSFPLVERQANEVDWWDMVCNVKKLINEKKEDGKVFWQNLAGYKRQEALRPYLSSEEDRKKGKKFARYQLGDLLLHLEKKHGEDWGKVYDEAWERIDKKVEGLSKHIKLEEERRSEDAQSKAALTDWLRAKASFVIEGLKEADKDEFCRCDLKLQKWYGDLRGKPFAIEAENSILDISGFSKQYNCAFIWQKDGVKKLNLYLIINYFKGGKLRFKKIKPEAFEANRFYTVINKKSGEIVPMEVNFNFDDPNLIILPLAFGKRQGREFIWNDLLSLETGSLKLANGRVIEKTLYNRRTRQDEPALFVALTFERREVLDSSNIKPMNLIGVDRGENIPAVIALTDPEGCPLSRFKDSLGNPTHILRIGESYKEKQRTIQAKKEVEQRRAGGYSRKYASKAKNLADDMVRNTARDLLYYAVTQDAMLIFENLSRGFGRQGKRTFMAERQYTRMEDWLTAKLAYEGLPSKTYLSKTLAQYTSKTCSNCGFTITSADYDRVLEKLKKTATGWMTTINGKELKVEGQITYYNRYKRQNVVKDLSVELDRLSEESVNNDISSWTKGRSGEALSLLKKRFSHRPVQEKFVCLNCGFETHADEQAALNIARSWLFLRSQEYKKYQTNKTTGNTDKRAFVETWQSFYRKKLKEVWKPAV

SEQ ID NO: 34693 - protein, 978 aa, synthetic construct
  REGION 1..978: note = engineered CasX variant
QEIKRINKIRRRLVKDSNTKKAGKTGPMKTLLVRVMTPDLRERLENLRKKPENIPQPISNTSRANLNKLLTDYTEMKKAILHVYWEEFQKDPVGLMSRVAQPASKKIDQNKLKPEMDEKGNLTTAGFACSQCGQPLFVYKLEQVSEKGKAYTNYFGRCNVAEHEKLIKLAQLKPEKDSDEAVTYSLGKFGQRALDFYSIHVTKESTHPVKPLAQIAGNRYASTPVGKALSDACMGTIASFLSKYQDIIIEHQKVVKGNQKRLESLRELAGKENLEYPSVTLPPQPHTKEGVDAYNEVIARVRMWVNLNLWQKLKLSRDDAKPLLRLKGFPSFPLVERQANEVDWWDMVCNVKKLINEKKEDGKVFWQNLAGYKRQEALRPYLSSEEDRKKGKKFARYQLGDLLLHLEKKHGEDWGKVYDEAWERIDKKVEGLSKHIKLEEERRSEDAQSKAALTDWLRAKASFVIEGLKEADKDEFCRCDLKLQKWYGDLRGKPFAIEAENSILDISGFSKQYNCAFIWQKDGVKKLNLYLIINYFKGGKLRFKKIKPEAFEANRFYTVINKKSGEIVPMEVNFNFDDPNLIILPLAFGKRQGREFIWNDLLSLETGSLKLANGRVIEKTLYNRRTRQDEPALFVALTFERREVLDSSNIKPMNLIGVDRGENIPAVIALTDPEGCPLSRFKDSLGNPTHILRIGESYKEKQRTIQAKKEVEQRRAGGYSRKYASKAKNLADDMVRNTARDLLYYAVTQDAMLIFENLSRGFGRQGKRTFMAERQYTRMEDWLTAKLAYEGLPSKTYLSKTLAQYTSKTCSNCGFTITSADYDRVLEKLKKTATGWMTTINGKELKVEGQITYYNRYKRQNVVKDLSVELDRLSEESVNNDISSWTKGRSGEALSLLKKRFSHRPVQEKFVCLNCGFETHADEQAALNIARSWLFLRSQEYKKYQTNKTTGNTDKRAFVETWQSFYRKKLKEVWKPAV

SEQ ID NO: 34694 - protein, 978 aa, synthetic construct
  REGION 1..978: note = engineered CasX variant
QEIKRINKIRRRLVKDSNTKKAGKTGPMKTLLVRVMTPDLRERLENLRKKPENIPQPISNTSRANLNKLLTDYTEMKKAILHVYWEEFQKDPVGLMSRVAQPASKKIDQNKLKPEMDEKGNLTTAGFACSQCGQPLFVYKLEQVSEKGKAYTNYFGRCNVAEHEKLIKLAQLKPEKDSDEAVTYSLGKFGQRALDFYSIHVTKESTHPVKPLAQIAGNRYASAPVGKALSDACMGTIASFLSKYQDIIIEHQKVVKGNQKRLESLRELAGKENLEYPSVTLPPQPHTKEGVDAYNEVIARVRMWVNLNLWQKLKLSRDDAKPLLRLKGFPSFPLVERQANEVDWWDMVCNVKKLINEKKEDGKVFWQNLAGYKRQEALRPYLSSEEDRKKGKKFARYQLGDLLLHLEKKHGEDWGKVYDEAWERIDKKVEGLSKHIKLEEERRSEDAQSKAALTDWLRAKASFVIEGLKEADKDEFCRCDLKLQKWYGDLRGKPFAIEAENSILDISGFSKQYNCAFIWQKDGVKKLNLYLIINYFKGGKLRFKKIKPEAFEANRFYTVINKKSGEIVPMEVNFNFDDPNLIILPLAFGKRQGREFIWNDLLSLETGSLKLANGRVIEKTLYNRRTRQDEPALFVALTFERREVLDSSNIKPMNLIGVDRGENIPAVIALTDPEGCPLSRFKDSLGNPTHILRIGESYKEKQRTIQAKKEVEQRRAGGYSRKYASKAKNLADDMVRNTARDLLYYAVTQDAMLIFENLSRGFGRQGKRTFMAERQYTRMEDWLTAKLAYEGLPSKTYLSKTLAQYTSKTCSNCGFTITSADYDRVLEKLKKTATGWMTTINGKELKVEGQITYYNRYKRQNVVKDLSVELDRLSEESVNNDISSWTKGRSGEALSLLKKRFSHRPVQEKFVCLNCGFETHADEQAALNIARSWLFLRSQEYKKYQTNKTTGNTDKRAFVETWQSFYRKKLKEVWKPAV

SEQ ID NO: 34695 - protein, 978 aa, synthetic construct
  REGION 1..978: note = engineered CasX variant
QEIKRINKIRRRLVKDSNTKKAGKTGPMKTLLVRVMTPDLRERLENLRKKPENIPQPISNTSRANLNKLLTDYTEMKKAILHVYWEEFQKDPVGLMSRVAQPASKKIDQNKLKPEMDEKGNLTTAGFACSQCGQPLFVYKLEQVSEKGKAYTNYFGRCNVAEHEKLIKLAQLKPEKDSDEAVTYSLGKFGQRALDFYSIHVTKESTHPVKPLAQIAGNRYASVPVGKALSDACMGTIASFLSKYQDIIIEHQKVVKGNQKRLESLRELAGKENLEYPSVTLPPQPHTKEGVDAYNEVIARVRMWVNLNLWQKLKLSRDDAKPLLRLKGFPSFPLVERQANEVDWWDMVCNVKKLINEKKEDGKVFWQNLAGYKRQEALRPYLSSEEDRKKGKKFARYQLGDLLLHLEKKHGEDWGKVYDEAWERIDKKVEGLSKHIKLEEERRSEDAQSKAALTDWLRAKASFVIEGLKEADKDEFCRCDLKLQKWYGDLRGKPFAIEAENSILDISGFSKQYNCAFIWQKDGVKKLNLYLIINYFKGGKLRFKKIKPEAFEANRFYTVINKKSGEIVPMEVNFNFDDPNLIILPLAFGKRQGREFIWNDLLSLETGSLKLANGRVIEKTLYNRRTRQDEPALFVALTFERREVLDSSNIKPMNLIGVDRGENIPAVIALTDPEGCPLSRFKDSLGNPTHILRIGESYKEKQRTIQAKKEVEQRRAGGYSRKYASKAKNLADDMVRNTARDLLYYAVTQDAMLIFENLSRGFGRQGKRTFMAERQYTRMEDWLTAKLAYEGLPSKTYLSKTLAQYTSKTCSNCGFTITSADYDRVLEKLKKTATGWMTTINGKELKVEGQITYYNRYKRQNVVKDLSVELDRLSEESVNNDISSWTKGRSGEALSLLKKRFSHRPVQEKFVCLNCGFETHADEQAALNIARSWLFLRSQEYKKYQTNKTTGNTDKRAFVETWQSFYRKKLKEVWKPAV

SEQ ID NO: 34696 - protein, 979 aa, synthetic construct
  REGION 1..979: note = engineered CasX variant
QEIKRINKIRRRLVKDSNTKKAGKTGPMKTLLVRVMTPDLRERLENLRKKPENIPQPISNTSRANLNKLLTDYTEMKKAILHVYWEEFQKDPVGLMSRVAQPASKKIDQNKLKPEMDEKGNLTTAGFACSQCGQPLFVYKLEQVSEKGKAYTNYFGRCNVAEHEKLIKKLAQLKPEKDSDEAVTYSLGKFGQRALDFYSIHVTKESTHPVKPLAQIAGNRYASGPVGKALSDACMGTIASFLSKYQDIIIEHQKVVKGNQKRLESLRELAGKENLEYPSVTLPPQPHTKEGVDAYNEVIARVRMWVNLNLWQKLKLSRDDAKPLLRLKGFPSFPLVERQANEVDWWDMVCNVKKLINEKKEDGKVFWQNLAGYKRQEALRPYLSSEEDRKKGKKFARYQLGDLLLHLEKKHGEDWGKVYDEAWERIDKKVEGLSKHIKLEEERRSEDAQSKAALTDWLRAKASFVIEGLKEADKDEFCRCDLKLQKWYGDLRGKPFAIEAENSILDISGFSKQYNCAFIWQKDGVKKLNLYLIINYFKGGKLRFKKIKPEAFEANRFYTVINKKSGEIVPMEVNFNFDDPNLIILPLAFGKRQGREFIWNDLLSLETGSLKLANGRVIEKTLYNRRTRQDEPALFVALTFERREVLDSSNIKPMNLIGVDRGENIPAVIALTDPEGCPLSRFKDSLGNPTHILRIGESYKEKQRTIQAKKEVEQRRAGGYSRKYASKAKNLADDMVRNTARDLLYYAVTQDAMLIFENLSRGFGRQGKRTFMAERQYTRMEDWLTAKLAYEGLPSKTYLSKTLAQYTSKTCSNCGFTITSADYDRVLEKLKKTATGWMTTINGKELKVEGQITYYNRYKRQNVVKDLSVELDRLSEESVNNDISSWTKGRSGEALSLLKKRFSHRPVQEKFVCLNCGFETHADEQAALNIARSWLFLRSQEYKKYQTNKTTGNTDKRAFVETWQSFYRKKLKEVWKPAV

SEQ ID NO: 34697 - protein, 977 aa, synthetic construct
  REGION 1..977: note = engineered CasX variant
QEIKRINKIRRRLVKDSNTKKAGKTGPMKTLLVRVMTPDLRERLENLRKKPENIPQPISNTSRANLNKLLTDYTEMKKAILHVYWEEFQKDPVGLMSRVAQPASKKIDQNKLKPEMDEKGNLTTAGFACSQCGQPLFVYKLEQVSEKGKAYTNYFGRCNVAEHEKLIKLAQLKPEKDSDEAVTYSLGKFGQRALDFYSIHVTKESTHPVKPLAQIAGNRYASPVGKALSDACMGTIASFLSKYQDIIIEHQKVVKGNQKRLESLRELAGKENLEYPSVTLPPQPHTKEGVDAYNEVIARVRMWVNLNLWQKLKLSRDDAKPLLRLKGFPSFPLVERQANEVDWWDMVCNVKKLINEKKEDGKVFWQNLAGYKRQEALRPYLSSEEDRKKGKKFARYQLGDLLLHLEKKHGEDWGKVYDEAWERIDKKVEGLSKHIKLEEERRSEDAQSKAALTDWLRAKASFVIEGLKEADKDEFCRCDLKLQKWYGDLRGKPFAIEAENSILDISGFSKQYNCAFIWQKDGVKKLNLYLIINYFKGGKLRFKKIKPEAFEANRFYTVINKKSGEIVPMEVNFNFDDPNLIILPLAFGKRQGREFIWNDLLSLETGSLKLANGRVIEKTLYNRRTRQDEPALFVALTFERREVLDSSNIKPMNLIGVDRGENIPAVIALTDPEGCPLSRFKDSLGNPTHILRIGESYKEKQRTIQAKKEVEQRRAGGYSRKYASKAKNLADDMVRNTARDLLYYAVTQDAMLIFENLSRGFGRQGKRTFMAERQYTRMEDWLTAKLAYEGLPSKTYLSKTLAQYTSKTCSNCGFTITSADYDRVLEKLKKTATGWMTTINGKELKVEGQITYYNRYKRQNVVKDLSVELDRLSEESVNNDISSWTKGRSGEALSLLKKRFSHRPVQEKFVCLNCGFETHADEQAALNIARSWLFLRSQEYKKYQTNKTTGNTDKRAFVETWQSFYRKKLKEVWKPAV

SEQ ID NO: 34698 - protein, 978 aa, synthetic construct
  REGION 1..978: note = engineered CasX variant
QEIKRINKIRRRLVKDSNTKKAGKTGPMKTLLVRVMTPDLRERLENLRKKPENIPQPISNTSRANLNKLLTDYTEMKKAILHVYWEEFQKDPVGLMSRVAQPASKKIDQNKLKPEMDEKGNLTTAGFACSQCGQPLFVYKLEQVSEKGKAYTNYFGRCNVAEHEKLIKLAQLKPEKDSDEAVTYSLGKFGQRALDFYSIHVTKESTHPVKPLAQIAGNRYASYPVGKALSDACMGTIASFLSKYQDIIIEHQKVVKGNQKRLESLRELAGKENLEYPSVTLPPQPHTKEGVDAYNEVIARVRMWVNLNLWQKLKLSRDDAKPLLRLKGFPSFPLVERQANEVDWWDMVCNVKKLINEKKEDGKVFWQNLAGYKRQEALRPYLSSEEDRKKGKKFARYQLGDLLLHLEKKHGEDWGKVYDEAWERIDKKVEGLSKHIKLEEERRSEDAQSKAALTDWLRAKASFVIEGLKEADKDEFCRCELKLQKWYGDLRGKPFAIEAENSILDISGFSKQYNCAFIWQKDGVKKLNLYLIINYFKGGKLRFKKIKPEAFEANRFYTVINKKSGEIVPMEVNFNFDDPNLIILPLAFGKRFGREFIWNDLLSLETGSLKLANGRVIEKTLYNRRTRQDEPALFVALTFERREVLDSSNIKPMNLIGVDRGENIPAVIALTDPEGCPLSRFKDSLGNPTHILRIGESYKEKQRTIQAKKEVEQRRAGGYSRKYASKAKNLADDMVRNTARDLLYYAVTQDAMLIFENLSRGFGRQGKRTFMAERQYTRMEDWLTAKLAYEGLPSKTYLSKTLAQYTSKTCSNCGFTITSADYDRVLEKLKKTATGWMTTINGKELKVEGQITYYNRYKRQNVVKDLSVELDRLSEESVNNDISSWTKGRSGEALSLLKKRFSHRPVQEKFVCLNCGFETHADEQAALNIARSWLFLRSQEYKKYQTNKTTGNTDKRAFVETWQSFYRKKLKEVWKPAV

SEQ ID NO: 34699 - protein, 978 aa, synthetic construct
  REGION 1..978: note = engineered CasX variant
QEIKRINKIRRRLVKDSNTKKAGKTGPMKTLLVRVMTPDLRERLENLRKKPENIPQPISNTSRANLNKLLTDYTEMKKAILHVYWEEFQKDPVGLMSRVAQPASKKIDQNKLKPEMDEKGNLTTAGFACSQCGQPLFVYKLEQVSEKGKAYTNYFGRCNVAEHEKLIKLAQLKPEKDSDEAVTYSLGKFGQRALDFYSIHVTKESTHPVKPLAQIAGNRYASHPVGKALSDACMGTIASFLSKYQDIIIEHQKVVKGNQKRLESLRELAGKENLEYPSVTLPPQPHTKEGVDAYNEVIARVRMWVNLNLWQKLKLSRDDAKPLLRLKGFPSFPLVERQANEVDWWDMVCNVKKLINEKKEDGKVFWQNLAGYKRQEALRPYLSSEEDRKKGKKFARYQLGDLLLHLEKKHGEDWGKVYDEAWERIDKKVEGLSKHIKLEEERRSEDAQSKAALTDWLRAKASFVIEGLKEADKDEFCRCELKLQKWYGDLRGKPFAIEAENSILDISGFSKQYNCAFIWQKDGVKKLNLYLIINYFKGGKLRFKKIKPEAFEANRFYTVINKKSGEIVPMEVNFNFDDPNLIILPLAFGKRFGREFIWNDLLSLETGSLKLANGRVIEKTLYNRRTRQDEPALFVALTFERREVLDSSNIKPMNLIGVDRGENIPAVIALTDPEGCPLSRFKDSLGNPTHILRIGESYKEKQRTIQAKKEVEQRRAGGYSRKYASKAKNLADDMVRNTARDLLYYAVTQDAMLIFENLSRGFGRQGKRTFMAERQYTRMEDWLTAKLAYEGLPSKTYLSKTLAQYTSKTCSNCGFTITSADYDRVLEKLKKTATGWMTTINGKELKVEGQITYYNRYKRQNVVKDLSVELDRLSEESVNNDISSWTKGRSGEALSLLKKRFSHRPVQEKFVCLNCGFETHADEQAALNIARSWLFLRSQEYKKYQTNKTTGNTDKRAFVETWQSFYRKKLKEVWKPAV

SEQ ID NO: 34700 - protein, 978 aa, synthetic construct
  REGION 1..978: note = engineered CasX variant
QEIKRINKIRRRLVKDSNTKKAGKTGPMKTLLVRVMTPDLRERLENLRKKPENIPQPISNTSRANLNKLLTDYTEMKKAILHVYWEEFQKDPVGLMSRVAQPASKKIDQNKLKPEMDEKGNLTTAGFACSQCGQPLFVYKLEQVSEKGKAYTNYFGRCNVAEHEKLIKLAQLKPEKDSDEAVTYSLGKFGQRALDFYSIHVTKESTHPVKPLAQIAGNRYASTPVGKALSDACMGTIASFLSKYQDIIIEHQKVVKGNQKRLESLRELAGKENLEYPSVTLPPQPHTKEGVDAYNEVIARVRMWVNLNLWQKLKLSRDDAKPLLRLKGFPSFPLVERQANEVDWWDMVCNVKKLINEKKEDGKVFWQNLAGYKRQEALRPYLSSEEDRKKGKKFARYQLGDLLLHLEKKHGEDWGKVYDEAWERIDKKVEGLSKHIKLEEERRSEDAQSKAALTDWLRAKASFVIEGLKEADKDEFCRCELKLQKWYGDLRGKPFAIEAENSILDISGFSKQYNCAFIWQKDGVKKLNLYLIINYFKGGKLRFKKIKPEAFEANRFYTVINKKSGEIVPMEVNFNFDDPNLIILPLAFGKRFGREFIWNDLLSLETGSLKLANGRVIEKTLYNRRTRQDEPALFVALTFERREVLDSSNIKPMNLIGVDRGENIPAVIALTDPEGCPLSRFKDSLGNPTHILRIGESYKEKQRTIQAKKEVEQRRAGGYSRKYASKAKNLADDMVRNTARDLLYYAVTQDAMLIFENLSRGFGRQGKRTFMAERQYTRMEDWLTAKLAYEGLPSKTYLSKTLAQYTSKTCSNCGFTITSADYDRVLEKLKKTATGWMTTINGKELKVEGQITYYNRYKRQNVVKDLSVELDRLSEESVNNDISSWTKGRSGEALSLLKKRFSHRPVQEKFVCLNCGFETHADEQAALNIARSWLFLRSQEYKKYQTNKTTGNTDKRAFVETWQSFYRKKLKEVWKPAV

SEQ ID NO: 34701 - protein, 978 aa, synthetic construct
  REGION 1..978: note = engineered CasX variant
QEIKRINKIRRRLVKDSNTKKAGKTGPMKTLLVRVMTPDLRERLENLRKKPENIPQPISNTSRANLNKLLTDYTEMKKAILHVYWEEFQKDPVGLMSRVAQPASKKIDQNKLKPEMDEKGNLTTAGFACSQCGQPLFVYKLEQVSEKGKAYTNYFGRCNVAEHEKLIKLAQLKPEKDSDEAVTYSLGKFGQRALDFYSIHVTKESTHPVKPLAQIAGNRYASAPVGKALSDACMGTIASFLSKYQDIIIEHQKVVKGNQKRLESLRELAGKENLEYPSVTLPPQPHTKEGVDAYNEVIARVRMWVNLNLWQKLKLSRDDAKPLLRLKGFPSFPLVERQANEVDWWDMVCNVKKLINEKKEDGKVFWQNLAGYKRQEALRPYLSSEEDRKKGKKFARYQLGDLLLHLEKKHGEDWGKVYDEAWERIDKKVEGLSKHIKLEEERRSEDAQSKAALTDWLRAKASFVIEGLKEADKDEFCRCELKLQKWYGDLRGKPFAIEAENSILDISGFSKQYNCAFIWQKDGVKKLNLYLIINYFKGGKLRFKKIKPEAFEANRFYTVINKKSGEIVPMEVNFNFDDPNLIILPLAFGKRFGREFIWNDLLSLETGSLKLANGRVIEKTLYNRRTRQDEPALFVALTFERREVLDSSNIKPMNLIGVDRGENIPAVIALTDPEGCPLSRFKDSLGNPTHILRIGESYKEKQRTIQAKKEVEQRRAGGYSRKYASKAKNLADDMVRNTARDLLYYAVTQDAMLIFENLSRGFGRQGKRTFMAERQYTRMEDWLTAKLAYEGLPSKTYLSKTLAQYTSKTCSNCGFTITSADYDRVLEKLKKTATGWMTTINGKELKVEGQITYYNRYKRQNVVKDLSVELDRLSEESVNNDISSWTKGRSGEALSLLKKRFSHRPVQEKFVCLNCGFETHADEQAALNIARSWLFLRSQEYKKYQTNKTTGNTDKRAFVETWQSFYRKKLKEVWKPAV

SEQ ID NO: 34702 - protein, 978 aa, synthetic construct
  REGION 1..978: note = engineered CasX variant
QEIKRINKIRRRLVKDSNTKKAGKTGPMKTLLVRVMTPDLRERLENLRKKPENIPQPISNTSRANLNKLLTDYTEMKKAILHVYWEEFQKDPVGLMSRVAQPASKKIDQNKLKPEMDEKGNLTTAGFACSQCGQPLFVYKLEQVSEKGKAYTNYFGRCNVAEHEKLIKLAQLKPEKDSDEAVTYSLGKFGQRALDFYSIHVTKESTHPVKPLAQIAGNRYASVPVGKALSDACMGTIASFLSKYQDIIIEHQKVVKGNQKRLESLRELAGKENLEYPSVTLPPQPHTKEGVDAYNEVIARVRMWVNLNLWQKLKLSRDDAKPLLRLKGFPSFPLVERQANEVDWWDMVCNVKKLINEKKEDGKVFWQNLAGYKRQEALRPYLSSEEDRKKGKKFARYQLGDLLLHLEKKHGEDWGKVYDEAWERIDKKVEGLSKHIKLEEERRSEDAQSKAALTDWLRAKASFVIEGLKEADKDEFCRCELKLQKWYGDLRGKPFAIEAENSILDISGFSKQYNCAFIWQKDGVKKLNLYLIINYFKGGKLRFKKIKPEAFEANRFYTVINKKSGEIVPMEVNFNFDDPNLIILPLAFGKRFGREFIWNDLLSLETGSLKLANGRVIEKTLYNRRTRQDEPALFVALTFERREVLDSSNIKPMNLIGVDRGENIPAVIALTDPEGCPLSRFKDSLGNPTHILRIGESYKEKQRTIQAKKEVEQRRAGGYSRKYASKAKNLADDMVRNTARDLLYYAVTQDAMLIFENLSRGFGRQGKRTFMAERQYTRMEDWLTAKLAYEGLPSKTYLSKTLAQYTSKTCSNCGFTITSADYDRVLEKLKKTATGWMTTINGKELKVEGQITYYNRYKRQNVVKDLSVELDRLSEESVNNDISSWTKGRSGEALSLLKKRFSHRPVQEKFVCLNCGFETHADEQAALNIARSWLFLRSQEYKKYQTNKTTGNTDKRAFVETWQSFYRKKLKEVWKPAV

SEQ ID NO: 34703 - protein, 979 aa, synthetic construct
  REGION 1..979: note = engineered CasX variant
QEIKRINKIRRRLVKDSNTKKAGKTGPMKTLLVRVMTPDLRERLENLRKKPENIPQPISNTSRANLNKLLTDYTEMKKAILHVYWEEFQKDPVGLMSRVAQPASKKIDQNKLKPEMDEKGNLTTAGFACSQCGQPLFVYKLEQVSEKGKAYTNYFGRCNVAEHEKLIKKLAQLKPEKDSDEAVTYSLGKFGQRALDFYSIHVTKESTHPVKPLAQIAGNRYASGPVGKALSDACMGTIASFLSKYQDIIIEHQKVVKGNQKRLESLRELAGKENLEYPSVTLPPQPHTKEGVDAYNEVIARVRMWVNLNLWQKLKLSRDDAKPLLRLKGFPSFPLVERQANEVDWWDMVCNVKKLINEKKEDGKVFWQNLAGYKRQEALRPYLSSEEDRKKGKKFARYQLGDLLLHLEKKHGEDWGKVYDEAWERIDKKVEGLSKHIKLEEERRSEDAQSKAALTDWLRAKASFVIEGLKEADKDEFCRCELKLQKWYGDLRGKPFAIEAENSILDISGFSKQYNCAFIWQKDGVKKLNLYLIINYFKGGKLRFKKIKPEAFEANRFYTVINKKSGEIVPMEVNFNFDDPNLIILPLAFGKRFGREFIWNDLLSLETGSLKLANGRVIEKTLYNRRTRQDEPALFVALTFERREVLDSSNIKPMNLIGVDRGENIPAVIALTDPEGCPLSRFKDSLGNPTHILRIGESYKEKQRTIQAKKEVEQRRAGGYSRKYASKAKNLADDMVRNTARDLLYYAVTQDAMLIFENLSRGFGRQGKRTFMAERQYTRMEDWLTAKLAYEGLPSKTYLSKTLAQYTSKTCSNCGFTITSADYDRVLEKLKKTATGWMTTINGKELKVEGQITYYNRYKRQNVVKDLSVELDRLSEESVNNDISSWTKGRSGEALSLLKKRFSHRPVQEKFVCLNCGFETHADEQAALNIARSWLFLRSQEYKKYQTNKTTGNTDKRAFVETWQSFYRKKLKEVWKPAV

SEQ ID NO: 34704 - protein, 977 aa, synthetic construct
  REGION 1..977: note = engineered CasX variant
QEIKRINKIRRRLVKDSNTKKAGKTGPMKTLLVRVMTPDLRERLENLRKKPENIPQPISNTSRANLNKLLTDYTEMKKAILHVYWEEFQKDPVGLMSRVAQPASKKIDQNKLKPEMDEKGNLTTAGFACSQCGQPLFVYKLEQVSEKGKAYTNYFGRCNVAEHEKLIKLAQLKPEKDSDEAVTYSLGKFGQRALDFYSIHVTKESTHPVKPLAQIAGNRYASPVGKALSDACMGTIASFLSKYQDIIIEHQKVVKGNQKRLESLRELAGKENLEYPSVTLPPQPHTKEGVDAYNEVIARVRMWVNLNLWQKLKLSRDDAKPLLRLKGFPSFPLVERQANEVDWWDMVCNVKKLINEKKEDGKVFWQNLAGYKRQEALRPYLSSEEDRKKGKKFARYQLGDLLLHLEKKHGEDWGKVYDEAWERIDKKVEGLSKHIKLEEERRSEDAQSKAALTDWLRAKASFVIEGLKEADKDEFCRCELKLQKWYGDLRGKPFAIEAENSILDISGFSKQYNCAFIWQKDGVKKLNLYLIINYFKGGKLRFKKIKPEAFEANRFYTVINKKSGEIVPMEVNFNFDDPNLIILPLAFGKRFGREFIWNDLLSLETGSLKLANGRVIEKTLYNRRTRQDEPALFVALTFERREVLDSSNIKPMNLIGVDRGENIPAVIALTDPEGCPLSRFKDSLGNPTHILRIGESYKEKQRTIQAKKEVEQRRAGGYSRKYASKAKNLADDMVRNTARDLLYYAVTQDAMLIFENLSRGFGRQGKRTFMAERQYTRMEDWLTAKLAYEGLPSKTYLSKTLAQYTSKTCSNCGFTITSADYDRVLEKLKKTATGWMTTINGKELKVEGQITYYNRYKRQNVVKDLSVELDRLSEESVNNDISSWTKGRSGEALSLLKKRFSHRPVQEKFVCLNCGFETHADEQAALNIARSWLFLRSQEYKKYQTNKTTGNTDKRAFVETWQSFYRKKLKEVWKPAV

SEQ ID NO: 34705 - protein, 978 aa, synthetic construct
  REGION 1..978: note = engineered CasX variant
QEIKRINKIRRRLVKDSNTKKAGKTGPMKTLLVRVMTPDLRERLENLRKKPENIPQPISNTSRANLNKLLTDYTEMKKAILHVYWEEFQKDPVGLMSRVAQPASKKIDQNKLKPEMDEKGNLTTAGFACSQCGQPLFVYKLEQVSEKGKAYTNYFGRCNVAEHEKLIKLAQLKPEKDSDEAVTYSLGKFGQRALDFYSIHVTKESTHPVKPLAQIAGNRYASYPVGKALSDACMGTIASFLSKYQDIIIEHQKVVKGNQKRLESLRELAGKENLEYPSVTLPPQPHTKEGVDAYNEVIARVRMWVNLNLWQKLKLSRDDAKPLLRLKGFPSFPLVERQANEVDWWDMVCNVKKLINEKKEDGKVFWQNLAGYKRQEALRPYLSSEEDRKKGKKFARYQLGDLLLHLEKKHGEDWGKVYDEAWERIDKKVEGLSKHIKLEEERRSEDAQSKAALTDWLRAKASFVIEGLKEADKDEFCRCELKLQKWYGDLRGKPFAIEAENSILDISGFSKQYNCAFIWQKDGVKKLNLYLIINYFKGGKLRFKKIKPEAFEANRFYTVINKKSGEIVPMEVNFNFDDPNLIILPLAFGKRVGREFIWNDLLSLETGSLKLANGRVIEKTLYNRRTRQDEPALFVALTFERREVLDSSNIKPMNLIGVDRGENIPAVIALTDPEGCPLSRFKDSLGNPTHILRIGESYKEKQRTIQAKKEVEQRRAGGYSRKYASKAKNLADDMVRNTARDLLYYAVTQDAMLIFENLSRGFGRQGKRTFMAERQYTRMEDWLTAKLAYEGLPSKTYLSKTLAQYTSKTCSNCGFTITSADYDRVLEKLKKTATGWMTTINGKELKVEGQITYYNRYKRQNVVKDLSVELDRLSEESVNNDISSWTKGRSGEALSLLKKRFSHRPVQEKFVCLNCGFETHADEQAALNIARSWLFLRSQEYKKYQTNKTTGNTDKRAFVETWQSFYRKKLKEVWKPAV

SEQ ID NO: 34706 - protein, 978 aa, synthetic construct
  REGION 1..978: note = engineered CasX variant
QEIKRINKIRRRLVKDSNTKKAGKTGPMKTLLVRVMTPDLRERLENLRKKPENIPQPISNTSRANLNKLLTDYTEMKKAILHVYWEEFQKDPVGLMSRVAQPASKKIDQNKLKPEMDEKGNLTTAGFACSQCGQPLFVYKLEQVSEKGKAYTNYFGRCNVAEHEKLIKLAQLKPEKDSDEAVTYSLGKFGQRALDFYSIHVTKESTHPVKPLAQIAGNRYASHPVGKALSDACMGTIASFLSKYQDIIIEHQKVVKGNQKRLESLRELAGKENLEYPSVTLPPQPHTKEGVDAYNEVIARVRMWVNLNLWQKLKLSRDDAKPLLRLKGFPSFPLVERQANEVDWWDMVCNVKKLINEKKEDGKVFWQNLAGYKRQEALRPYLSSEEDRKKGKKFARYQLGDLLLHLEKKHGEDWGKVYDEAWERIDKKVEGLSKHIKLEEERRSEDAQSKAALTDWLRAKASFVIEGLKEADKDEFCRCELKLQKWYGDLRGKPFAIEAENSILDISGFSKQYNCAFIWQKDGVKKLNLYLIINYFKGGKLRFKKIKPEAFEANRFYTVINKKSGEIVPMEVNFNFDDPNLIILPLAFGKRVGREFIWNDLLSLETGSLKLANGRVIEKTLYNRRTRQDEPALFVALTFERREVLDSSNIKPMNLIGVDRGENIPAVIALTDPEGCPLSRFKDSLGNPTHILRIGESYKEKQRTIQAKKEVEQRRAGGYSRKYASKAKNLADDMVRNTARDLLYYAVTQDAMLIFENLSRGFGRQGKRTFMAERQYTRMEDWLTAKLAYEGLPSKTYLSKTLAQYTSKTCSNCGFTITSADYDRVLEKLKKTATGWMTTINGKELKVEGQITYYNRYKRQNVVKDLSVELDRLSEESVNNDISSWTKGRSGEALSLLKKRFSHRPVQEKFVCLNCGFETHADEQAALNIARSWLFLRSQEYKKYQTNKTTGNTDKRAFVETWQSFYRKKLKEVWKPAV

SEQ ID NO: 34707 - protein, 978 aa, synthetic construct
  REGION 1..978: note = engineered CasX variant
QEIKRINKIRRRLVKDSNTKKAGKTGPMKTLLVRVMTPDLRERLENLRKKPENIPQPISNTSRANLNKLLTDYTEMKKAILHVYWEEFQKDPVGLMSRVAQPASKKIDQNKLKPEMDEKGNLTTAGFACSQCGQPLFVYKLEQVSEKGKAYTNYFGRCNVAEHEKLIKLAQLKPEKDSDEAVTYSLGKFGQRALDFYSIHVTKESTHPVKPLAQIAGNRYASTPVGKALSDACMGTIASFLSKYQDIIIEHQKVVKGNQKRLESLRELAGKENLEYPSVTLPPQPHTKEGVDAYNEVIARVRMWVNLNLWQKLKLSRDDAKPLLRLKGFPSFPLVERQANEVDWWDMVCNVKKLINEKKEDGKVFWQNLAGYKRQEALRPYLSSEEDRKKGKKFARYQLGDLLLHLEKKHGEDWGKVYDEAWERIDKKVEGLSKHIKLEEERRSEDAQSKAALTDWLRAKASFVIEGLKEADKDEFCRCELKLQKWYGDLRGKPFAIEAENSILDISGFSKQYNCAFIWQKDGVKKLNLYLIINYFKGGKLRFKKIKPEAFEANRFYTVINKKSGEIVPMEVNFNFDDPNLIILPLAFGKRVGREFIWNDLLSLETGSLKLANGRVIEKTLYNRRTRQDEPALFVALTFERREVLDSSNIKPMNLIGVDRGENIPAVIALTDPEGCPLSRFKDSLGNPTHILRIGESYKEKQRTIQAKKEVEQRRAGGYSRKYASKAKNLADDMVRNTARDLLYYAVTQDAMLIFENLSRGFGRQGKRTFMAERQYTRMEDWLTAKLAYEGLPSKTYLSKTLAQYTSKTCSNCGFTITSADYDRVLEKLKKTATGWMTTINGKELKVEGQITYYNRYKRQNVVKDLSVELDRLSEESVNNDISSWTKGRSGEALSLLKKRFSHRPVQEKFVCLNCGFETHADEQAALNIARSWLFLRSQEYKKYQTNKTTGNTDKRAFVETWQSFYRKKLKEVWKPAV

SEQ ID NO: 34708 - protein, 978 aa, synthetic construct
  REGION 1..978: note = engineered CasX variant
QEIKRINKIRRRLVKDSNTKKAGKTGPMKTLLVRVMTPDLRERLENLRKKPENIPQPISNTSRANLNKLLTDYTEMKKAILHVYWEEFQKDPVGLMSRVAQPASKKIDQNKLKPEMDEKGNLTTAGFACSQCGQPLFVYKLEQVSEKGKAYTNYFGRCNVAEHEKLIKLAQLKPEKDSDEAVTYSLGKFGQRALDFYSIHVTKESTHPVKPLAQIAGNRYASAPVGKALSDACMGTIASFLSKYQDIIIEHQKVVKGNQKRLESLRELAGKENLEYPSVTLPPQPHTKEGVDAYNEVIARVRMWVNLNLWQKLKLSRDDAKPLLRLKGFPSFPLVERQANEVDWWDMVCNVKKLINEKKEDGKVFWQNLAGYKRQEALRPYLSSEEDRKKGKKFARYQLGDLLLHLEKKHGEDWGKVYDEAWERIDKKVEGLSKHIKLEEERRSEDAQSKAALTDWLRAKASFVIEGLKEADKDEFCRCELKLQKWYGDLRGKPFAIEAENSILDISGFSKQYNCAFIWQKDGVKKLNLYLIINYFKGGKLRFKKIKPEAFEANRFYTVINKKSGEIVPMEVNFNFDDPNLIILPLAFGKRVGREFIWNDLLSLETGSLKLANGRVIEKTLYNRRTRQDEPALFVALTFERREVLDSSNIKPMNLIGVDRGENIPAVIALTDPEGCPLSRFKDSLGNPTHILRIGESYKEKQRTIQAKKEVEQRRAGGYSRKYASKAKNLADDMVRNTARDLLYYAVTQDAMLIFENLSRGFGRQGKRTFMAERQYTRMEDWLTAKLAYEGLPSKTYLSKTLAQYTSKTCSNCGFTITSADYDRVLEKLKKTATGWMTTINGKELKVEGQITYYNRYKRQNVVKDLSVELDRLSEESVNNDISSWTKGRSGEALSLLKKRFSHRPVQEKFVCLNCGFETHADEQAALNIARSWLFLRSQEYKKYQTNKTTGNTDKRAFVETWQSFYRKKLKEVWKPAV

SEQ ID NO: 34709 - protein, 978 aa, synthetic construct
  REGION 1..978: note = engineered CasX variant
QEIKRINKIRRRLVKDSNTKKAGKTGPMKTLLVRVMTPDLRERLENLRKKPENIPQPISNTSRANLNKLLTDYTEMKKAILHVYWEEFQKDPVGLMSRVAQPASKKIDQNKLKPEMDEKGNLTTAGFACSQCGQPLFVYKLEQVSEKGKAYTNYFGRCNVAEHEKLIKLAQLKPEKDSDEAVTYSLGKFGQRALDFYSIHVTKESTHPVKPLAQIAGNRYASVPVGKALSDACMGTIASFLSKYQDIIIEHQKVVKGNQKRLESLRELAGKENLEYPSVTLPPQPHTKEGVDAYNEVIARVRMWVNLNLWQKLKLSRDDAKPLLRLKGFPSFPLVERQANEVDWWDMVCNVKKLINEKKEDGKVFWQNLAGYKRQEALRPYLSSEEDRKKGKKFARYQLGDLLLHLEKKHGEDWGKVYDEAWERIDKKVEGLSKHIKLEEERRSEDAQSKAALTDWLRAKASFVIEGLKEADKDEFCRCELKLQKWYGDLRGKPFAIEAENSILDISGFSKQYNCAFIWQKDGVKKLNLYLIINYFKGGKLRFKKIKPEAFEANRFYTVINKKSGEIVPMEVNFNFDDPNLIILPLAFGKRVGREFIWNDLLSLETGSLKLANGRVIEKTLYNRRTRQDEPALFVALTFERREVLDSSNIKPMNLIGVDRGENIPAVIALTDPEGCPLSRFKDSLGNPTHILRIGESYKEKQRTIQAKKEVEQRRAGGYSRKYASKAKNLADDMVRNTARDLLYYAVTQDAMLIFENLSRGFGRQGKRTFMAERQYTRMEDWLTAKLAYEGLPSKTYLSKTLAQYTSKTCSNCGFTITSADYDRVLEKLKKTATGWMTTINGKELKVEGQITYYNRYKRQNVVKDLSVELDRLSEESVNNDISSWTKGRSGEALSLLKKRFSHRPVQEKFVCLNCGFETHADEQAALNIARSWLFLRSQEYKKYQTNKTTGNTDKRAFVETWQSFYRKKLKEVWKPAV

SEQ ID NO: 34710 - protein, 979 aa, synthetic construct
  REGION 1..979: note = engineered CasX variant
QEIKRINKIRRRLVKDSNTKKAGKTGPMKTLLVRVMTPDLRERLENLRKKPENIPQPISNTSRANLNKLLTDYTEMKKAILHVYWEEFQKDPVGLMSRVAQPASKKIDQNKLKPEMDEKGNLTTAGFACSQCGQPLFVYKLEQVSEKGKAYTNYFGRCNVAEHEKLIKKLAQLKPEKDSDEAVTYSLGKFGQRALDFYSIHVTKESTHPVKPLAQIAGNRYASGPVGKALSDACMGTIASFLSKYQDIIIEHQKVVKGNQKRLESLRELAGKENLEYPSVTLPPQPHTKEGVDAYNEVIARVRMWVNLNLWQKLKLSRDDAKPLLRLKGFPSFPLVERQANEVDWWDMVCNVKKLINEKKEDGKVFWQNLAGYKRQEALRPYLSSEEDRKKGKKFARYQLGDLLLHLEKKHGEDWGKVYDEAWERIDKKVEGLSKHIKLEEERRSEDAQSKAALTDWLRAKASFVIEGLKEADKDEFCRCELKLQKWYGDLRGKPFAIEAENSILDISGFSKQYNCAFIWQKDGVKKLNLYLIINYFKGGKLRFKKIKPEAFEANRFYTVINKKSGEIVPMEVNFNFDDPNLIILPLAFGKRVGREFIWNDLLSLETGSLKLANGRVIEKTLYNRRTRQDEPALFVALTFERREVLDSSNIKPMNLIGVDRGENIPAVIALTDPEGCPLSRFKDSLGNPTHILRIGESYKEKQRTIQAKKEVEQRRAGGYSRKYASKAKNLADDMVRNTARDLLYYAVTQDAMLIFENLSRGFGRQGKRTFMAERQYTRMEDWLTAKLAYEGLPSKTYLSKTLAQYTSKTCSNCGFTITSADYDRVLEKLKKTATGWMTTINGKELKVEGQITYYNRYKRQNVVKDLSVELDRLSEESVNNDISSWTKGRSGEALSLLKKRFSHRPVQEKFVCLNCGFETHADEQAALNIARSWLFLRSQEYKKYQTNKTTGNTDKRAFVETWQSFYRKKLKEVWKPAV

SEQ ID NO: 34711 - protein, 977 aa, synthetic construct
  REGION 1..977: note = engineered CasX variant
QEIKRINKIRRRLVKDSNTKKAGKTGPMKTLLVRVMTPDLRERLENLRKKPENIPQPISNTSRANLNKLLTDYTEMKKAILHVYWEEFQKDPVGLMSRVAQPASKKIDQNKLKPEMDEKGNLTTAGFACSQCGQPLFVYKLEQVSEKGKAYTNYFGRCNVAEHEKLIKLAQLKPEKDSDEAVTYSLGKFGQRALDFYSIHVTKESTHPVKPLAQIAGNRYASPVGKALSDACMGTIASFLSKYQDIIIEHQKVVKGNQKRLESLRELAGKENLEYPSVTLPPQPHTKEGVDAYNEVIARVRMWVNLNLWQKLKLSRDDAKPLLRLKGFPSFPLVERQANEVDWWDMVCNVKKLINEKKEDGKVFWQNLAGYKRQEALRPYLSSEEDRKKGKKFARYQLGDLLLHLEKKHGEDWGKVYDEAWERIDKKVEGLSKHIKLEEERRSEDAQSKAALTDWLRAKASFVIEGLKEADKDEFCRCELKLQKWYGDLRGKPFAIEAENSILDISGFSKQYNCAFIWQKDGVKKLNLYLIINYFKGGKLRFKKIKPEAFEANRFYTVINKKSGEIVPMEVNFNFDDPNLIILPLAFGKRVGREFIWNDLLSLETGSLKLANGRVIEKTLYNRRTRQDEPALFVALTFERREVLDSSNIKPMNLIGVDRGENIPAVIALTDPEGCPLSRFKDSLGNPTHILRIGESYKEKQRTIQAKKEVEQRRAGGYSRKYASKAKNLADDMVRNTARDLLYYAVTQDAMLIFENLSRGFGRQGKRTFMAERQYTRMEDWLTAKLAYEGLPSKTYLSKTLAQYTSKTCSNCGFTITSADYDRVLEKLKKTATGWMTTINGKELKVEGQITYYNRYKRQNVVKDLSVELDRLSEESVNNDISSWTKGRSGEALSLLKKRFSHRPVQEKFVCLNCGFETHADEQAALNIARSWLFLRSQEYKKYQTNKTTGNTDKRAFVETWQSFYRKKLKEVWKPAV

SEQ ID NO: 34712 - protein, 979 aa, synthetic construct
  REGION 1..979: note = engineered CasX variant
QEIKRINKIRRRLVKDSNTKKAGKTGPMKTLLVRVMTPDLRERLENLRKKPENIPQPISNTSRANLNKLLTDYTEMKKAILHVYWEEFQKDPVGLMSRVAQPASKKIDQNKLKPEMDEKGNLTTAGFACSQCGQPLFVYKLEQVSEKGKAYTNYFGRCNVAEHEKLIKLAQLKPEKDSDEAVTYSLGKFGQRALDFYSIHVTKESTHPVKPLAQIAGNRYASYPVGKALSDACMGTIASFLSKYQDIIIEHQKVVKGNQKRLESLRELAGKENLEYPSVTLPPQPHTKEGVDAYNEVIARVRMWVNLNLWQKLKLSRDDAKPLLRLKGFPSFPLVERQANEVDWWDMVCNVKKLINEKKEDGKVFWQNLAGYKRQEALRPYLSSEEDRKKGKKFARYQLGDLLLHLEKKHGEDWGKVYDEAWERIDKKVEGLSKHIKLEEERRSEDAQSKAALTDWLRAKASFVIEGLKEADKDEFCRCELKLQKWYGDLRGKPFAIEAENSILDISGFSKQYNCAFIWQKDGVKKLNLYLIINYFKGGKLRFKKIKPEAFEANRFYTVINKKSGEIVPMEVNFNFDDPNLIILPLAFGKRQGREFIWNDLLSLETGSLKLANGRVIEKTLYNRRTRQDEPALFVALTFERREVLDSSNIKTPMNLIGVDRGENIPAVIALTDPEGCPLSRFKDSLGNPTHILRIGESYKEKQRTIQAKKEVEQRRAGGYSRKYASKAKNLADDMVRNTARDLLYYAVTQDAMLIFENLSRGFGRQGKRTFMAERQYTRMEDWLTAKLAYEGLPSKTYLSKTLAQYTSKTCSNCGFTITSADYDRVLEKLKKTATGWMTTINGKELKVEGQITYYNRYKRQNVVKDLSVELDRLSEESVNNDISSWTKGRSGEALSLLKKRFSHRPVQEKFVCLNCGFETHADEQAALNIARSWLFLRSQEYKKYQTNKTTGNTDKRAFVETWQSFYRKKLKEVWKPAV

SEQ ID NO: 34713 - protein, 979 aa, synthetic construct
  REGION 1..979: note = engineered CasX variant
QEIKRINKIRRRLVKDSNTKKAGKTGPMKTLLVRVMTPDLRERLENLRKKPENIPQPISNTSRANLNKLLTDYTEMKKAILHVYWEEFQKDPVGLMSRVAQPASKKIDQNKLKPEMDEKGNLTTAGFACSQCGQPLFVYKLEQVSEKGKAYTNYFGRCNVAEHEKLIKLAQLKPEKDSDEAVTYSLGKFGQRALDFYSIHVTKESTHPVKPLAQIAGNRYASHPVGKALSDACMGTIASFLSKYQDIIIEHQKVVKGNQKRLESLRELAGKENLEYPSVTLPPQPHTKEGVDAYNEVIARVRMWVNLNLWQKLKLSRDDAKPLLRLKGFPSFPLVERQANEVDWWDMVCNVKKLINEKKEDGKVFWQNLAGYKRQEALRPYLSSEEDRKKGKKFARYQLGDLLLHLEKKHGEDWGKVYDEAWERIDKKVEGLSKHIKLEEERRSEDAQSKAALTDWLRAKASFVIEGLKEADKDEFCRCELKLQKWYGDLRGKPFAIEAENSILDISGFSKQYNCAFIWQKDGVKKLNLYLIINYFKGGKLRFKKIKPEAFEANRFYTVINKKSGEIVPMEVNFNFDDPNLIILPLAFGKRQGREFIWNDLLSLETGSLKLANGRVIEKTLYNRRTRQDEPALFVALTFERREVLDSSNIKTPMNLIGVDRGENIPAVIALTDPEGCPLSRFKDSLGNPTHILRIGESYKEKQRTIQAKKEVEQRRAGGYSRKYASKAKNLADDMVRNTARDLLYYAVTQDAMLIFENLSRGFGRQGKRTFMAERQYTRMEDWLTAKLAYEGLPSKTYLSKTLAQYTSKTCSNCGFTITSADYDRVLEKLKKTATGWMTTINGKELKVEGQITYYNRYKRQNVVKDLSVELDRLSEESVNNDISSWTKGRSGEALSLLKKRFSHRPVQEKFVCLNCGFETHADEQAALNIARSWLFLRSQEYKKYQTNKTTGNTDKRAFVETWQSFYRKKLKEVWKPAV

SEQ ID NO: 34714 - protein, 979 aa, synthetic construct
  REGION 1..979: note = engineered CasX variant
QEIKRINKIRRRLVKDSNTKKAGKTGPMKTLLVRVMTPDLRERLENLRKKPENIPQPISNTSRANLNKLLTDYTEMKKAILHVYWEEFQKDPVGLMSRVAQPASKKIDQNKLKPEMDEKGNLTTAGFACSQCGQPLFVYKLEQVSEKGKAYTNYFGRCNVAEHEKLIKLAQLKPEKDSDEAVTYSLGKFGQRALDFYSIHVTKESTHPVKPLAQIAGNRYASTPVGKALSDACMGTIASFLSKYQDIIIEHQKVVKGNQKRLESLRELAGKENLEYPSVTLPPQPHTKEGVDAYNEVIARVRMWVNLNLWQKLKLSRDDAKPLLRLKGFPSFPLVERQANEVDWWDMVCNVKKLINEKKEDGKVFWQNLAGYKRQEALRPYLSSEEDRKKGKKFARYQLGDLLLHLEKKHGEDWGKVYDEAWERIDKKVEGLSKHIKLEEERRSEDAQSKAALTDWLRAKASFVIEGLKEADKDEFCRCELKLQKWYGDLRGKPFAIEAENSILDISGFSKQYNCAFIWQKDGVKKLNLYLIINYFKGGKLRFKKIKPEAFEANRFYTVINKKSGEIVPMEVNFNFDDPNLIILPLAFGKRQGREFIWNDLLSLETGSLKLANGRVIEKTLYNRRTRQDEPALFVALTFERREVLDSSNIKTPMNLIGVDRGENIPAVIALTDPEGCPLSRFKDSLGNPTHILRIGESYKEKQRTIQAKKEVEQRRAGGYSRKYASKAKNLADDMVRNTARDLLYYAVTQDAMLIFENLSRGFGRQGKRTFMAERQYTRMEDWLTAKLAYEGLPSKTYLSKTLAQYTSKTCSNCGFTITSADYDRVLEKLKKTATGWMTTINGKELKVEGQITYYNRYKRQNVVKDLSVELDRLSEESVNNDISSWTKGRSGEALSLLKKRFSHRPVQEKFVCLNCGFETHADEQAALNIARSWLFLRSQEYKKYQTNKTTGNTDKRAFVETWQSFYRKKLKEVWKPAV

SEQ ID NO: 34715 - protein, 979 aa, synthetic construct
  REGION 1..979: note = engineered CasX variant
QEIKRINKIRRRLVKDSNTKKAGKTGPMKTLLVRVMTPDLRERLENLRKKPENIPQPISNTSRANLNKLLTDYTEMKKAILHVYWEEFQKDPVGLMSRVAQPASKKIDQNKLKPEMDEKGNLTTAGFACSQCGQPLFVYKLEQVSEKGKAYTNYFGRCNVAEHEKLIKLAQLKPEKDSDEAVTYSLGKFGQRALDFYSIHVTKESTHPVKPLAQIAGNRYASAPVGKALSDACMGTIASFLSKYQDIIIEHQKVVKGNQKRLESLRELAGKENLEYPSVTLPPQPHTKEGVDAYNEVIARVRMWVNLNLWQKLKLSRDDAKPLLRLKGFPSFPLVERQANEVDWWDMVCNVKKLINEKKEDGKVFWQNLAGYKRQEALRPYLSSEEDRKKGKKFARYQLGDLLLHLEKKHGEDWGKVYDEAWERIDKKVEGLSKHIKLEEERRSEDAQSKAALTDWLRAKASFVIEGLKEADKDEFCRCELKLQKWYGDLRGKPFAIEAENSILDISGFSKQYNCAFIWQKDGVKKLNLYLIINYFKGGKLRFKKIKPEAFEANRFYTVINKKSGEIVPMEVNFNFDDPNLIILPLAFGKRQGREFIWNDLLSLETGSLKLANGRVIEKTLYNRRTRQDEPALFVALTFERREVLDSSNIKTPMNLIGVDRGENIPAVIALTDPEGCPLSRFKDSLGNPTHILRIGESYKEKQRTIQAKKEVEQRRAGGYSRKYASKAKNLADDMVRNTARDLLYYAVTQDAMLIFENLSRGFGRQGKRTFMAERQYTRMEDWLTAKLAYEGLPSKTYLSKTLAQYTSKTCSNCGFTITSADYDRVLEKLKKTATGWMTTINGKELKVEGQITYYNRYKRQNVVKDLSVELDRLSEESVNNDISSWTKGRSGEALSLLKKRFSHRPVQEKFVCLNCGFETHADEQAALNIARSWLFLRSQEYKKYQTNKTTGNTDKRAFVETWQSFYRKKLKEVWKPAV

SEQ ID NO: 34716 - protein, 979 aa, synthetic construct
  REGION 1..979: note = engineered CasX variant
QEIKRINKIRRRLVKDSNTKKAGKTGPMKTLLVRVMTPDLRERLENLRKKPENIPQPISNTSRANLNKLLTDYTEMKKAILHVYWEEFQKDPVGLMSRVAQPASKKIDQNKLKPEMDEKGNLTTAGFACSQCGQPLFVYKLEQVSEKGKAYTNYFGRCNVAEHEKLIKLAQLKPEKDSDEAVTYSLGKFGQRALDFYSIHVTKESTHPVKPLAQIAGNRYASVPVGKALSDACMGTIASFLSKYQDIIIEHQKVVKGNQKRLESLRELAGKENLEYPSVTLPPQPHTKEGVDAYNEVIARVRMWVNLNLWQKLKLSRDDAKPLLRLKGFPSFPLVERQANEVDWWDMVCNVKKLINEKKEDGKVFWQNLAGYKRQEALRPYLSSEEDRKKGKKFARYQLGDLLLHLEKKHGEDWGKVYDEAWERIDKKVEGLSKHIKLEEERRSEDAQSKAALTDWLRAKASFVIEGLKEADKDEFCRCELKLQKWYGDLRGKPFAIEAENSILDISGFSKQYNCAFIWQKDGVKKLNLYLIINYFKGGKLRFKKIKPEAFEANRFYTVINKKSGEIVPMEVNFNFDDPNLIILPLAFGKRQGREFIWNDLLSLETGSLKLANGRVIEKTLYNRRTRQDEPALFVALTFERREVLDSSNIKTPMNLIGVDRGENIPAVIALTDPEGCPLSRFKDSLGNPTHILRIGESYKEKQRTIQAKKEVEQRRAGGYSRKYASKAKNLADDMVRNTARDLLYYAVTQDAMLIFENLSRGFGRQGKRTFMAERQYTRMEDWLTAKLAYEGLPSKTYLSKTLAQYTSKTCSNCGFTITSADYDRVLEKLKKTATGWMTTINGKELKVEGQITYYNRYKRQNVVKDLSVELDRLSEESVNNDISSWTKGRSGEALSLLKKRFSHRPVQEKFVCLNCGFETHADEQAALNIARSWLFLRSQEYKKYQTNKTTGNTDKRAFVETWQSFYRKKLKEVWKPAV

SEQ ID NO: 34717 - protein, 980 aa, synthetic construct
  REGION 1..980: note = engineered CasX variant
QEIKRINKIRRRLVKDSNTKKAGKTGPMKTLLVRVMTPDLRERLENLRKKPENIPQPISNTSRANLNKLLTDYTEMKKAILHVYWEEFQKDPVGLMSRVAQPASKKIDQNKLKPEMDEKGNLTTAGFACSQCGQPLFVYKLEQVSEKGKAYTNYFGRCNVAEHEKLIKKLAQLKPEKDSDEAVTYSLGKFGQRALDFYSIHVTKESTHPVKPLAQIAGNRYASGPVGKALSDACMGTIASFLSKYQDIIIEHQKVVKGNQKRLESLRELAGKENLEYPSVTLPPQPHTKEGVDAYNEVIARVRMWVNLNLWQKLKLSRDDAKPLLRLKGFPSFPLVERQANEVDWWDMVCNVKKLINEKKEDGKVFWQNLAGYKRQEALRPYLSSEEDRKKGKKFARYQLGDLLLHLEKKHGEDWGKVYDEAWERIDKKVEGLSKHIKLEEERRSEDAQSKAALTDWLRAKASFVIEGLKEADKDEFCRCELKLQKWYGDLRGKPFAIEAENSILDISGFSKQYNCAFIWQKDGVKKLNLYLIINYFKGGKLRFKKIKPEAFEANRFYTVINKKSGEIVPMEVNFNFDDPNLIILPLAFGKRQGREFIWNDLLSLETGSLKLANGRVIEKTLYNRRTRQDEPALFVALTFERREVLDSSNIKTPMNLIGVDRGENIPAVIALTDPEGCPLSRFKDSLGNPTHILRIGESYKEKQRTIQAKKEVEQRRAGGYSRKYASKAKNLADDMVRNTARDLLYYAVTQDAMLIFENLSRGFGRQGKRTFMAERQYTRMEDWLTAKLAYEGLPSKTYLSKTLAQYTSKTCSNCGFTITSADYDRVLEKLKKTATGWMTTINGKELKVEGQITYYNRYKRQNVVKDLSVELDRLSEESVNNDISSWTKGRSGEALSLLKKRFSHRPVQEKFVCLNCGFETHADEQAALNIARSWLFLRSQEYKKYQTNKTTGNTDKRAFVETWQSFYRKKLKEVWKPAV

SEQ ID NO: 34718 - protein, 978 aa, synthetic construct
  REGION 1..978: note = engineered CasX variant
QEIKRINKIRRRLVKDSNTKKAGKTGPMKTLLVRVMTPDLRERLENLRKKPENIPQPISNTSRANLNKLLTDYTEMKKAILHVYWEEFQKDPVGLMSRVAQPASKKIDQNKLKPEMDEKGNLTTAGFACSQCGQPLFVYKLEQVSEKGKAYTNYFGRCNVAEHEKLIKLAQLKPEKDSDEAVTYSLGKFGQRALDFYSIHVTKESTHPVKPLAQIAGNRYASPVGKALSDACMGTIASFLSKYQDIIIEHQKVVKGNQKRLESLRELAGKENLEYPSVTLPPQPHTKEGVDAYNEVIARVRMWVNLNLWQKLKLSRDDAKPLLRLKGFPSFPLVERQANEVDWWDMVCNVKKLINEKKEDGKVFWQNLAGYKRQEALRPYLSSEEDRKKGKKFARYQLGDLLLHLEKKHGEDWGKVYDEAWERIDKKVEGLSKHIKLEEERRSEDAQSKAALTDWLRAKASFVIEGLKEADKDEFCRCELKLQKWYGDLRGKPFAIEAENSILDISGFSKQYNCAFIWQKDGVKKLNLYLIINYFKGGKLRFKKIKPEAFEANRFYTVINKKSGEIVPMEVNFNFDDPNLIILPLAFGKRQGREFIWNDLLSLETGSLKLANGRVIEKTLYNRRTRQDEPALFVALTFERREVLDSSNIKTPMNLIGVDRGENIPAVIALTDPEGCPLSRFKDSLGNPTHILRIGESYKEKQRTIQAKKEVEQRRAGGYSRKYASKAKNLADDMVRNTARDLLYYAVTQDAMLIFENLSRGFGRQGKRTFMAERQYTRMEDWLTAKLAYEGLPSKTYLSKTLAQYTSKTCSNCGFTITSADYDRVLEKLKKTATGWMTTINGKELKVEGQITYYNRYKRQNVVKDLSVELDRLSEESVNNDISSWTKGRSGEALSLLKKRFSHRPVQEKFVCLNCGFETHADEQAALNIARSWLFLRSQEYKKYQTNKTTGNTDKRAFVETWQSFYRKKLKEVWKPAV

SEQ ID NO: 34719 - protein, 979 aa, synthetic construct
  REGION 1..979: note = engineered CasX variant
QEIKRINKIRRRLVKDSNTKKAGKTGPMKTLLVRVMTPDLRERLENLRKKPENIPQPISNTSRANLNKLLTDYTEMKKAILHVYWEEFQKDPVGLMSRVAQPASKKIDQNKLKPEMDEKGNLTTAGFACSQCGQPLFVYKLEQVSEKGKAYTNYFGRCNVAEHEKLIKLAQLKPEKDSDEAVTYSLGKFGQRALDFYSIHVTKESTHPVKPLAQIAGNRYASYPVGKALSDACMGTIASFLSKYQDIIIEHQKVVKGNQKRLESLRELAGKENLEYPSVTLPPQPHTKEGVDAYNEVIARVRMWVNLNLWQKLKLSRDDAKPLLRLKGFPSFPLVERQANEVDWWDMVCNVKKLINEKKEDGKVFWQNLAGYKRQEALRPYLSSEEDRKKGKKFARYQLGDLLLHLEKKHGEDWGKVYDEAWERIDKKVEGLSKHIKLEEERRSEDAQSKAALTDWLRAKASFVIEGLKEADKDEFCRCELKLQKWYGDLRGKPFAIEAENSILDISGFSKQYNCAFIWQKDGVKKLNLYLIINYFKGGKLRFKKIKPEAFEANRFYTVINKKSGEIVPMEVNFNFDDPNLIILPLAFGKRQGREFIWNDLLSLETGSLKLANGRVIEKTLYNRRTRQDEPALFVALTFERREVLDSSNIKPMSNLIGVDRGENIPAVIALTDPEGCPLSRFKDSLGNPTHILRIGESYKEKQRTIQAKKEVEQRRAGGYSRKYASKAKNLADDMVRNTARDLLYYAVTQDAMLIFENLSRGFGRQGKRTFMAERQYTRMEDWLTAKLAYEGLPSKTYLSKTLAQYTSKTCSNCGFTITSADYDRVLEKLKKTATGWMTTINGKELKVEGQITYYNRYKRQNVVKDLSVELDRLSEESVNNDISSWTKGRSGEALSLLKKRFSHRPVQEKFVCLNCGFETHADEQAALNIARSWLFLRSQEYKKYQTNKTTGNTDKRAFVETWQSFYRKKLKEVWKPAV

SEQ ID NO: 34720 - protein, 979 aa, synthetic construct
  REGION 1..979: note = engineered CasX variant
QEIKRINKIRRRLVKDSNTKKAGKTGPMKTLLVRVMTPDLRERLENLRKKPENIPQPISNTSRANLNKLLTDYTEMKKAILHVYWEEFQKDPVGLMSRVAQPASKKIDQNKLKPEMDEKGNLTTAGFACSQCGQPLFVYKLEQVSEKGKAYTNYFGRCNVAEHEKLIKLAQLKPEKDSDEAVTYSLGKFGQRALDFYSIHVTKESTHPVKPLAQIAGNRYASHPVGKALSDACMGTIASFLSKYQDIIIEHQKVVKGNQKRLESLRELAGKENLEYPSVTLPPQPHTKEGVDAYNEVIARVRMWVNLNLWQKLKLSRDDAKPLLRLKGFPSFPLVERQANEVDWWDMVCNVKKLINEKKEDGKVFWQNLAGYKRQEALRPYLSSEEDRKKGKKFARYQLGDLLLHLEKKHGEDWGKVYDEAWERIDKKVEGLSKHIKLEEERRSEDAQSKAALTDWLRAKASFVIEGLKEADKDEFCRCELKLQKWYGDLRGKPFAIEAENSILDISGFSKQYNCAFIWQKDGVKKLNLYLIINYFKGGKLRFKKIKPEAFEANRFYTVINKKSGEIVPMEVNFNFDDPNLIILPLAFGKRQGREFIWNDLLSLETGSLKLANGRVIEKTLYNRRTRQDEPALFVALTFERREVLDSSNIKPMSNLIGVDRGENIPAVIALTDPEGCPLSRFKDSLGNPTHILRIGESYKEKQRTIQAKKEVEQRRAGGYSRKYASKAKNLADDMVRNTARDLLYYAVTQDAMLIFENLSRGFGRQGKRTFMAERQYTRMEDWLTAKLAYEGLPSKTYLSKTLAQYTSKTCSNCGFTITSADYDRVLEKLKKTATGWMTTINGKELKVEGQITYYNRYKRQNVVKDLSVELDRLSEESVNNDISSWTKGRSGEALSLLKKRFSHRPVQEKFVCLNCGFETHADEQAALNIARSWLFLRSQEYKKYQTNKTTGNTDKRAFVETWQSFYRKKLKEVWKPAV

SEQ ID NO: 34721 - protein, 979 aa, synthetic construct
  REGION 1..979: note = engineered CasX variant
QEIKRINKIRRRLVKDSNTKKAGKTGPMKTLLVRVMTPDLRERLENLRKKPENIPQPISNTSRANLNKLLTDYTEMKKAILHVYWEEFQKDPVGLMSRVAQPASKKIDQNKLKPEMDEKGNLTTAGFACSQCGQPLFVYKLEQVSEKGKAYTNYFGRCNVAEHEKLIKLAQLKPEKDSDEAVTYSLGKFGQRALDFYSIHVTKESTHPVKPLAQIAGNRYASTPVGKALSDACMGTIASFLSKYQDIIIEHQKVVKGNQKRLESLRELAGKENLEYPSVTLPPQPHTKEGVDAYNEVIARVRMWVNLNLWQKLKLSRDDAKPLLRLKGFPSFPLVERQANEVDWWDMVCNVKKLINEKKEDGKVFWQNLAGYKRQEALRPYLSSEEDRKKGKKFARYQLGDLLLHLEKKHGEDWGKVYDEAWERIDKKVEGLSKHIKLEEERRSEDAQSKAALTDWLRAKASFVIEGLKEADKDEFCRCELKLQKWYGDLRGKPFAIEAENSILDISGFSKQYNCAFIWQKDGVKKLNLYLIINYFKGGKLRFKKIKPEAFEANRFYTVINKKSGEIVPMEVNFNFDDPNLIILPLAFGKRQGREFIWNDLLSLETGSLKLANGRVIEKTLYNRRTRQDEPALFVALTFERREVLDSSNIKPMSNLIGVDRGENIPAVIALTDPEGCPLSRFKDSLGNPTHILRIGESYKEKQRTIQAKKEVEQRRAGGYSRKYASKAKNLADDMVRNTARDLLYYAVTQDAMLIFENLSRGFGRQGKRTFMAERQYTRMEDWLTAKLAYEGLPSKTYLSKTLAQYTSKTCSNCGFTITSADYDRVLEKLKKTATGWMTTINGKELKVEGQITYYNRYKRQNVVKDLSVELDRLSEESVNNDISSWTKGRSGEALSLLKKRFSHRPVQEKFVCLNCGFETHADEQAALNIARSWLFLRSQEYKKYQTNKTTGNTDKRAFVETWQSFYRKKLKEVWKPAV

SEQ ID NO: 34722 - protein, 979 aa, synthetic construct
  REGION 1..979: note = engineered CasX variant
QEIKRINKIRRRLVKDSNTKKAGKTGPMKTLLVRVMTPDLRERLENLRKKPENIPQPISNTSRANLNKLLTDYTEMKKAILHVYWEEFQKDPVGLMSRVAQPASKKIDQNKLKPEMDEKGNLTTAGFACSQCGQPLFVYKLEQVSEKGKAYTNYFGRCNVAEHEKLIKLAQLKPEKDSDEAVTYSLGKFGQRALDFYSIHVTKESTHPVKPLAQIAGNRYASAPVGKALSDACMGTIASFLSKYQDIIIEHQKVVKGNQKRLESLRELAGKENLEYPSVTLPPQPHTKEGVDAYNEVIARVRMWVNLNLWQKLKLSRDDAKPLLRLKGFPSFPLVERQANEVDWWDMVCNVKKLINEKKEDGKVFWQNLAGYKRQEALRPYLSSEEDRKKGKKFARYQLGDLLLHLEKKHGEDWGKVYDEAWERIDKKVEGLSKHIKLEEERRSEDAQSKAALTDWLRAKASFVIEGLKEADKDEFCRCELKLQKWYGDLRGKPFAIEAENSILDISGFSKQYNCAFIWQKDGVKKLNLYLIINYFKGGKLRFKKIKPEAFEANRFYTVINKKSGEIVPMEVNFNFDDPNLIILPLAFGKRQGREFIWNDLLSLETGSLKLANGRVIEKTLYNRRTRQDEPALFVALTFERREVLDSSNIKPMSNLIGVDRGENIPAVIALTDPEGCPLSRFKDSLGNPTHILRIGESYKEKQRTIQAKKEVEQRRAGGYSRKYASKAKNLADDMVRNTARDLLYYAVTQDAMLIFENLSRGFGRQGKRTFMAERQYTRMEDWLTAKLAYEGLPSKTYLSKTLAQYTSKTCSNCGFTITSADYDRVLEKLKKTATGWMTTINGKELKVEGQITYYNRYKRQNVVKDLSVELDRLSEESVNNDISSWTKGRSGEALSLLKKRFSHRPVQEKFVCLNCGFETHADEQAALNIARSWLFLRSQEYKKYQTNKTTGNTDKRAFVETWQSFYRKKLKEVWKPAV

SEQ ID NO: 34723 - protein, 979 aa, synthetic construct
  REGION 1..979: note = engineered CasX variant
QEIKRINKIRRRLVKDSNTKKAGKTGPMKTLLVRVMTPDLRERLENLRKKPENIPQPISNTSRANLNKLLTDYTEMKKAILHVYWEEFQKDPVGLMSRVAQPASKKIDQNKLKPEMDEKGNLTTAGFACSQCGQPLFVYKLEQVSEKGKAYTNYFGRCNVAEHEKLIKLAQLKPEKDSDEAVTYSLGKFGQRALDFYSIHVTKESTHPVKPLAQIAGNRYASVPVGKALSDACMGTIASFLSKYQDIIIEHQKVVKGNQKRLESLRELAGKENLEYPSVTLPPQPHTKEGVDAYNEVIARVRMWVNLNLWQKLKLSRDDAKPLLRLKGFPSFPLVERQANEVDWWDMVCNVKKLINEKKEDGKVFWQNLAGYKRQEALRPYLSSEEDRKKGKKFARYQLGDLLLHLEKKHGEDWGKVYDEAWERIDKKVEGLSKHIKLEEERRSEDAQSKAALTDWLRAKASFVIEGLKEADKDEFCRCELKLQKWYGDLRGKPFAIEAENSILDISGFSKQYNCAFIWQKDGVKKLNLYLIINYFKGGKLRFKKIKPEAFEANRFYTVINKKSGEIVPMEVNFNFDDPNLIILPLAFGKRQGREFIWNDLLSLETGSLKLANGRVIEKTLYNRRTRQDEPALFVALTFERREVLDSSNIKPMSNLIGVDRGENIPAVIALTDPEGCPLSRFKDSLGNPTHILRIGESYKEKQRTIQAKKEVEQRRAGGYSRKYASKAKNLADDMVRNTARDLLYYAVTQDAMLIFENLSRGFGRQGKRTFMAERQYTRMEDWLTAKLAYEGLPSKTYLSKTLAQYTSKTCSNCGFTITSADYDRVLEKLKKTATGWMTTINGKELKVEGQITYYNRYKRQNVVKDLSVELDRLSEESVNNDISSWTKGRSGEALSLLKKRFSHRPVQEKFVCLNCGFETHADEQAALNIARSWLFLRSQEYKKYQTNKTTGNTDKRAFVETWQSFYRKKLKEVWKPAV

SEQ ID NO: 34724 - protein, 980 aa, synthetic construct
  REGION 1..980: note = engineered CasX variant
QEIKRINKIRRRLVKDSNTKKAGKTGPMKTLLVRVMTPDLRERLENLRKKPENIPQPISNTSRANLNKLLTDYTEMKKAILHVYWEEFQKDPVGLMSRVAQPASKKIDQNKLKPEMDEKGNLTTAGFACSQCGQPLFVYKLEQVSEKGKAYTNYFGRCNVAEHEKLIKKLAQLKPEKDSDEAVTYSLGKFGQRALDFYSIHVTKESTHPVKPLAQIAGNRYASGPVGKALSDACMGTIASFLSKYQDIIIEHQKVVKGNQKRLESLRELAGKENLEYPSVTLPPQPHTKEGVDAYNEVIARVRMWVNLNLWQKLKLSRDDAKPLLRLKGFPSFPLVERQANEVDWWDMVCNVKKLINEKKEDGKVFWQNLAGYKRQEALRPYLSSEEDRKKGKKFARYQLGDLLLHLEKKHGEDWGKVYDEAWERIDKKVEGLSKHIKLEEERRSEDAQSKAALTDWLRAKASFVIEGLKEADKDEFCRCELKLQKWYGDLRGKPFAIEAENSILDISGFSKQYNCAFIWQKDGVKKLNLYLIINYFKGGKLRFKKIKPEAFEANRFYTVINKKSGEIVPMEVNFNFDDPNLIILPLAFGKRQGREFIWNDLLSLETGSLKLANGRVIEKTLYNRRTRQDEPALFVALTFERREVLDSSNIKPMSNLIGVDRGENIPAVIALTDPEGCPLSRFKDSLGNPTHILRIGESYKEKQRTIQAKKEVEQRRAGGYSRKYASKAKNLADDMVRNTARDLLYYAVTQDAMLIFENLSRGFGRQGKRTFMAERQYTRMEDWLTAKLAYEGLPSKTYLSKTLAQYTSKTCSNCGFTITSADYDRVLEKLKKTATGWMTTINGKELKVEGQITYYNRYKRQNVVKDLSVELDRLSEESVNNDISSWTKGRSGEALSLLKKRFSHRPVQEKFVCLNCGFETHADEQAALNIARSWLFLRSQEYKKYQTNKTTGNTDKRAFVETWQSFYRKKLKEVWKPAV

SEQ ID NO: 34725 - protein, 978 aa, synthetic construct
  REGION 1..978: note = engineered CasX variant
QEIKRINKIRRRLVKDSNTKKAGKTGPMKTLLVRVMTPDLRERLENLRKKPENIPQPISNTSRANLNKLLTDYTEMKKAILHVYWEEFQKDPVGLMSRVAQPASKKIDQNKLKPEMDEKGNLTTAGFACSQCGQPLFVYKLEQVSEKGKAYTNYFGRCNVAEHEKLIKLAQLKPEKDSDEAVTYSLGKFGQRALDFYSIHVTKESTHPVKPLAQIAGNRYASPVGKALSDACMGTIASFLSKYQDIIIEHQKVVKGNQKRLESLRELAGKENLEYPSVTLPPQPHTKEGVDAYNEVIARVRMWVNLNLWQKLKLSRDDAKPLLRLKGFPSFPLVERQANEVDWWDMVCNVKKLINEKKEDGKVFWQNLAGYKRQEALRPYLSSEEDRKKGKKFARYQLGDLLLHLEKKHGEDWGKVYDEAWERIDKKVEGLSKHIKLEEERRSEDAQSKAALTDWLRAKASFVIEGLKEADKDEFCRCELKLQKWYGDLRGKPFAIEAENSILDISGFSKQYNCAFIWQKDGVKKLNLYLIINYFKGGKLRFKKIKPEAFEANRFYTVINKKSGEIVPMEVNFNFDDPNLIILPLAFGKRQGREFIWNDLLSLETGSLKLANGRVIEKTLYNRRTRQDEPALFVALTFERREVLDSSNIKPMSNLIGVDRGENIPAVIALTDPEGCPLSRFKDSLGNPTHILRIGESYKEKQRTIQAKKEVEQRRAGGYSRKYASKAKNLADDMVRNTARDLLYYAVTQDAMLIFENLSRGFGRQGKRTFMAERQYTRMEDWLTAKLAYEGLPSKTYLSKTLAQYTSKTCSNCGFTITSADYDRVLEKLKKTATGWMTTINGKELKVEGQITYYNRYKRQNVVKDLSVELDRLSEESVNNDISSWTKGRSGEALSLLKKRFSHRPVQEKFVCLNCGFETHADEQAALNIARSWLFLRSQEYKKYQTNKTTGNTDKRAFVETWQSFYRKKLKEVWKPAV

SEQ ID NO: 34726 - protein, 978 aa, synthetic construct
  REGION 1..978: note = engineered CasX variant
QEIKRINKIRRRLVKDSNTKKAGKTGPMKTLLVRVMTPDLRERLENLRKKPENIPQPISNTSRANLNKLLTDYTEMKKAILHVYWEEFQKDPVGLMSRVAQPASKKIDQNKLKPEMDEKGNLTTAGFACSQCGQPLFVYKLEQVSEKGKAYTNYFGRCNVAEHEKLIKLAQLKPEKDSDEAVTYSLGKFGQRALDFYSIHVTKESTHPVKPLAQIAGNRYASYPVGKALSDACMGTIASFLSKYQDIIIEHQKVVKGNQKRLESLRELAGKENLEYPSVTLPPQPHTKEGVDAYNEVIARVRMWVNLNLWQKLKLSRDDAKPLLRLKGFPSFPLVERQANEVDWWDMVCNVKKLINEKKEDGKVFWQNLAGYKRQEALRPYLSSEEDRKKGKKFARYQLGDLLLHLEKKHGEDWGKVYDEAWERIDKKVEGLSKHIKLEEERRSEDAQSKAALTDWLRAKASFVIEGLKEADKDEFCRCELKLQKWYGDLRGKPFAIEAENSILDISGFSKQYNCAFIWQKDGVKKLNLYLIINYFKGGKLRFKKIKPEAFEANRFYTVINKKSGEIVPMEVNFNFDDPNLIILPLAFGKRQGREFIWNDLLSLETGSLKLANGRVIEKTLYNRRTRQDEPALFVALTFERREVLDSSNIKPMNLIGVDRGENIPAVIALTDPEGCPLSRFKDSLGNPTHILRIRESYKEKQRTIQAKKEVEQRRAGGYSRKYASKAKNLADDMVRNTARDLLYYAVTQDAMLIFENLSRGFGRQGKRTFMAERQYTRMEDWLTAKLAYEGLPSKTYLSKTLAQYTSKTCSNCGFTITSADYDRVLEKLKKTATGWMTTINGKELKVEGQITYYNRYKRQNVVKDLSVELDRLSEESVNNDISSWTKGRSGEALSLLKKRFSHRPVQEKFVCLNCGFETHADEQAALNIARSWLFLRSQEYKKYQTNKTTGNTDKRAFVETWQSFYRKKLKEVWKPAV

SEQ ID NO: 34727 - protein, 978 aa, synthetic construct
  REGION 1..978: note = engineered CasX variant
QEIKRINKIRRRLVKDSNTKKAGKTGPMKTLLVRVMTPDLRERLENLRKKPENIPQPISNTSRANLNKLLTDYTEMKKAILHVYWEEFQKDPVGLMSRVAQPASKKIDQNKLKPEMDEKGNLTTAGFACSQCGQPLFVYKLEQVSEKGKAYTNYFGRCNVAEHEKLIKLAQLKPEKDSDEAVTYSLGKFGQRALDFYSIHVTKESTHPVKPLAQIAGNRYASHPVGKALSDACMGTIASFLSKYQDIIIEHQKVVKGNQKRLESLRELAGKENLEYPSVTLPPQPHTKEGVDAYNEVIARVRMWVNLNLWQKLKLSRDDAKPLLRLKGFPSFPLVERQANEVDWWDMVCNVKKLINEKKEDGKVFWQNLAGYKRQEALRPYLSSEEDRKKGKKFARYQLGDLLLHLEKKHGEDWGKVYDEAWERIDKKVEGLSKHIKLEEERRSEDAQSKAALTDWLRAKASFVIEGLKEADKDEFCRCELKLQKWYGDLRGKPFAIEAENSILDISGFSKQYNCAFIWQKDGVKKLNLYLIINYFKGGKLRFKKIKPEAFEANRFYTVINKKSGEIVPMEVNFNFDDPNLIILPLAFGKRQGREFIWNDLLSLETGSLKLANGRVIEKTLYNRRTRQDEPALFVALTFERREVLDSSNIKPMNLIGVDRGENIPAVIALTDPEGCPLSRFKDSLGNPTHILRIRESYKEKQRTIQAKKEVEQRRAGGYSRKYASKAKNLADDMVRNTARDLLYYAVTQDAMLIFENLSRGFGRQGKRTFMAERQYTRMEDWLTAKLAYEGLPSKTYLSKTLAQYTSKTCSNCGFTITSADYDRVLEKLKKTATGWMTTINGKELKVEGQITYYNRYKRQNVVKDLSVELDRLSEESVNNDISSWTKGRSGEALSLLKKRFSHRPVQEKFVCLNCGFETHADEQAALNIARSWLFLRSQEYKKYQTNKTTGNTDKRAFVETWQSFYRKKLKEVWKPAV

SEQ ID NO: 34728 - protein, 978 aa, synthetic construct
  REGION 1..978: note = engineered CasX variant
QEIKRINKIRRRLVKDSNTKKAGKTGPMKTLLVRVMTPDLRERLENLRKKPENIPQPISNTSRANLNKLLTDYTEMKKAILHVYWEEFQKDPVGLMSRVAQPASKKIDQNKLKPEMDEKGNLTTAGFACSQCGQPLFVYKLEQVSEKGKAYTNYFGRCNVAEHEKLIKLAQLKPEKDSDEAVTYSLGKFGQRALDFYSIHVTKESTHPVKPLAQIAGNRYASTPVGKALSDACMGTIASFLSKYQDIIIEHQKVVKGNQKRLESLRELAGKENLEYPSVTLPPQPHTKEGVDAYNEVIARVRMWVNLNLWQKLKLSRDDAKPLLRLKGFPSFPLVERQANEVDWWDMVCNVKKLINEKKEDGKVFWQNLAGYKRQEALRPYLSSEEDRKKGKKFARYQLGDLLLHLEKKHGEDWGKVYDEAWERIDKKVEGLSKHIKLEEERRSEDAQSKAALTDWLRAKASFVIEGLKEADKDEFCRCELKLQKWYGDLRGKPFAIEAENSILDISGFSKQYNCAFIWQKDGVKKLNLYLIINYFKGGKLRFKKIKPEAFEANRFYTVINKKSGEIVPMEVNFNFDDPNLIILPLAFGKRQGREFIWNDLLSLETGSLKLANGRVIEKTLYNRRTRQDEPALFVALTFERREVLDSSNIKPMNLIGVDRGENIPAVIALTDPEGCPLSRFKDSLGNPTHILRIRESYKEKQRTIQAKKEVEQRRAGGYSRKYASKAKNLADDMVRNTARDLLYYAVTQDAMLIFENLSRGFGRQGKRTFMAERQYTRMEDWLTAKLAYEGLPSKTYLSKTLAQYTSKTCSNCGFTITSADYDRVLEKLKKTATGWMTTINGKELKVEGQITYYNRYKRQNVVKDLSVELDRLSEESVNNDISSWTKGRSGEALSLLKKRFSHRPVQEKFVCLNCGFETHADEQAALNIARSWLFLRSQEYKKYQTNKTTGNTDKRAFVETWQSFYRKKLKEVWKPAV

SEQ ID NO: 34729 - protein, 978 aa, synthetic construct
  REGION 1..978: note = engineered CasX variant
QEIKRINKIRRRLVKDSNTKKAGKTGPMKTLLVRVMTPDLRERLENLRKKPENIPQPISNTSRANLNKLLTDYTEMKKAILHVYWEEFQKDPVGLMSRVAQPASKKIDQNKLKPEMDEKGNLTTAGFACSQCGQPLFVYKLEQVSEKGKAYTNYFGRCNVAEHEKLIKLAQLKPEKDSDEAVTYSLGKFGQRALDFYSIHVTKESTHPVKPLAQIAGNRYASAPVGKALSDACMGTIASFLSKYQDIIIEHQKVVKGNQKRLESLRELAGKENLEYPSVTLPPQPHTKEGVDAYNEVIARVRMWVNLNLWQKLKLSRDDAKPLLRLKGFPSFPLVERQANEVDWWDMVCNVKKLINEKKEDGKVFWQNLAGYKRQEALRPYLSSEEDRKKGKKFARYQLGDLLLHLEKKHGEDWGKVYDEAWERIDKKVEGLSKHIKLEEERRSEDAQSKAALTDWLRAKASFVIEGLKEADKDEFCRCELKLQKWYGDLRGKPFAIEAENSILDISGFSKQYNCAFIWQKDGVKKLNLYLIINYFKGGKLRFKKIKPEAFEANRFYTVINKKSGEIVPMEVNFNFDDPNLIILPLAFGKRQGREFIWNDLLSLETGSLKLANGRVIEKTLYNRRTRQDEPALFVALTFERREVLDSSNIKPMNLIGVDRGENIPAVIALTDPEGCPLSRFKDSLGNPTHILRIRESYKEKQRTIQAKKEVEQRRAGGYSRKYASKAKNLADDMVRNTARDLLYYAVTQDAMLIFENLSRGFGRQGKRTFMAERQYTRMEDWLTAKLAYEGLPSKTYLSKTLAQYTSKTCSNCGFTITSADYDRVLEKLKKTATGWMTTINGKELKVEGQITYYNRYKRQNVVKDLSVELDRLSEESVNNDISSWTKGRSGEALSLLKKRFSHRPVQEKFVCLNCGFETHADEQAALNIARSWLFLRSQEYKKYQTNKTTGNTDKRAFVETWQSFYRKKLKEVWKPAV

SEQ ID NO: 34730 - protein, 978 aa, synthetic construct
  REGION 1..978: note = engineered CasX variant
QEIKRINKIRRRLVKDSNTKKAGKTGPMKTLLVRVMTPDLRERLENLRKKPENIPQPISNTSRANLNKLLTDYTEMKKAILHVYWEEFQKDPVGLMSRVAQPASKKIDQNKLKPEMDEKGNLTTAGFACSQCGQPLFVYKLEQVSEKGKAYTNYFGRCNVAEHEKLIKLAQLKPEKDSDEAVTYSLGKFGQRALDFYSIHVTKESTHPVKPLAQIAGNRYASVPVGKALSDACMGTIASFLSKYQDIIIEHQKVVKGNQKRLESLRELAGKENLEYPSVTLPPQPHTKEGVDAYNEVIARVRMWVNLNLWQKLKLSRDDAKPLLRLKGFPSFPLVERQANEVDWWDMVCNVKKLINEKKEDGKVFWQNLAGYKRQEALRPYLSSEEDRKKGKKFARYQLGDLLLHLEKKHGEDWGKVYDEAWERIDKKVEGLSKHIKLEEERRSEDAQSKAALTDWLRAKASFVIEGLKEADKDEFCRCELKLQKWYGDLRGKPFAIEAENSILDISGFSKQYNCAFIWQKDGVKKLNLYLIINYFKGGKLRFKKIKPEAFEANRFYTVINKKSGEIVPMEVNFNFDDPNLIILPLAFGKRQGREFIWNDLLSLETGSLKLANGRVIEKTLYNRRTRQDEPALFVALTFERREVLDSSNIKPMNLIGVDRGENIPAVIALTDPEGCPLSRFKDSLGNPTHILRIRESYKEKQRTIQAKKEVEQRRAGGYSRKYASKAKNLADDMVRNTARDLLYYAVTQDAMLIFENLSRGFGRQGKRTFMAERQYTRMEDWLTAKLAYEGLPSKTYLSKTLAQYTSKTCSNCGFTITSADYDRVLEKLKKTATGWMTTINGKELKVEGQITYYNRYKRQNVVKDLSVELDRLSEESVNNDISSWTKGRSGEALSLLKKRFSHRPVQEKFVCLNCGFETHADEQAALNIARSWLFLRSQEYKKYQTNKTTGNTDKRAFVETWQSFYRKKLKEVWKPAV

SEQ ID NO: 34731 - protein, 979 aa, synthetic construct
  REGION 1..979: note = engineered CasX variant
QEIKRINKIRRRLVKDSNTKKAGKTGPMKTLLVRVMTPDLRERLENLRKKPENIPQPISNTSRANLNKLLTDYTEMKKAILHVYWEEFQKDPVGLMSRVAQPASKKIDQNKLKPEMDEKGNLTTAGFACSQCGQPLFVYKLEQVSEKGKAYTNYFGRCNVAEHEKLIKKLAQLKPEKDSDEAVTYSLGKFGQRALDFYSIHVTKESTHPVKPLAQIAGNRYASGPVGKALSDACMGTIASFLSKYQDIIIEHQKVVKGNQKRLESLRELAGKENLEYPSVTLPPQPHTKEGVDAYNEVIARVRMWVNLNLWQKLKLSRDDAKPLLRLKGFPSFPLVERQANEVDWWDMVCNVKKLINEKKEDGKVFWQNLAGYKRQEALRPYLSSEEDRKKGKKFARYQLGDLLLHLEKKHGEDWGKVYDEAWERIDKKVEGLSKHIKLEEERRSEDAQSKAALTDWLRAKASFVIEGLKEADKDEFCRCELKLQKWYGDLRGKPFAIEAENSILDISGFSKQYNCAFIWQKDGVKKLNLYLIINYFKGGKLRFKKIKPEAFEANRFYTVINKKSGEIVPMEVNFNFDDPNLIILPLAFGKRQGREFIWNDLLSLETGSLKLANGRVIEKTLYNRRTRQDEPALFVALTFERREVLDSSNIKPMNLIGVDRGENIPAVIALTDPEGCPLSRFKDSLGNPTHILRIRESYKEKQRTIQAKKEVEQRRAGGYSRKYASKAKNLADDMVRNTARDLLYYAVTQDAMLIFENLSRGFGRQGKRTFMAERQYTRMEDWLTAKLAYEGLPSKTYLSKTLAQYTSKTCSNCGFTITSADYDRVLEKLKKTATGWMTTINGKELKVEGQITYYNRYKRQNVVKDLSVELDRLSEESVNNDISSWTKGRSGEALSLLKKRFSHRPVQEKFVCLNCGFETHADEQAALNIARSWLFLRSQEYKKYQTNKTTGNTDKRAFVETWQSFYRKKLKEVWKPAV

SEQ ID NO: 34732 - protein, 977 aa, synthetic construct
  REGION 1..977: note = engineered CasX variant
QEIKRINKIRRRLVKDSNTKKAGKTGPMKTLLVRVMTPDLRERLENLRKKPENIPQPISNTSRANLNKLLTDYTEMKKAILHVYWEEFQKDPVGLMSRVAQPASKKIDQNKLKPEMDEKGNLTTAGFACSQCGQPLFVYKLEQVSEKGKAYTNYFGRCNVAEHEKLIKLAQLKPEKDSDEAVTYSLGKFGQRALDFYSIHVTKESTHPVKPLAQIAGNRYASPVGKALSDACMGTIASFLSKYQDIIIEHQKVVKGNQKRLESLRELAGKENLEYPSVTLPPQPHTKEGVDAYNEVIARVRMWVNLNLWQKLKLSRDDAKPLLRLKGFPSFPLVERQANEVDWWDMVCNVKKLINEKKEDGKVFWQNLAGYKRQEALRPYLSSEEDRKKGKKFARYQLGDLLLHLEKKHGEDWGKVYDEAWERIDKKVEGLSKHIKLEEERRSEDAQSKAALTDWLRAKASFVIEGLKEADKDEFCRCELKLQKWYGDLRGKPFAIEAENSILDISGFSKQYNCAFIWQKDGVKKLNLYLIINYFKGGKLRFKKIKPEAFEANRFYTVINKKSGEIVPMEVNFNFDDPNLIILPLAFGKRQGREFIWNDLLSLETGSLKLANGRVIEKTLYNRRTRQDEPALFVALTFERREVLDSSNIKPMNLIGVDRGENIPAVIALTDPEGCPLSRFKDSLGNPTHILRIRESYKEKQRTIQAKKEVEQRRAGGYSRKYASKAKNLADDMVRNTARDLLYYAVTQDAMLIFENLSRGFGRQGKRTFMAERQYTRMEDWLTAKLAYEGLPSKTYLSKTLAQYTSKTCSNCGFTITSADYDRVLEKLKKTATGWMTTINGKELKVEGQITYYNRYKRQNVVKDLSVELDRLSEESVNNDISSWTKGRSGEALSLLKKRFSHRPVQEKFVCLNCGFETHADEQAALNIARSWLFLRSQEYKKYQTNKTTGNTDKRAFVETWQSFYRKKLKEVWKPAV

SEQ ID NO: 34733 - protein, 978 aa, synthetic construct
  REGION 1..978: note = engineered CasX variant
QEIKRINKIRRRLVKDSNTKKAGKTGPMKTLLVRVMTPDLRERLENLRKKPENIPQPISNTSRANLNKLLTDYTEMKKAILHVYWEEFQKDPVGLMSRVAQPASKKIDQNKLKPEMDEKGNLTTAGFACSQCGQPLFVYKLEQVSEKGKAYTNYFGRCNVAEHEKLIKLAQLKPEKDSDEAVTYSLGKFGQRALDFYSIHVTKESTHPVKPLAQIAGNRYASYPVGKALSDACMGTIASFLSKYQDIIIEHQKVVKGNQKRLESLRELAGKENLEYPSVTLPPQPHTKEGVDAYNEVIARVRMWVNLNLWQKLKLSRDDAKPLLRLKGFPSFPLVERQANEVDWWDMVCNVKKLINEKKEDGKVFWQNLAGYKRQEALRPYLSSEEDRKKGKKFARYQLGDLLLHLEKKHGEDWGKVYDEAWERIDKKVEGLSKHIKLEEERRSEDAQSKAALTDWLRAKASFVIEGLKEADKDEFCRCELKLQKWYGDLRGKPFAIEAENSILDISGFSKQYNCAFIWQKDGVKKLNLYLIINYFKGGKLRFKKIKPEAFEANRFYTVINKKSGEIVPMEVNFNFDDPNLIILPLAFGKRQGREFIWNDLLSLETGSLKLANGRVIEKTLYNRRTRQDEPALFVALTFERREVLDSSNIKPMNLIGVDRGENIPAVIALTDPEGCPLSRFKDSLGNPTHILRIGESYKEKQRTIQAKKEVEQRRAGGYSRKYASKAKNLADDMVRNTARDLLYYAVTQDAMLIFENLSRGFGRQGKRTFSAERQYTRMEDWLTAKLAYEGLPSKTYLSKTLAQYTSKTCSNCGFTITSADYDRVLEKLKKTATGWMTTINGKELKVEGQITYYNRYKRQNVVKDLSVELDRLSEESVNNDISSWTKGRSGEALSLLKKRFSHRPVQEKFVCLNCGFETHADEQAALNIARSWLFLRSQEYKKYQTNKTTGNTDKRAFVETWQSFYRKKLKEVWKPAV

SEQ ID NO: 34734 - protein, 978 aa, synthetic construct
  REGION 1..978: note = engineered CasX variant
QEIKRINKIRRRLVKDSNTKKAGKTGPMKTLLVRVMTPDLRERLENLRKKPENIPQPISNTSRANLNKLLTDYTEMKKAILHVYWEEFQKDPVGLMSRVAQPASKKIDQNKLKPEMDEKGNLTTAGFACSQCGQPLFVYKLEQVSEKGKAYTNYFGRCNVAEHEKLIKLAQLKPEKDSDEAVTYSLGKFGQRALDFYSIHVTKESTHPVKPLAQIAGNRYASHPVGKALSDACMGTIASFLSKYQDIIIEHQKVVKGNQKRLESLRELAGKENLEYPSVTLPPQPHTKEGVDAYNEVIARVRMWVNLNLWQKLKLSRDDAKPLLRLKGFPSFPLVERQANEVDWWDMVCNVKKLINEKKEDGKVFWQNLAGYKRQEALRPYLSSEEDRKKGKKFARYQLGDLLLHLEKKHGEDWGKVYDEAWERIDKKVEGLSKHIKLEEERRSEDAQSKAALTDWLRAKASFVIEGLKEADKDEFCRCELKLQKWYGDLRGKPFAIEAENSILDISGFSKQYNCAFIWQKDGVKKLNLYLIINYFKGGKLRFKKIKPEAFEANRFYTVINKKSGEIVPMEVNFNFDDPNLIILPLAFGKRQGREFIWNDLLSLETGSLKLANGRVIEKTLYNRRTRQDEPALFVALTFERREVLDSSNIKPMNLIGVDRGENIPAVIALTDPEGCPLSRFKDSLGNPTHILRIGESYKEKQRTIQAKKEVEQRRAGGYSRKYASKAKNLADDMVRNTARDLLYYAVTQDAMLIFENLSRGFGRQGKRTFSAERQYTRMEDWLTAKLAYEGLPSKTYLSKTLAQYTSKTCSNCGFTITSADYDRVLEKLKKTATGWMTTINGKELKVEGQITYYNRYKRQNVVKDLSVELDRLSEESVNNDISSWTKGRSGEALSLLKKRFSHRPVQEKFVCLNCGFETHADEQAALNIARSWLFLRSQEYKKYQTNKTTGNTDKRAFVETWQSFYRKKLKEVWKPAV

SEQ ID NO: 34735 - protein, 978 aa, synthetic construct
  REGION 1..978: note = engineered CasX variant
QEIKRINKIRRRLVKDSNTKKAGKTGPMKTLLVRVMTPDLRERLENLRKKPENIPQPISNTSRANLNKLLTDYTEMKKAILHVYWEEFQKDPVGLMSRVAQPASKKIDQNKLKPEMDEKGNLTTAGFACSQCGQPLFVYKLEQVSEKGKAYTNYFGRCNVAEHEKLIKLAQLKPEKDSDEAVTYSLGKFGQRALDFYSIHVTKESTHPVKPLAQIAGNRYASTPVGKALSDACMGTIASFLSKYQDIIIEHQKVVKGNQKRLESLRELAGKENLEYPSVTLPPQPHTKEGVDAYNEVIARVRMWVNLNLWQKLKLSRDDAKPLLRLKGFPSFPLVERQANEVDWWDMVCNVKKLINEKKEDGKVFWQNLAGYKRQEALRPYLSSEEDRKKGKKFARYQLGDLLLHLEKKHGEDWGKVYDEAWERIDKKVEGLSKHIKLEEERRSEDAQSKAALTDWLRAKASFVIEGLKEADKDEFCRCELKLQKWYGDLRGKPFAIEAENSILDISGFSKQYNCAFIWQKDGVKKLNLYLIINYFKGGKLRFKKIKPEAFEANRFYTVINKKSGEIVPMEVNFNFDDPNLIILPLAFGKRQGREFIWNDLLSLETGSLKLANGRVIEKTLYNRRTRQDEPALFVALTFERREVLDSSNIKPMNLIGVDRGENIPAVIALTDPEGCPLSRFKDSLGNPTHILRIGESYKEKQRTIQAKKEVEQRRAGGYSRKYASKAKNLADDMVRNTARDLLYYAVTQDAMLIFENLSRGFGRQGKRTFSAERQYTRMEDWLTAKLAYEGLPSKTYLSKTLAQYTSKTCSNCGFTITSADYDRVLEKLKKTATGWMTTINGKELKVEGQITYYNRYKRQNVVKDLSVELDRLSEESVNNDISSWTKGRSGEALSLLKKRFSHRPVQEKFVCLNCGFETHADEQAALNIARSWLFLRSQEYKKYQTNKTTGNTDKRAFVETWQSFYRKKLKEVWKPAV

SEQ ID NO: 34736 - protein, 978 aa, synthetic construct
  REGION 1..978: note = engineered CasX variant
QEIKRINKIRRRLVKDSNTKKAGKTGPMKTLLVRVMTPDLRERLENLRKKPENIPQPISNTSRANLNKLLTDYTEMKKAILHVYWEEFQKDPVGLMSRVAQPASKKIDQNKLKPEMDEKGNLTTAGFACSQCGQPLFVYKLEQVSEKGKAYTNYFGRCNVAEHEKLIKLAQLKPEKDSDEAVTYSLGKFGQRALDFYSIHVTKESTHPVKPLAQIAGNRYASAPVGKALSDACMGTIASFLSKYQDIIIEHQKVVKGNQKRLESLRELAGKENLEYPSVTLPPQPHTKEGVDAYNEVIARVRMWVNLNLWQKLKLSRDDAKPLLRLKGFPSFPLVERQANEVDWWDMVCNVKKLINEKKEDGKVFWQNLAGYKRQEALRPYLSSEEDRKKGKKFARYQLGDLLLHLEKKHGEDWGKVYDEAWERIDKKVEGLSKHIKLEEERRSEDAQSKAALTDWLRAKASFVIEGLKEADKDEFCRCELKLQKWYGDLRGKPFAIEAENSILDISGFSKQYNCAFIWQKDGVKKLNLYLIINYFKGGKLRFKKIKPEAFEANRFYTVINKKSGEIVPMEVNFNFDDPNLIILPLAFGKRQGREFIWNDLLSLETGSLKLANGRVIEKTLYNRRTRQDEPALFVALTFERREVLDSSNIKPMNLIGVDRGENIPAVIALTDPEGCPLSRFKDSLGNPTHILRIGESYKEKQRTIQAKKEVEQRRAGGYSRKYASKAKNLADDMVRNTARDLLYYAVTQDAMLIFENLSRGFGRQGKRTFSAERQYTRMEDWLTAKLAYEGLPSKTYLSKTLAQYTSKTCSNCGFTITSADYDRVLEKLKKTATGWMTTINGKELKVEGQITYYNRYKRQNVVKDLSVELDRLSEESVNNDISSWTKGRSGEALSLLKKRFSHRPVQEKFVCLNCGFETHADEQAALNIARSWLFLRSQEYKKYQTNKTTGNTDKRAFVETWQSFYRKKLKEVWKPAV

SEQ ID NO: 34737 - protein, 978 aa, synthetic construct
  REGION 1..978: note = engineered CasX variant
QEIKRINKIRRRLVKDSNTKKAGKTGPMKTLLVRVMTPDLRERLENLRKKPENIPQPISNTSRANLNKLLTDYTEMKKAILHVYWEEFQKDPVGLMSRVAQPASKKIDQNKLKPEMDEKGNLTTAGFACSQCGQPLFVYKLEQVSEKGKAYTNYFGRCNVAEHEKLIKLAQLKPEKDSDEAVTYSLGKFGQRALDFYSIHVTKESTHPVKPLAQIAGNRYASVPVGKALSDACMGTIASFLSKYQDIIIEHQKVVKGNQKRLESLRELAGKENLEYPSVTLPPQPHTKEGVDAYNEVIARVRMWVNLNLWQKLKLSRDDAKPLLRLKGFPSFPLVERQANEVDWWDMVCNVKKLINEKKEDGKVFWQNLAGYKRQEALRPYLSSEEDRKKGKKFARYQLGDLLLHLEKKHGEDWGKVYDEAWERIDKKVEGLSKHIKLEEERRSEDAQSKAALTDWLRAKASFVIEGLKEADKDEFCRCELKLQKWYGDLRGKPFAIEAENSILDISGFSKQYNCAFIWQKDGVKKLNLYLIINYFKGGKLRFKKIKPEAFEANRFYTVINKKSGEIVPMEVNFNFDDPNLIILPLAFGKRQGREFIWNDLLSLETGSLKLANGRVIEKTLYNRRTRQDEPALFVALTFERREVLDSSNIKPMNLIGVDRGENIPAVIALTDPEGCPLSRFKDSLGNPTHILRIGESYKEKQRTIQAKKEVEQRRAGGYSRKYASKAKNLADDMVRNTARDLLYYAVTQDAMLIFENLSRGFGRQGKRTFSAERQYTRMEDWLTAKLAYEGLPSKTYLSKTLAQYTSKTCSNCGFTITSADYDRVLEKLKKTATGWMTTINGKELKVEGQITYYNRYKRQNVVKDLSVELDRLSEESVNNDISSWTKGRSGEALSLLKKRFSHRPVQEKFVCLNCGFETHADEQAALNIARSWLFLRSQEYKKYQTNKTTGNTDKRAFVETWQSFYRKKLKEVWKPAV

SEQ ID NO: 34738 - protein, 979 aa, synthetic construct
  REGION 1..979: note = engineered CasX variant
QEIKRINKIRRRLVKDSNTKKAGKTGPMKTLLVRVMTPDLRERLENLRKKPENIPQPISNTSRANLNKLLTDYTEMKKAILHVYWEEFQKDPVGLMSRVAQPASKKIDQNKLKPEMDEKGNLTTAGFACSQCGQPLFVYKLEQVSEKGKAYTNYFGRCNVAEHEKLIKKLAQLKPEKDSDEAVTYSLGKFGQRALDFYSIHVTKESTHPVKPLAQIAGNRYASGPVGKALSDACMGTIASFLSKYQDIIIEHQKVVKGNQKRLESLRELAGKENLEYPSVTLPPQPHTKEGVDAYNEVIARVRMWVNLNLWQKLKLSRDDAKPLLRLKGFPSFPLVERQANEVDWWDMVCNVKKLINEKKEDGKVFWQNLAGYKRQEALRPYLSSEEDRKKGKKFARYQLGDLLLHLEKKHGEDWGKVYDEAWERIDKKVEGLSKHIKLEEERRSEDAQSKAALTDWLRAKASFVIEGLKEADKDEFCRCELKLQKWYGDLRGKPFAIEAENSILDISGFSKQYNCAFIWQKDGVKKLNLYLIINYFKGGKLRFKKIKPEAFEANRFYTVINKKSGEIVPMEVNFNFDDPNLIILPLAFGKRQGREFIWNDLLSLETGSLKLANGRVIEKTLYNRRTRQDEPALFVALTFERREVLDSSNIKPMNLIGVDRGENIPAVIALTDPEGCPLSRFKDSLGNPTHILRIGESYKEKQRTIQAKKEVEQRRAGGYSRKYASKAKNLADDMVRNTARDLLYYAVTQDAMLIFENLSRGFGRQGKRTFSAERQYTRMEDWLTAKLAYEGLPSKTYLSKTLAQYTSKTCSNCGFTITSADYDRVLEKLKKTATGWMTTINGKELKVEGQITYYNRYKRQNVVKDLSVELDRLSEESVNNDISSWTKGRSGEALSLLKKRFSHRPVQEKFVCLNCGFETHADEQAALNIARSWLFLRSQEYKKYQTNKTTGNTDKRAFVETWQSFYRKKLKEVWKPAV

SEQ ID NO: 34739 - protein, 977 aa, synthetic construct
  REGION 1..977: note = engineered CasX variant
QEIKRINKIRRRLVKDSNTKKAGKTGPMKTLLVRVMTPDLRERLENLRKKPENIPQPISNTSRANLNKLLTDYTEMKKAILHVYWEEFQKDPVGLMSRVAQPASKKIDQNKLKPEMDEKGNLTTAGFACSQCGQPLFVYKLEQVSEKGKAYTNYFGRCNVAEHEKLIKLAQLKPEKDSDEAVTYSLGKFGQRALDFYSIHVTKESTHPVKPLAQIAGNRYASPVGKALSDACMGTIASFLSKYQDIIIEHQKVVKGNQKRLESLRELAGKENLEYPSVTLPPQPHTKEGVDAYNEVIARVRMWVNLNLWQKLKLSRDDAKPLLRLKGFPSFPLVERQANEVDWWDMVCNVKKLINEKKEDGKVFWQNLAGYKRQEALRPYLSSEEDRKKGKKFARYQLGDLLLHLEKKHGEDWGKVYDEAWERIDKKVEGLSKHIKLEEERRSEDAQSKAALTDWLRAKASFVIEGLKEADKDEFCRCELKLQKWYGDLRGKPFAIEAENSILDISGFSKQYNCAFIWQKDGVKKLNLYLIINYFKGGKLRFKKIKPEAFEANRFYTVINKKSGEIVPMEVNFNFDDPNLIILPLAFGKRQGREFIWNDLLSLETGSLKLANGRVIEKTLYNRRTRQDEPALFVALTFERREVLDSSNIKPMNLIGVDRGENIPAVIALTDPEGCPLSRFKDSLGNPTHILRIGESYKEKQRTIQAKKEVEQRRAGGYSRKYASKAKNLADDMVRNTARDLLYYAVTQDAMLIFENLSRGFGRQGKRTFSAERQYTRMEDWLTAKLAYEGLPSKTYLSKTLAQYTSKTCSNCGFTITSADYDRVLEKLKKTATGWMTTINGKELKVEGQITYYNRYKRQNVVKDLSVELDRLSEESVNNDISSWTKGRSGEALSLLKKRFSHRPVQEKFVCLNCGFETHADEQAALNIARSWLFLRSQEYKKYQTNKTTGNTDKRAFVETWQSFYRKKLKEVWKPAV

SEQ ID NO: 34740 - protein, 978 aa, synthetic construct
  REGION 1..978: note = engineered CasX variant
QEIKRINKIRRRLVKDSNTKKAGKTGPMKTLLVRVMTPDLRERLENLRKKPENIPQPISNTSRANLNKLLTDYTEMKKAILHVYWEEFQKDPVGLMSRVAQPASKKIDQNKLKPEMDEKGNLTTAGFACSQCGQPLFVYKLEQVSEKGKAYTNYFGRCNVAEHEKLIKLAQLKPEKDSDEAVTYSLGKFGQRALDFYSIHVTKESTHPVKPLAQIAGNRYASYPVGKALSDACMGTIASFLSKYQDIIIEHQKVVKGNQKRLESLRELAGKENLEYPSVTLPPQPHTKEGVDAYNEVIARVRMWVNLNLWQKLKLSRDDAKPLLRLKGFPSFPLVERQANEVDWWDMVCNVKKLINEKKEDGKVFWQNLAGYKRQEALRPYLSSEEDRKKGKKFARYQLGDLLLHLEKKHGEDWGKVYDEAWERIDKKVEGLSKHIKLEEERRSEDAQSKAALTDWLRAKASFVIEGLKEADKDEFCRCELKLQKWYGDLRGKPFAIEAENSILDISGFSKQYNCAFIWQKDGVKKLNLYLIINYFKGGKLRFKKIKPEAFEANRFYTVINKKSGEIVPMEVNFNFDDPNLIILPLAFGKRQGREFIWNDLLSLETGSLKLANGRVIEKTLYNRRTRQDEPALFVALTFERREVLDSSNIKPMNLIGVDRGENIPAVIALTDPEGCPLSRFKDSLGNPTHILRIGESYKEKQRTIQAKKEVEQRRAGGYSRKYASKAKNLADDMVRNTARDLLYYAVTQDAMLIFENLSRGFGRQGKRTFMAERQYTRMEDWLTAKLAYEGLPSKTYLSKTLAQYTSKTCSNCGFTITSADYDRVLEKLKKTATGWMTTINGKELKVEGQITYYNRYKRQNVVKDLSVELDRLSEESVNNDISSWDKGRSGEALSLLKKRFSHRPVQEKFVCLNCGFETHADEQAALNIARSWLFLRSQEYKKYQTNKTTGNTDKRAFVETWQSFYRKKLKEVWKPAV

SEQ ID NO: 34741 - protein, 978 aa, synthetic construct
  REGION 1..978: note = engineered CasX variant
QEIKRINKIRRRLVKDSNTKKAGKTGPMKTLLVRVMTPDLRERLENLRKKPENIPQPISNTSRANLNKLLTDYTEMKKAILHVYWEEFQKDPVGLMSRVAQPASKKIDQNKLKPEMDEKGNLTTAGFACSQCGQPLFVYKLEQVSEKGKAYTNYFGRCNVAEHEKLIKLAQLKPEKDSDEAVTYSLGKFGQRALDFYSIHVTKESTHPVKPLAQIAGNRYASHPVGKALSDACMGTIASFLSKYQDIIIEHQKVVKGNQKRLESLRELAGKENLEYPSVTLPPQPHTKEGVDAYNEVIARVRMWVNLNLWQKLKLSRDDAKPLLRLKGFPSFPLVERQANEVDWWDMVCNVKKLINEKKEDGKVFWQNLAGYKRQEALRPYLSSEEDRKKGKKFARYQLGDLLLHLEKKHGEDWGKVYDEAWERIDKKVEGLSKHIKLEEERRSEDAQSKAALTDWLRAKASFVIEGLKEADKDEFCRCELKLQKWYGDLRGKPFAIEAENSILDISGFSKQYNCAFIWQKDGVKKLNLYLIINYFKGGKLRFKKIKPEAFEANRFYTVINKKSGEIVPMEVNFNFDDPNLIILPLAFGKRQGREFIWNDLLSLETGSLKLANGRVIEKTLYNRRTRQDEPALFVALTFERREVLDSSNIKPMNLIGVDRGENIPAVIALTDPEGCPLSRFKDSLGNPTHILRIGESYKEKQRTIQAKKEVEQRRAGGYSRKYASKAKNLADDMVRNTARDLLYYAVTQDAMLIFENLSRGFGRQGKRTFMAERQYTRMEDWLTAKLAYEGLPSKTYLSKTLAQYTSKTCSNCGFTITSADYDRVLEKLKKTATGWMTTINGKELKVEGQITYYNRYKRQNVVKDLSVELDRLSEESVNNDISSWDKGRSGEALSLLKKRFSHRPVQEKFVCLNCGFETHADEQAALNIARSWLFLRSQEYKKYQTNKTTGNTDKRAFVETWQSFYRKKLKEVWKPAV

SEQ ID NO: 34742 - protein, 978 aa, synthetic construct
  REGION 1..978: note = engineered CasX variant
QEIKRINKIRRRLVKDSNTKKAGKTGPMKTLLVRVMTPDLRERLENLRKKPENIPQPISNTSRANLNKLLTDYTEMKKAILHVYWEEFQKDPVGLMSRVAQPASKKIDQNKLKPEMDEKGNLTTAGFACSQCGQPLFVYKLEQVSEKGKAYTNYFGRCNVAEHEKLIKLAQLKPEKDSDEAVTYSLGKFGQRALDFYSIHVTKESTHPVKPLAQIAGNRYASTPVGKALSDACMGTIASFLSKYQDIIIEHQKVVKGNQKRLESLRELAGKENLEYPSVTLPPQPHTKEGVDAYNEVIARVRMWVNLNLWQKLKLSRDDAKPLLRLKGFPSFPLVERQANEVDWWDMVCNVKKLINEKKEDGKVFWQNLAGYKRQEALRPYLSSEEDRKKGKKFARYQLGDLLLHLEKKHGEDWGKVYDEAWERIDKKVEGLSKHIKLEEERRSEDAQSKAALTDWLRAKASFVIEGLKEADKDEFCRCELKLQKWYGDLRGKPFAIEAENSILDISGFSKQYNCAFIWQKDGVKKLNLYLIINYFKGGKLRFKKIKPEAFEANRFYTVINKKSGEIVPMEVNFNFDDPNLIILPLAFGKRQGREFIWNDLLSLETGSLKLANGRVIEKTLYNRRTRQDEPALFVALTFERREVLDSSNIKPMNLIGVDRGENIPAVIALTDPEGCPLSRFKDSLGNPTHILRIGESYKEKQRTIQAKKEVEQRRAGGYSRKYASKAKNLADDMVRNTARDLLYYAVTQDAMLIFENLSRGFGRQGKRTFMAERQYTRMEDWLTAKLAYEGLPSKTYLSKTLAQYTSKTCSNCGFTITSADYDRVLEKLKKTATGWMTTINGKELKVEGQITYYNRYKRQNVVKDLSVELDRLSEESVNNDISSWDKGRSGEALSLLKKRFSHRPVQEKFVCLNCGFETHADEQAALNIARSWLFLRSQEYKKYQTNKTTGNTDKRAFVETWQSFYRKKLKEVWKPAV

SEQ ID NO: 34743 - protein, 978 aa, synthetic construct
  REGION 1..978: note = engineered CasX variant
QEIKRINKIRRRLVKDSNTKKAGKTGPMKTLLVRVMTPDLRERLENLRKKPENIPQPISNTSRANLNKLLTDYTEMKKAILHVYWEEFQKDPVGLMSRVAQPASKKIDQNKLKPEMDEKGNLTTAGFACSQCGQPLFVYKLEQVSEKGKAYTNYFGRCNVAEHEKLIKLAQLKPEKDSDEAVTYSLGKFGQRALDFYSIHVTKESTHPVKPLAQIAGNRYASAPVGKALSDACMGTIASFLSKYQDIIIEHQKVVKGNQKRLESLRELAGKENLEYPSVTLPPQPHTKEGVDAYNEVIARVRMWVNLNLWQKLKLSRDDAKPLLRLKGFPSFPLVERQANEVDWWDMVCNVKKLINEKKEDGKVFWQNLAGYKRQEALRPYLSSEEDRKKGKKFARYQLGDLLLHLEKKHGEDWGKVYDEAWERIDKKVEGLSKHIKLEEERRSEDAQSKAALTDWLRAKASFVIEGLKEADKDEFCRCELKLQKWYGDLRGKPFAIEAENSILDISGFSKQYNCAFIWQKDGVKKLNLYLIINYFKGGKLRFKKIKPEAFEANRFYTVINKKSGEIVPMEVNFNFDDPNLIILPLAFGKRQGREFIWNDLLSLETGSLKLANGRVIEKTLYNRRTRQDEPALFVALTFERREVLDSSNIKPMNLIGVDRGENIPAVIALTDPEGCPLSRFKDSLGNPTHILRIGESYKEKQRTIQAKKEVEQRRAGGYSRKYASKAKNLADDMVRNTARDLLYYAVTQDAMLIFENLSRGFGRQGKRTFMAERQYTRMEDWLTAKLAYEGLPSKTYLSKTLAQYTSKTCSNCGFTITSADYDRVLEKLKKTATGWMTTINGKELKVEGQITYYNRYKRQNVVKDLSVELDRLSEESVNNDISSWDKGRSGEALSLLKKRFSHRPVQEKFVCLNCGFETHADEQAALNIARSWLFLRSQEYKKYQTNKTTGNTDKRAFVETWQSFYRKKLKEVWKPAV

SEQ ID NO: 34744 - protein, 978 aa, synthetic construct
  REGION 1..978: note = engineered CasX variant
QEIKRINKIRRRLVKDSNTKKAGKTGPMKTLLVRVMTPDLRERLENLRKKPENIPQPISNTSRANLNKLLTDYTEMKKAILHVYWEEFQKDPVGLMSRVAQPASKKIDQNKLKPEMDEKGNLTTAGFACSQCGQPLFVYKLEQVSEKGKAYTNYFGRCNVAEHEKLIKLAQLKPEKDSDEAVTYSLGKFGQRALDFYSIHVTKESTHPVKPLAQIAGNRYASVPVGKALSDACMGTIASFLSKYQDIIIEHQKVVKGNQKRLESLRELAGKENLEYPSVTLPPQPHTKEGVDAYNEVIARVRMWVNLNLWQKLKLSRDDAKPLLRLKGFPSFPLVERQANEVDWWDMVCNVKKLINEKKEDGKVFWQNLAGYKRQEALRPYLSSEEDRKKGKKFARYQLGDLLLHLEKKHGEDWGKVYDEAWERIDKKVEGLSKHIKLEEERRSEDAQSKAALTDWLRAKASFVIEGLKEADKDEFCRCELKLQKWYGDLRGKPFAIEAENSILDISGFSKQYNCAFIWQKDGVKKLNLYLIINYFKGGKLRFKKIKPEAFEANRFYTVINKKSGEIVPMEVNFNFDDPNLIILPLAFGKRQGREFIWNDLLSLETGSLKLANGRVIEKTLYNRRTRQDEPALFVALTFERREVLDSSNIKPMNLIGVDRGENIPAVIALTDPEGCPLSRFKDSLGNPTHILRIGESYKEKQRTIQAKKEVEQRRAGGYSRKYASKAKNLADDMVRNTARDLLYYAVTQDAMLIFENLSRGFGRQGKRTFMAERQYTRMEDWLTAKLAYEGLPSKTYLSKTLAQYTSKTCSNCGFTITSADYDRVLEKLKKTATGWMTTINGKELKVEGQITYYNRYKRQNVVKDLSVELDRLSEESVNNDISSWDKGRSGEALSLLKKRFSHRPVQEKFVCLNCGFETHADEQAALNIARSWLFLRSQEYKKYQTNKTTGNTDKRAFVETWQSFYRKKLKEVWKPAV

SEQ ID NO: 34745 - protein, 979 aa, synthetic construct
  REGION 1..979: note = engineered CasX variant
QEIKRINKIRRRLVKDSNTKKAGKTGPMKTLLVRVMTPDLRERLENLRKKPENIPQPISNTSRANLNKLLTDYTEMKKAILHVYWEEFQKDPVGLMSRVAQPASKKIDQNKLKPEMDEKGNLTTAGFACSQCGQPLFVYKLEQVSEKGKAYTNYFGRCNVAEHEKLIKKLAQLKPEKDSDEAVTYSLGKFGQRALDFYSIHVTKESTHPVKPLAQIAGNRYASGPVGKALSDACMGTIASFLSKYQDIIIEHQKVVKGNQKRLESLRELAGKENLEYPSVTLPPQPHTKEGVDAYNEVIARVRMWVNLNLWQKLKLSRDDAKPLLRLKGFPSFPLVERQANEVDWWDMVCNVKKLINEKKEDGKVFWQNLAGYKRQEALRPYLSSEEDRKKGKKFARYQLGDLLLHLEKKHGEDWGKVYDEAWERIDKKVEGLSKHIKLEEERRSEDAQSKAALTDWLRAKASFVIEGLKEADKDEFCRCELKLQKWYGDLRGKPFAIEAENSILDISGFSKQYNCAFIWQKDGVKKLNLYLIINYFKGGKLRFKKIKPEAFEANRFYTVINKKSGEIVPMEVNFNFDDPNLIILPLAFGKRQGREFIWNDLLSLETGSLKLANGRVIEKTLYNRRTRQDEPALFVALTFERREVLDSSNIKPMNLIGVDRGENIPAVIALTDPEGCPLSRFKDSLGNPTHILRIGESYKEKQRTIQAKKEVEQRRAGGYSRKYASKAKNLADDMVRNTARDLLYYAVTQDAMLIFENLSRGFGRQGKRTFMAERQYTRMEDWLTAKLAYEGLPSKTYLSKTLAQYTSKTCSNCGFTITSADYDRVLEKLKKTATGWMTTINGKELKVEGQITYYNRYKRQNVVKDLSVELDRLSEESVNNDISSWDKGRSGEALSLLKKRFSHRPVQEKFVCLNCGFETHADEQAALNIARSWLFLRSQEYKKYQTNKTTGNTDKRAFVETWQSFYRKKLKEVWKPAV

SEQ ID NO: 34746 - protein, 977 aa, synthetic construct
  REGION 1..977: note = engineered CasX variant
QEIKRINKIRRRLVKDSNTKKAGKTGPMKTLLVRVMTPDLRERLENLRKKPENIPQPISNTSRANLNKLLTDYTEMKKAILHVYWEEFQKDPVGLMSRVAQPASKKIDQNKLKPEMDEKGNLTTAGFACSQCGQPLFVYKLEQVSEKGKAYTNYFGRCNVAEHEKLIKLAQLKPEKDSDEAVTYSLGKFGQRALDFYSIHVTKESTHPVKPLAQIAGNRYASPVGKALSDACMGTIASFLSKYQDIIIEHQKVVKGNQKRLESLRELAGKENLEYPSVTLPPQPHTKEGVDAYNEVIARVRMWVNLNLWQKLKLSRDDAKPLLRLKGFPSFPLVERQANEVDWWDMVCNVKKLINEKKEDGKVFWQNLAGYKRQEALRPYLSSEEDRKKGKKFARYQLGDLLLHLEKKHGEDWGKVYDEAWERIDKKVEGLSKHIKLEEERRSEDAQSKAALTDWLRAKASFVIEGLKEADKDEFCRCELKLQKWYGDLRGKPFAIEAENSILDISGFSKQYNCAFIWQKDGVKKLNLYLIINYFKGGKLRFKKIKPEAFEANRFYTVINKKSGEIVPMEVNFNFDDPNLIILPLAFGKRQGREFIWNDLLSLETGSLKLANGRVIEKTLYNRRTRQDEPALFVALTFERREVLDSSNIKPMNLIGVDRGENIPAVIALTDPEGCPLSRFKDSLGNPTHILRIGESYKEKQRTIQAKKEVEQRRAGGYSRKYASKAKNLADDMVRNTARDLLYYAVTQDAMLIFENLSRGFGRQGKRTFMAERQYTRMEDWLTAKLAYEGLPSKTYLSKTLAQYTSKTCSNCGFTITSADYDRVLEKLKKTATGWMTTINGKELKVEGQITYYNRYKRQNVVKDLSVELDRLSEESVNNDISSWDKGRSGEALSLLKKRFSHRPVQEKFVCLNCGFETHADEQAALNIARSWLFLRSQEYKKYQTNKTTGNTDKRAFVETWQSFYRKKLKEVWKPAV

SEQ ID NO: 34747 - protein, 978 aa, synthetic construct
  REGION 1..978: note = engineered CasX variant
QEIKRINKIRRRLVKDSNTKKAGKTGPMKTLLVRVMTPDLRERLENLRKKPENIPQPISNTSRANLNKLLTDYTEMKKAILHVYWEEFQVDPVGLMSRVAQPASKKIDQNKLKPEMDEKGNLTTAGFACSQCGQPLFVYKLEQVSEKGKAYTNYFGRCNVAEHEKLIKLAQLKPEKDSDEAVTYSLGKFGQRALDFYSIHVTKESTHPVKPLAQIAGNRYASYPVGKALSDACMGTIASFLSKYQDIIIEHQKVVKGNQKRLESLRELAGKENLEYPSVTLPPQPHTKEGVDAYNEVIARVRMWVNLNLWQKLKLSRDDAKPLLRLKGFPSFPLVERQANEVDWWDMVCNVKKLINEKKEDGKVFWQNLAGYKRQEALRPYLSSEEDRKKGKKFARYQLGDLLLHLEKKHGEDWGKVYDEAWERIDKKVEGLSKHIKLEEERRSEDAQSKAALTDWLRAKASFVIEGLKEADKDEFCRCELKLQKWYGDLRGKPFAIEAENSILDISGFSKQYNCAFIWQKDGVKKLNLYLIINYFKGGKLRFKKIKPEAFEANRFYTVINKKSGEIVPMEVNFNFDDPNLIILPLAFGKRQGREFIWNDLLSLETGSLKLANGRVIEKTLYNRRTRQDEPALFVALTFERREVLDSSNIKPMNLIGVDRGENIPAVIALTDPEGCPLSRFKDSLGNPTHILRIGESYKEKQRTIQAKKEVEQRRAGGYSRKYASKAKNLADDMVRNTARDLLYYAVTQDAMLIFENLSRGFGRQGKRTFMAERQYTRMEDWLTAKLAYEGLPSKTYLSKTLAQYTSKTCSNCGFTITSADYDRVLEKLKKTATGWMTTINGKELKVEGQITYYNRYKRQNVVKDLSVELDRLSEESVNNDISSWTKGRSGEALSLLKKRFSHRPVQEKFVCLNCGFETHADEQAALNIARSWLFLRSQEYKKYQTNKTTGNTDKRAFVETWQSFYRKKLKEVWKPAV

SEQ ID NO: 34748 - protein, 978 aa, synthetic construct
  REGION 1..978: note = engineered CasX variant
QEIKRINKIRRRLVKDSNTKKAGKTGPMKTLLVRVMTPDLRERLENLRKKPENIPQPISNTSRANLNKLLTDYTEMKKAILHVYWEEFQVDPVGLMSRVAQPASKKIDQNKLKPEMDEKGNLTTAGFACSQCGQPLFVYKLEQVSEKGKAYTNYFGRCNVAEHEKLIKLAQLKPEKDSDEAVTYSLGKFGQRALDFYSIHVTKESTHPVKPLAQIAGNRYASHPVGKALSDACMGTIASFLSKYQDIIIEHQKVVKGNQKRLESLRELAGKENLEYPSVTLPPQPHTKEGVDAYNEVIARVRMWVNLNLWQKLKLSRDDAKPLLRLKGFPSFPLVERQANEVDWWDMVCNVKKLINEKKEDGKVFWQNLAGYKRQEALRPYLSSEEDRKKGKKFARYQLGDLLLHLEKKHGEDWGKVYDEAWERIDKKVEGLSKHIKLEEERRSEDAQSKAALTDWLRAKASFVIEGLKEADKDEFCRCELKLQKWYGDLRGKPFAIEAENSILDISGFSKQYNCAFIWQKDGVKKLNLYLIINYFKGGKLRFKKIKPEAFEANRFYTVINKKSGEIVPMEVNFNFDDPNLIILPLAFGKRQGREFIWNDLLSLETGSLKLANGRVIEKTLYNRRTRQDEPALFVALTFERREVLDSSNIKPMNLIGVDRGENIPAVIALTDPEGCPLSRFKDSLGNPTHILRIGESYKEKQRTIQAKKEVEQRRAGGYSRKYASKAKNLADDMVRNTARDLLYYAVTQDAMLIFENLSRGFGRQGKRTFMAERQYTRMEDWLTAKLAYEGLPSKTYLSKTLAQYTSKTCSNCGFTITSADYDRVLEKLKKTATGWMTTINGKELKVEGQITYYNRYKRQNVVKDLSVELDRLSEESVNNDISSWTKGRSGEALSLLKKRFSHRPVQEKFVCLNCGFETHADEQAALNIARSWLFLRSQEYKKYQTNKTTGNTDKRAFVETWQSFYRKKLKEVWKPAV

SEQ ID NO: 34749 - protein, 978 aa, synthetic construct
  REGION 1..978: note = engineered CasX variant
QEIKRINKIRRRLVKDSNTKKAGKTGPMKTLLVRVMTPDLRERLENLRKKPENIPQPISNTSRANLNKLLTDYTEMKKAILHVYWEEFQVDPVGLMSRVAQPASKKIDQNKLKPEMDEKGNLTTAGFACSQCGQPLFVYKLEQVSEKGKAYTNYFGRCNVAEHEKLIKLAQLKPEKDSDEAVTYSLGKFGQRALDFYSIHVTKESTHPVKPLAQIAGNRYASTPVGKALSDACMGTIASFLSKYQDIIIEHQKVVKGNQKRLESLRELAGKENLEYPSVTLPPQPHTKEGVDAYNEVIARVRMWVNLNLWQKLKLSRDDAKPLLRLKGFPSFPLVERQANEVDWWDMVCNVKKLINEKKEDGKVFWQNLAGYKRQEALRPYLSSEEDRKKGKKFARYQLGDLLLHLEKKHGEDWGKVYDEAWERIDKKVEGLSKHIKLEEERRSEDAQSKAALTDWLRAKASFVIEGLKEADKDEFCRCELKLQKWYGDLRGKPFAIEAENSILDISGFSKQYNCAFIWQKDGVKKLNLYLIINYFKGGKLRFKKIKPEAFEANRFYTVINKKSGEIVPMEVNFNFDDPNLIILPLAFGKRQGREFIWNDLLSLETGSLKLANGRVIEKTLYNRRTRQDEPALFVALTFERREVLDSSNIKPMNLIGVDRGENIPAVIALTDPEGCPLSRFKDSLGNPTHILRIGESYKEKQRTIQAKKEVEQRRAGGYSRKYASKAKNLADDMVRNTARDLLYYAVTQDAMLIFENLSRGFGRQGKRTFMAERQYTRMEDWLTAKLAYEGLPSKTYLSKTLAQYTSKTCSNCGFTITSADYDRVLEKLKKTATGWMTTINGKELKVEGQITYYNRYKRQNVVKDLSVELDRLSEESVNNDISSWTKGRSGEALSLLKKRFSHRPVQEKFVCLNCGFETHADEQAALNIARSWLFLRSQEYKKYQTNKTTGNTDKRAFVETWQSFYRKKLKEVWKPAV

SEQ ID NO: 34750 - protein, 978 aa, synthetic construct
  REGION 1..978: note = engineered CasX variant
QEIKRINKIRRRLVKDSNTKKAGKTGPMKTLLVRVMTPDLRERLENLRKKPENIPQPISNTSRANLNKLLTDYTEMKKAILHVYWEEFQVDPVGLMSRVAQPASKKIDQNKLKPEMDEKGNLTTAGFACSQCGQPLFVYKLEQVSEKGKAYTNYFGRCNVAEHEKLIKLAQLKPEKDSDEAVTYSLGKFGQRALDFYSIHVTKESTHPVKPLAQIAGNRYASAPVGKALSDACMGTIASFLSKYQDIIIEHQKVVKGNQKRLESLRELAGKENLEYPSVTLPPQPHTKEGVDAYNEVIARVRMWVNLNLWQKLKLSRDDAKPLLRLKGFPSFPLVERQANEVDWWDMVCNVKKLINEKKEDGKVFWQNLAGYKRQEALRPYLSSEEDRKKGKKFARYQLGDLLLHLEKKHGEDWGKVYDEAWERIDKKVEGLSKHIKLEEERRSEDAQSKAALTDWLRAKASFVIEGLKEADKDEFCRCELKLQKWYGDLRGKPFAIEAENSILDISGFSKQYNCAFIWQKDGVKKLNLYLIINYFKGGKLRFKKIKPEAFEANRFYTVINKKSGEIVPMEVNFNFDDPNLIILPLAFGKRQGREFIWNDLLSLETGSLKLANGRVIEKTLYNRRTRQDEPALFVALTFERREVLDSSNIKPMNLIGVDRGENIPAVIALTDPEGCPLSRFKDSLGNPTHILRIGESYKEKQRTIQAKKEVEQRRAGGYSRKYASKAKNLADDMVRNTARDLLYYAVTQDAMLIFENLSRGFGRQGKRTFMAERQYTRMEDWLTAKLAYEGLPSKTYLSKTLAQYTSKTCSNCGFTITSADYDRVLEKLKKTATGWMTTINGKELKVEGQITYYNRYKRQNVVKDLSVELDRLSEESVNNDISSWTKGRSGEALSLLKKRFSHRPVQEKFVCLNCGFETHADEQAALNIARSWLFLRSQEYKKYQTNKTTGNTDKRAFVETWQSFYRKKLKEVWKPAV

SEQ ID NO: 34751 - protein, 978 aa, synthetic construct
  REGION 1..978: note = engineered CasX variant
QEIKRINKIRRRLVKDSNTKKAGKTGPMKTLLVRVMTPDLRERLENLRKKPENIPQPISNTSRANLNKLLTDYTEMKKAILHVYWEEFQVDPVGLMSRVAQPASKKIDQNKLKPEMDEKGNLTTAGFACSQCGQPLFVYKLEQVSEKGKAYTNYFGRCNVAEHEKLIKLAQLKPEKDSDEAVTYSLGKFGQRALDFYSIHVTKESTHPVKPLAQIAGNRYASVPVGKALSDACMGTIASFLSKYQDIIIEHQKVVKGNQKRLESLRELAGKENLEYPSVTLPPQPHTKEGVDAYNEVIARVRMWVNLNLWQKLKLSRDDAKPLLRLKGFPSFPLVERQANEVDWWDMVCNVKKLINEKKEDGKVFWQNLAGYKRQEALRPYLSSEEDRKKGKKFARYQLGDLLLHLEKKHGEDWGKVYDEAWERIDKKVEGLSKHIKLEEERRSEDAQSKAALTDWLRAKASFVIEGLKEADKDEFCRCELKLQKWYGDLRGKPFAIEAENSILDISGFSKQYNCAFIWQKDGVKKLNLYLIINYFKGGKLRFKKIKPEAFEANRFYTVINKKSGEIVPMEVNFNFDDPNLIILPLAFGKRQGREFIWNDLLSLETGSLKLANGRVIEKTLYNRRTRQDEPALFVALTFERREVLDSSNIKPMNLIGVDRGENIPAVIALTDPEGCPLSRFKDSLGNPTHILRIGESYKEKQRTIQAKKEVEQRRAGGYSRKYASKAKNLADDMVRNTARDLLYYAVTQDAMLIFENLSRGFGRQGKRTFMAERQYTRMEDWLTAKLAYEGLPSKTYLSKTLAQYTSKTCSNCGFTITSADYDRVLEKLKKTATGWMTTINGKELKVEGQITYYNRYKRQNVVKDLSVELDRLSEESVNNDISSWTKGRSGEALSLLKKRFSHRPVQEKFVCLNCGFETHADEQAALNIARSWLFLRSQEYKKYQTNKTTGNTDKRAFVETWQSFYRKKLKEVWKPAV

SEQ ID NO: 34752 - protein, 979 aa, synthetic construct
  REGION 1..979: note = engineered CasX variant
QEIKRINKIRRRLVKDSNTKKAGKTGPMKTLLVRVMTPDLRERLENLRKKPENIPQPISNTSRANLNKLLTDYTEMKKAILHVYWEEFQVDPVGLMSRVAQPASKKIDQNKLKPEMDEKGNLTTAGFACSQCGQPLFVYKLEQVSEKGKAYTNYFGRCNVAEHEKLIKKLAQLKPEKDSDEAVTYSLGKFGQRALDFYSIHVTKESTHPVKPLAQIAGNRYASGPVGKALSDACMGTIASFLSKYQDIIIEHQKVVKGNQKRLESLRELAGKENLEYPSVTLPPQPHTKEGVDAYNEVIARVRMWVNLNLWQKLKLSRDDAKPLLRLKGFPSFPLVERQANEVDWWDMVCNVKKLINEKKEDGKVFWQNLAGYKRQEALRPYLSSEEDRKKGKKFARYQLGDLLLHLEKKHGEDWGKVYDEAWERIDKKVEGLSKHIKLEEERRSEDAQSKAALTDWLRAKASFVIEGLKEADKDEFCRCELKLQKWYGDLRGKPFAIEAENSILDISGFSKQYNCAFIWQKDGVKKLNLYLIINYFKGGKLRFKKIKPEAFEANRFYTVINKKSGEIVPMEVNFNFDDPNLIILPLAFGKRQGREFIWNDLLSLETGSLKLANGRVIEKTLYNRRTRQDEPALFVALTFERREVLDSSNIKPMNLIGVDRGENIPAVIALTDPEGCPLSRFKDSLGNPTHILRIGESYKEKQRTIQAKKEVEQRRAGGYSRKYASKAKNLADDMVRNTARDLLYYAVTQDAMLIFENLSRGFGRQGKRTFMAERQYTRMEDWLTAKLAYEGLPSKTYLSKTLAQYTSKTCSNCGFTITSADYDRVLEKLKKTATGWMTTINGKELKVEGQITYYNRYKRQNVVKDLSVELDRLSEESVNNDISSWTKGRSGEALSLLKKRFSHRPVQEKFVCLNCGFETHADEQAALNIARSWLFLRSQEYKKYQTNKTTGNTDKRAFVETWQSFYRKKLKEVWKPAV

SEQ ID NO: 34753 - protein, 977 aa, synthetic construct
  REGION 1..977: note = engineered CasX variant
QEIKRINKIRRRLVKDSNTKKAGKTGPMKTLLVRVMTPDLRERLENLRKKPENIPQPISNTSRANLNKLLTDYTEMKKAILHVYWEEFQVDPVGLMSRVAQPASKKIDQNKLKPEMDEKGNLTTAGFACSQCGQPLFVYKLEQVSEKGKAYTNYFGRCNVAEHEKLIKLAQLKPEKDSDEAVTYSLGKFGQRALDFYSIHVTKESTHPVKPLAQIAGNRYASPVGKALSDACMGTIASFLSKYQDIIIEHQKVVKGNQKRLESLRELAGKENLEYPSVTLPPQPHTKEGVDAYNEVIARVRMWVNLNLWQKLKLSRDDAKPLLRLKGFPSFPLVERQANEVDWWDMVCNVKKLINEKKEDGKVFWQNLAGYKRQEALRPYLSSEEDRKKGKKFARYQLGDLLLHLEKKHGEDWGKVYDEAWERIDKKVEGLSKHIKLEEERRSEDAQSKAALTDWLRAKASFVIEGLKEADKDEFCRCELKLQKWYGDLRGKPFAIEAENSILDISGFSKQYNCAFIWQKDGVKKLNLYLIINYFKGGKLRFKKIKPEAFEANRFYTVINKKSGEIVPMEVNFNFDDPNLIILPLAFGKRQGREFIWNDLLSLETGSLKLANGRVIEKTLYNRRTRQDEPALFVALTFERREVLDSSNIKPMNLIGVDRGENIPAVIALTDPEGCPLSRFKDSLGNPTHILRIGESYKEKQRTIQAKKEVEQRRAGGYSRKYASKAKNLADDMVRNTARDLLYYAVTQDAMLIFENLSRGFGRQGKRTFMAERQYTRMEDWLTAKLAYEGLPSKTYLSKTLAQYTSKTCSNCGFTITSADYDRVLEKLKKTATGWMTTINGKELKVEGQITYYNRYKRQNVVKDLSVELDRLSEESVNNDISSWTKGRSGEALSLLKKRFSHRPVQEKFVCLNCGFETHADEQAALNIARSWLFLRSQEYKKYQTNKTTGNTDKRAFVETWQSFYRKKLKEVWKPAV

SEQ ID NO: 34754 - protein, 978 aa, synthetic construct
  REGION 1..978: note = engineered CasX variant
QEIKRLNKIRRRLVKDSNTKKAGKTGPMKTLLVRVMTPDLRERLENLRKKPENIPQPISNTSRANLNKLLTDYTEMKKAILHVYWEEFQKDPVGLMSRVAQPASKKIDQNKLKPEMDEKGNLTTAGFACSQCGQPLFVYKLEQVSEKGKAYTNYFGRCNVAEHEKLIKLAQLKPEKDSDEAVTYSLGKFGQRALDFYSIHVTKESTHPVKPLAQIAGNRYASYPVGKALSDACMGTIASFLSKYQDIIIEHQKVVKGNQKRLESLRELAGKENLEYPSVTLPPQPHTKEGVDAYNEVIARVRMWVNLNLWQKLKLSRDDAKPLLRLKGFPSFPLVERQANEVDWWDMVCNVKKLINEKKEDGKVFWQNLAGYKRQEALRPYLSSEEDRKKGKKFARYQLGDLLLHLEKKHGEDWGKVYDEAWERIDKKVEGLSKHIKLEEERRSEDAQSKAALTDWLRAKASFVIEGLKEADKDEFCRCELKLQKWYGDLRGKPFAIEAENSILDISGFSKQYNCAFIWQKDGVKKLNLYLIINYFKGGKLRFKKIKPEAFEANRFYTVINKKSGEIVPMEVNFNFDDPNLIILPLAFGKRQGREFIWNDLLSLETGSLKLANGRVIEKTLYNRRTRQDEPALFVALTFERREVLDSSNIKPMNLIGVDRGENIPAVIALTDPEGCPLSRFKDSLGNPTHILRIGESYKEKQRTIQAKKEVEQRRAGGYSRKYASKAKNLADDMVRNTARDLLYYAVTQDAMLIFENLSRGFGRQGKRTFMAERQYTRMEDWLTAKLAYEGLPSKTYLSKTLAQYTSKTCSNCGFTITSADYDRVLEKLKKTATGWMTTINGKELKVEGQITYYNRYKRQNVVKDLSVELDRLSEESVNNDISSWTKGRSGEALSLLKKRFSHRPVQEKFVCLNCGFETHADEQAALNIARSWLFLRSQEYKKYQTNKTTGNTDKRAFVETWQSFYRKKLKEVWKPAV

SEQ ID NO: 34755 - protein, 978 aa, synthetic construct
  REGION 1..978: note = engineered CasX variant
QEIKRLNKIRRRLVKDSNTKKAGKTGPMKTLLVRVMTPDLRERLENLRKKPENIPQPISNTSRANLNKLLTDYTEMKKAILHVYWEEFQKDPVGLMSRVAQPASKKIDQNKLKPEMDEKGNLTTAGFACSQCGQPLFVYKLEQVSEKGKAYTNYFGRCNVAEHEKLIKLAQLKPEKDSDEAVTYSLGKFGQRALDFYSIHVTKESTHPVKPLAQIAGNRYASHPVGKALSDACMGTIASFLSKYQDIIIEHQKVVKGNQKRLESLRELAGKENLEYPSVTLPPQPHTKEGVDAYNEVIARVRMWVNLNLWQKLKLSRDDAKPLLRLKGFPSFPLVERQANEVDWWDMVCNVKKLINEKKEDGKVFWQNLAGYKRQEALRPYLSSEEDRKKGKKFARYQLGDLLLHLEKKHGEDWGKVYDEAWERIDKKVEGLSKHIKLEEERRSEDAQSKAALTDWLRAKASFVIEGLKEADKDEFCRCELKLQKWYGDLRGKPFAIEAENSILDISGFSKQYNCAFIWQKDGVKKLNLYLIINYFKGGKLRFKKIKPEAFEANRFYTVINKKSGEIVPMEVNFNFDDPNLIILPLAFGKRQGREFIWNDLLSLETGSLKLANGRVIEKTLYNRRTRQDEPALFVALTFERREVLDSSNIKPMNLIGVDRGENIPAVIALTDPEGCPLSRFKDSLGNPTHILRIGESYKEKQRTIQAKKEVEQRRAGGYSRKYASKAKNLADDMVRNTARDLLYYAVTQDAMLIFENLSRGFGRQGKRTFMAERQYTRMEDWLTAKLAYEGLPSKTYLSKTLAQYTSKTCSNCGFTITSADYDRVLEKLKKTATGWMTTINGKELKVEGQITYYNRYKRQNVVKDLSVELDRLSEESVNNDISSWTKGRSGEALSLLKKRFSHRPVQEKFVCLNCGFETHADEQAALNIARSWLFLRSQEYKKYQTNKTTGNTDKRAFVETWQSFYRKKLKEVWKPAV

SEQ ID NO: 34756 - protein, 978 aa, synthetic construct
  REGION 1..978: note = engineered CasX variant
QEIKRLNKIRRRLVKDSNTKKAGKTGPMKTLLVRVMTPDLRERLENLRKKPENIPQPISNTSRANLNKLLTDYTEMKKAILHVYWEEFQKDPVGLMSRVAQPASKKIDQNKLKPEMDEKGNLTTAGFACSQCGQPLFVYKLEQVSEKGKAYTNYFGRCNVAEHEKLIKLAQLKPEKDSDEAVTYSLGKFGQRALDFYSIHVTKESTHPVKPLAQIAGNRYASTPVGKALSDACMGTIASFLSKYQDIIIEHQKVVKGNQKRLESLRELAGKENLEYPSVTLPPQPHTKEGVDAYNEVIARVRMWVNLNLWQKLKLSRDDAKPLLRLKGFPSFPLVERQANEVDWWDMVCNVKKLINEKKEDGKVFWQNLAGYKRQEALRPYLSSEEDRKKGKKFARYQLGDLLLHLEKKHGEDWGKVYDEAWERIDKKVEGLSKHIKLEEERRSEDAQSKAALTDWLRAKASFVIEGLKEADKDEFCRCELKLQKWYGDLRGKPFAIEAENSILDISGFSKQYNCAFIWQKDGVKKLNLYLIINYFKGGKLRFKKIKPEAFEANRFYTVINKKSGEIVPMEVNFNFDDPNLIILPLAFGKRQGREFIWNDLLSLETGSLKLANGRVIEKTLYNRRTRQDEPALFVALTFERREVLDSSNIKPMNLIGVDRGENIPAVIALTDPEGCPLSRFKDSLGNPTHILRIGESYKEKQRTIQAKKEVEQRRAGGYSRKYASKAKNLADDMVRNTARDLLYYAVTQDAMLIFENLSRGFGRQGKRTFMAERQYTRMEDWLTAKLAYEGLPSKTYLSKTLAQYTSKTCSNCGFTITSADYDRVLEKLKKTATGWMTTINGKELKVEGQITYYNRYKRQNVVKDLSVELDRLSEESVNNDISSWTKGRSGEALSLLKKRFSHRPVQEKFVCLNCGFETHADEQAALNIARSWLFLRSQEYKKYQTNKTTGNTDKRAFVETWQSFYRKKLKEVWKPAV

SEQ ID NO: 34757 - protein, 978 aa, synthetic construct
  REGION 1..978: note = engineered CasX variant
QEIKRLNKIRRRLVKDSNTKKAGKTGPMKTLLVRVMTPDLRERLENLRKKPENIPQPISNTSRANLNKLLTDYTEMKKAILHVYWEEFQKDPVGLMSRVAQPASKKIDQNKLKPEMDEKGNLTTAGFACSQCGQPLFVYKLEQVSEKGKAYTNYFGRCNVAEHEKLIKLAQLKPEKDSDEAVTYSLGKFGQRALDFYSIHVTKESTHPVKPLAQIAGNRYASAPVGKALSDACMGTIASFLSKYQDIIIEHQKVVKGNQKRLESLRELAGKENLEYPSVTLPPQPHTKEGVDAYNEVIARVRMWVNLNLWQKLKLSRDDAKPLLRLKGFPSFPLVERQANEVDWWDMVCNVKKLINEKKEDGKVFWQNLAGYKRQEALRPYLSSEEDRKKGKKFARYQLGDLLLHLEKKHGEDWGKVYDEAWERIDKKVEGLSKHIKLEEERRSEDAQSKAALTDWLRAKASFVIEGLKEADKDEFCRCELKLQKWYGDLRGKPFAIEAENSILDISGFSKQYNCAFIWQKDGVKKLNLYLIINYFKGGKLRFKKIKPEAFEANRFYTVINKKSGEIVPMEVNFNFDDPNLIILPLAFGKRQGREFIWNDLLSLETGSLKLANGRVIEKTLYNRRTRQDEPALFVALTFERREVLDSSNIKPMNLIGVDRGENIPAVIALTDPEGCPLSRFKDSLGNPTHILRIGESYKEKQRTIQAKKEVEQRRAGGYSRKYASKAKNLADDMVRNTARDLLYYAVTQDAMLIFENLSRGFGRQGKRTFMAERQYTRMEDWLTAKLAYEGLPSKTYLSKTLAQYTSKTCSNCGFTITSADYDRVLEKLKKTATGWMTTINGKELKVEGQITYYNRYKRQNVVKDLSVELDRLSEESVNNDISSWTKGRSGEALSLLKKRFSHRPVQEKFVCLNCGFETHADEQAALNIARSWLFLRSQEYKKYQTNKTTGNTDKRAFVETWQSFYRKKLKEVWKPAV

SEQ ID NO: 34758 - protein, 978 aa, synthetic construct
  REGION 1..978: note = engineered CasX variant
QEIKRLNKIRRRLVKDSNTKKAGKTGPMKTLLVRVMTPDLRERLENLRKKPENIPQPISNTSRANLNKLLTDYTEMKKAILHVYWEEFQKDPVGLMSRVAQPASKKIDQNKLKPEMDEKGNLTTAGFACSQCGQPLFVYKLEQVSEKGKAYTNYFGRCNVAEHEKLIKLAQLKPEKDSDEAVTYSLGKFGQRALDFYSIHVTKESTHPVKPLAQIAGNRYASVPVGKALSDACMGTIASFLSKYQDIIIEHQKVVKGNQKRLESLRELAGKENLEYPSVTLPPQPHTKEGVDAYNEVIARVRMWVNLNLWQKLKLSRDDAKPLLRLKGFPSFPLVERQANEVDWWDMVCNVKKLINEKKEDGKVFWQNLAGYKRQEALRPYLSSEEDRKKGKKFARYQLGDLLLHLEKKHGEDWGKVYDEAWERIDKKVEGLSKHIKLEEERRSEDAQSKAALTDWLRAKASFVIEGLKEADKDEFCRCELKLQKWYGDLRGKPFAIEAENSILDISGFSKQYNCAFIWQKDGVKKLNLYLIINYFKGGKLRFKKIKPEAFEANRFYTVINKKSGEIVPMEVNFNFDDPNLIILPLAFGKRQGREFIWNDLLSLETGSLKLANGRVIEKTLYNRRTRQDEPALFVALTFERREVLDSSNIKPMNLIGVDRGENIPAVIALTDPEGCPLSRFKDSLGNPTHILRIGESYKEKQRTIQAKKEVEQRRAGGYSRKYASKAKNLADDMVRNTARDLLYYAVTQDAMLIFENLSRGFGRQGKRTFMAERQYTRMEDWLTAKLAYEGLPSKTYLSKTLAQYTSKTCSNCGFTITSADYDRVLEKLKKTATGWMTTINGKELKVEGQITYYNRYKRQNVVKDLSVELDRLSEESVNNDISSWTKGRSGEALSLLKKRFSHRPVQEKFVCLNCGFETHADEQAALNIARSWLFLRSQEYKKYQTNKTTGNTDKRAFVETWQSFYRKKLKEVWKPAV

SEQ ID NO: 34759 - protein, 979 aa, synthetic construct
  REGION 1..979: note = engineered CasX variant
QEIKRLNKIRRRLVKDSNTKKAGKTGPMKTLLVRVMTPDLRERLENLRKKPENIPQPISNTSRANLNKLLTDYTEMKKAILHVYWEEFQKDPVGLMSRVAQPASKKIDQNKLKPEMDEKGNLTTAGFACSQCGQPLFVYKLEQVSEKGKAYTNYFGRCNVAEHEKLIKKLAQLKPEKDSDEAVTYSLGKFGQRALDFYSIHVTKESTHPVKPLAQIAGNRYASGPVGKALSDACMGTIASFLSKYQDIIIEHQKVVKGNQKRLESLRELAGKENLEYPSVTLPPQPHTKEGVDAYNEVIARVRMWVNLNLWQKLKLSRDDAKPLLRLKGFPSFPLVERQANEVDWWDMVCNVKKLINEKKEDGKVFWQNLAGYKRQEALRPYLSSEEDRKKGKKFARYQLGDLLLHLEKKHGEDWGKVYDEAWERIDKKVEGLSKHIKLEEERRSEDAQSKAALTDWLRAKASFVIEGLKEADKDEFCRCELKLQKWYGDLRGKPFAIEAENSILDISGFSKQYNCAFIWQKDGVKKLNLYLIINYFKGGKLRFKKIKPEAFEANRFYTVINKKSGEIVPMEVNFNFDDPNLIILPLAFGKRQGREFIWNDLLSLETGSLKLANGRVIEKTLYNRRTRQDEPALFVALTFERREVLDSSNIKPMNLIGVDRGENIPAVIALTDPEGCPLSRFKDSLGNPTHILRIGESYKEKQRTIQAKKEVEQRRAGGYSRKYASKAKNLADDMVRNTARDLLYYAVTQDAMLIFENLSRGFGRQGKRTFMAERQYTRMEDWLTAKLAYEGLPSKTYLSKTLAQYTSKTCSNCGFTITSADYDRVLEKLKKTATGWMTTINGKELKVEGQITYYNRYKRQNVVKDLSVELDRLSEESVNNDISSWTKGRSGEALSLLKKRFSHRPVQEKFVCLNCGFETHADEQAALNIARSWLFLRSQEYKKYQTNKTTGNTDKRAFVETWQSFYRKKLKEVWKPAV

SEQ ID NO: 34760 - protein, 977 aa, synthetic construct
  REGION 1..977: note = engineered CasX variant
QEIKRLNKIRRRLVKDSNTKKAGKTGPMKTLLVRVMTPDLRERLENLRKKPENIPQPISNTSRANLNKLLTDYTEMKKAILHVYWEEFQKDPVGLMSRVAQPASKKIDQNKLKPEMDEKGNLTTAGFACSQCGQPLFVYKLEQVSEKGKAYTNYFGRCNVAEHEKLIKLAQLKPEKDSDEAVTYSLGKFGQRALDFYSIHVTKESTHPVKPLAQIAGNRYASPVGKALSDACMGTIASFLSKYQDIIIEHQKVVKGNQKRLESLRELAGKENLEYPSVTLPPQPHTKEGVDAYNEVIARVRMWVNLNLWQKLKLSRDDAKPLLRLKGFPSFPLVERQANEVDWWDMVCNVKKLINEKKEDGKVFWQNLAGYKRQEALRPYLSSEEDRKKGKKFARYQLGDLLLHLEKKHGEDWGKVYDEAWERIDKKVEGLSKHIKLEEERRSEDAQSKAALTDWLRAKASFVIEGLKEADKDEFCRCELKLQKWYGDLRGKPFAIEAENSILDISGFSKQYNCAFIWQKDGVKKLNLYLIINYFKGGKLRFKKIKPEAFEANRFYTVINKKSGEIVPMEVNFNFDDPNLIILPLAFGKRQGREFIWNDLLSLETGSLKLANGRVIEKTLYNRRTRQDEPALFVALTFERREVLDSSNIKPMNLIGVDRGENIPAVIALTDPEGCPLSRFKDSLGNPTHILRIGESYKEKQRTIQAKKEVEQRRAGGYSRKYASKAKNLADDMVRNTARDLLYYAVTQDAMLIFENLSRGFGRQGKRTFMAERQYTRMEDWLTAKLAYEGLPSKTYLSKTLAQYTSKTCSNCGFTITSADYDRVLEKLKKTATGWMTTINGKELKVEGQITYYNRYKRQNVVKDLSVELDRLSEESVNNDISSWTKGRSGEALSLLKKRFSHRPVQEKFVCLNCGFETHADEQAALNIARSWLFLRSQEYKKYQTNKTTGNTDKRAFVETWQSFYRKKLKEVWKPAV

SEQ ID NO: 34761 - protein, 978 aa, synthetic construct
  REGION 1..978: note = engineered CasX variant
QEIKRINKIRRRLVKDSNTKKAGKTGPMKTLLVRVMTPDLRERLENLRKKPENIPQPISNTSRANLNKLLTDYTEMKKAILHVYWEEFQKDPVGLMSRVAQPASKKIDQNKLKPEMDEKGNLTTAGFACSQCGQPLFVYKLEQVSEKGKAYTNYVGRCNVAEHEKLIKLAQLKPEKDSDEAVTYSLGKFGQRALDFYSIHVTKESTHPVKPLAQIAGNRYASYPVGKALSDACMGTIASFLSKYQDIIIEHQKVVKGNQKRLESLRELAGKENLEYPSVTLPPQPHTKEGVDAYNEVIARVRMWVNLNLWQKLKLSRDDAKPLLRLKGFPSFPLVERQANEVDWWDMVCNVKKLINEKKEDGKVFWQNLAGYKRQEALRPYLSSEEDRKKGKKFARYQLGDLLLHLEKKHGEDWGKVYDEAWERIDKKVEGLSKHIKLEEERRSEDAQSKAALTDWLRAKASFVIEGLKEADKDEFCRCELKLQKWYGDLRGKPFAIEAENSILDISGFSKQYNCAFIWQKDGVKKLNLYLIINYFKGGKLRFKKIKPEAFEANRFYTVINKKSGEIVPMEVNFNFDDPNLIILPLAFGKRQGREFIWNDLLSLETGSLKLANGRVIEKTLYNRRTRQDEPALFVALTFERREVLDSSNIKPMNLIGVDRGENIPAVIALTDPEGCPLSRFKDSLGNPTHILRIGESYKEKQRTIQAKKEVEQRRAGGYSRKYASKAKNLADDMVRNTARDLLYYAVTQDAMLIFENLSRGFGRQGKRTFMAERQYTRMEDWLTAKLAYEGLPSKTYLSKTLAQYTSKTCSNCGFTITSADYDRVLEKLKKTATGWMTTINGKELKVEGQITYYNRYKRQNVVKDLSVELDRLSEESVNNDISSWTKGRSGEALSLLKKRFSHRPVQEKFVCLNCGFETHADEQAALNIARSWLFLRSQEYKKYQTNKTTGNTDKRAFVETWQSFYRKKLKEVWKPAV

SEQ ID NO: 34762 - protein, 978 aa, synthetic construct
  REGION 1..978: note = engineered CasX variant
QEIKRINKIRRRLVKDSNTKKAGKTGPMKTLLVRVMTPDLRERLENLRKKPENIPQPISNTSRANLNKLLTDYTEMKKAILHVYWEEFQKDPVGLMSRVAQPASKKIDQNKLKPEMDEKGNLTTAGFACSQCGQPLFVYKLEQVSEKGKAYTNYVGRCNVAEHEKLIKLAQLKPEKDSDEAVTYSLGKFGQRALDFYSIHVTKESTHPVKPLAQIAGNRYASHPVGKALSDACMGTIASFLSKYQDIIIEHQKVVKGNQKRLESLRELAGKENLEYPSVTLPPQPHTKEGVDAYNEVIARVRMWVNLNLWQKLKLSRDDAKPLLRLKGFPSFPLVERQANEVDWWDMVCNVKKLINEKKEDGKVFWQNLAGYKRQEALRPYLSSEEDRKKGKKFARYQLGDLLLHLEKKHGEDWGKVYDEAWERIDKKVEGLSKHIKLEEERRSEDAQSKAALTDWLRAKASFVIEGLKEADKDEFCRCELKLQKWYGDLRGKPFAIEAENSILDISGFSKQYNCAFIWQKDGVKKLNLYLIINYFKGGKLRFKKIKPEAFEANRFYTVINKKSGEIVPMEVNFNFDDPNLIILPLAFGKRQGREFIWNDLLSLETGSLKLANGRVIEKTLYNRRTRQDEPALFVALTFERREVLDSSNIKPMNLIGVDRGENIPAVIALTDPEGCPLSRFKDSLGNPTHILRIGESYKEKQRTIQAKKEVEQRRAGGYSRKYASKAKNLADDMVRNTARDLLYYAVTQDAMLIFENLSRGFGRQGKRTFMAERQYTRMEDWLTAKLAYEGLPSKTYLSKTLAQYTSKTCSNCGFTITSADYDRVLEKLKKTATGWMTTINGKELKVEGQITYYNRYKRQNVVKDLSVELDRLSEESVNNDISSWTKGRSGEALSLLKKRFSHRPVQEKFVCLNCGFETHADEQAALNIARSWLFLRSQEYKKYQTNKTTGNTDKRAFVETWQSFYRKKLKEVWKPAV

SEQ ID NO: 34763 - protein, 978 aa, synthetic construct
  REGION 1..978: note = engineered CasX variant
QEIKRINKIRRRLVKDSNTKKAGKTGPMKTLLVRVMTPDLRERLENLRKKPENIPQPISNTSRANLNKLLTDYTEMKKAILHVYWEEFQKDPVGLMSRVAQPASKKIDQNKLKPEMDEKGNLTTAGFACSQCGQPLFVYKLEQVSEKGKAYTNYVGRCNVAEHEKLIKLAQLKPEKDSDEAVTYSLGKFGQRALDFYSIHVTKESTHPVKPLAQIAGNRYASTPVGKALSDACMGTIASFLSKYQDIIIEHQKVVKGNQKRLESLRELAGKENLEYPSVTLPPQPHTKEGVDAYNEVIARVRMWVNLNLWQKLKLSRDDAKPLLRLKGFPSFPLVERQANEVDWWDMVCNVKKLINEKKEDGKVFWQNLAGYKRQEALRPYLSSEEDRKKGKKFARYQLGDLLLHLEKKHGEDWGKVYDEAWERIDKKVEGLSKHIKLEEERRSEDAQSKAALTDWLRAKASFVIEGLKEADKDEFCRCELKLQKWYGDLRGKPFAIEAENSILDISGFSKQYNCAFIWQKDGVKKLNLYLIINYFKGGKLRFKKIKPEAFEANRFYTVINKKSGEIVPMEVNFNFDDPNLIILPLAFGKRQGREFIWNDLLSLETGSLKLANGRVIEKTLYNRRTRQDEPALFVALTFERREVLDSSNIKPMNLIGVDRGENIPAVIALTDPEGCPLSRFKDSLGNPTHILRIGESYKEKQRTIQAKKEVEQRRAGGYSRKYASKAKNLADDMVRNTARDLLYYAVTQDAMLIFENLSRGFGRQGKRTFMAERQYTRMEDWLTAKLAYEGLPSKTYLSKTLAQYTSKTCSNCGFTITSADYDRVLEKLKKTATGWMTTINGKELKVEGQITYYNRYKRQNVVKDLSVELDRLSEESVNNDISSWTKGRSGEALSLLKKRFSHRPVQEKFVCLNCGFETHADEQAALNIARSWLFLRSQEYKKYQTNKTTGNTDKRAFVETWQSFYRKKLKEVWKPAV

SEQ ID NO: 34764 - protein, 978 aa, synthetic construct
  REGION 1..978: note = engineered CasX variant
QEIKRINKIRRRLVKDSNTKKAGKTGPMKTLLVRVMTPDLRERLENLRKKPENIPQPISNTSRANLNKLLTDYTEMKKAILHVYWEEFQKDPVGLMSRVAQPASKKIDQNKLKPEMDEKGNLTTAGFACSQCGQPLFVYKLEQVSEKGKAYTNYVGRCNVAEHEKLIKLAQLKPEKDSDEAVTYSLGKFGQRALDFYSIHVTKESTHPVKPLAQIAGNRYASAPVGKALSDACMGTIASFLSKYQDIIIEHQKVVKGNQKRLESLRELAGKENLEYPSVTLPPQPHTKEGVDAYNEVIARVRMWVNLNLWQKLKLSRDDAKPLLRLKGFPSFPLVERQANEVDWWDMVCNVKKLINEKKEDGKVFWQNLAGYKRQEALRPYLSSEEDRKKGKKFARYQLGDLLLHLEKKHGEDWGKVYDEAWERIDKKVEGLSKHIKLEEERRSEDAQSKAALTDWLRAKASFVIEGLKEADKDEFCRCELKLQKWYGDLRGKPFAIEAENSILDISGFSKQYNCAFIWQKDGVKKLNLYLIINYFKGGKLRFKKIKPEAFEANRFYTVINKKSGEIVPMEVNFNFDDPNLIILPLAFGKRQGREFIWNDLLSLETGSLKLANGRVIEKTLYNRRTRQDEPALFVALTFERREVLDSSNIKPMNLIGVDRGENIPAVIALTDPEGCPLSRFKDSLGNPTHILRIGESYKEKQRTIQAKKEVEQRRAGGYSRKYASKAKNLADDMVRNTARDLLYYAVTQDAMLIFENLSRGFGRQGKRTFMAERQYTRMEDWLTAKLAYEGLPSKTYLSKTLAQYTSKTCSNCGFTITSADYDRVLEKLKKTATGWMTTINGKELKVEGQITYYNRYKRQNVVKDLSVELDRLSEESVNNDISSWTKGRSGEALSLLKKRFSHRPVQEKFVCLNCGFETHADEQAALNIARSWLFLRSQEYKKYQTNKTTGNTDKRAFVETWQSFYRKKLKEVWKPAV

SEQ ID NO: 34765 - protein, 978 aa, synthetic construct
  REGION 1..978: note = engineered CasX variant
QEIKRINKIRRRLVKDSNTKKAGKTGPMKTLLVRVMTPDLRERLENLRKKPENIPQPISNTSRANLNKLLTDYTEMKKAILHVYWEEFQKDPVGLMSRVAQPASKKIDQNKLKPEMDEKGNLTTAGFACSQCGQPLFVYKLEQVSEKGKAYTNYVGRCNVAEHEKLIKLAQLKPEKDSDEAVTYSLGKFGQRALDFYSIHVTKESTHPVKPLAQIAGNRYASVPVGKALSDACMGTIASFLSKYQDIIIEHQKVVKGNQKRLESLRELAGKENLEYPSVTLPPQPHTKEGVDAYNEVIARVRMWVNLNLWQKLKLSRDDAKPLLRLKGFPSFPLVERQANEVDWWDMVCNVKKLINEKKEDGKVFWQNLAGYKRQEALRPYLSSEEDRKKGKKFARYQLGDLLLHLEKKHGEDWGKVYDEAWERIDKKVEGLSKHIKLEEERRSEDAQSKAALTDWLRAKASFVIEGLKEADKDEFCRCELKLQKWYGDLRGKPFAIEAENSILDISGFSKQYNCAFIWQKDGVKKLNLYLIINYFKGGKLRFKKIKPEAFEANRFYTVINKKSGEIVPMEVNFNFDDPNLIILPLAFGKRQGREFIWNDLLSLETGSLKLANGRVIEKTLYNRRTRQDEPALFVALTFERREVLDSSNIKPMNLIGVDRGENIPAVIALTDPEGCPLSRFKDSLGNPTHILRIGESYKEKQRTIQAKKEVEQRRAGGYSRKYASKAKNLADDMVRNTARDLLYYAVTQDAMLIFENLSRGFGRQGKRTFMAERQYTRMEDWLTAKLAYEGLPSKTYLSKTLAQYTSKTCSNCGFTITSADYDRVLEKLKKTATGWMTTINGKELKVEGQITYYNRYKRQNVVKDLSVELDRLSEESVNNDISSWTKGRSGEALSLLKKRFSHRPVQEKFVCLNCGFETHADEQAALNIARSWLFLRSQEYKKYQTNKTTGNTDKRAFVETWQSFYRKKLKEVWKPAV

SEQ ID NO: 34766 - protein, 979 aa, synthetic construct
  REGION 1..979: note = engineered CasX variant
QEIKRINKIRRRLVKDSNTKKAGKTGPMKTLLVRVMTPDLRERLENLRKKPENIPQPISNTSRANLNKLLTDYTEMKKAILHVYWEEFQKDPVGLMSRVAQPASKKIDQNKLKPEMDEKGNLTTAGFACSQCGQPLFVYKLEQVSEKGKAYTNYVGRCNVAEHEKLIKKLAQLKPEKDSDEAVTYSLGKFGQRALDFYSIHVTKESTHPVKPLAQIAGNRYASGPVGKALSDACMGTIASFLSKYQDIIIEHQKVVKGNQKRLESLRELAGKENLEYPSVTLPPQPHTKEGVDAYNEVIARVRMWVNLNLWQKLKLSRDDAKPLLRLKGFPSFPLVERQANEVDWWDMVCNVKKLINEKKEDGKVFWQNLAGYKRQEALRPYLSSEEDRKKGKKFARYQLGDLLLHLEKKHGEDWGKVYDEAWERIDKKVEGLSKHIKLEEERRSEDAQSKAALTDWLRAKASFVIEGLKEADKDEFCRCELKLQKWYGDLRGKPFAIEAENSILDISGFSKQYNCAFIWQKDGVKKLNLYLIINYFKGGKLRFKKIKPEAFEANRFYTVINKKSGEIVPMEVNFNFDDPNLIILPLAFGKRQGREFIWNDLLSLETGSLKLANGRVIEKTLYNRRTRQDEPALFVALTFERREVLDSSNIKPMNLIGVDRGENIPAVIALTDPEGCPLSRFKDSLGNPTHILRIGESYKEKQRTIQAKKEVEQRRAGGYSRKYASKAKNLADDMVRNTARDLLYYAVTQDAMLIFENLSRGFGRQGKRTFMAERQYTRMEDWLTAKLAYEGLPSKTYLSKTLAQYTSKTCSNCGFTITSADYDRVLEKLKKTATGWMTTINGKELKVEGQITYYNRYKRQNVVKDLSVELDRLSEESVNNDISSWTKGRSGEALSLLKKRFSHRPVQEKFVCLNCGFETHADEQAALNIARSWLFLRSQEYKKYQTNKTTGNTDKRAFVETWQSFYRKKLKEVWKPAV

SEQ ID NO: 34767 - protein, 977 aa, synthetic construct
  REGION 1..977: note = engineered CasX variant
QEIKRINKIRRRLVKDSNTKKAGKTGPMKTLLVRVMTPDLRERLENLRKKPENIPQPISNTSRANLNKLLTDYTEMKKAILHVYWEEFQKDPVGLMSRVAQPASKKIDQNKLKPEMDEKGNLTTAGFACSQCGQPLFVYKLEQVSEKGKAYTNYVGRCNVAEHEKLIKLAQLKPEKDSDEAVTYSLGKFGQRALDFYSIHVTKESTHPVKPLAQIAGNRYASPVGKALSDACMGTIASFLSKYQDIIIEHQKVVKGNQKRLESLRELAGKENLEYPSVTLPPQPHTKEGVDAYNEVIARVRMWVNLNLWQKLKLSRDDAKPLLRLKGFPSFPLVERQANEVDWWDMVCNVKKLINEKKEDGKVFWQNLAGYKRQEALRPYLSSEEDRKKGKKFARYQLGDLLLHLEKKHGEDWGKVYDEAWERIDKKVEGLSKHIKLEEERRSEDAQSKAALTDWLRAKASFVIEGLKEADKDEFCRCELKLQKWYGDLRGKPFAIEAENSILDISGFSKQYNCAFIWQKDGVKKLNLYLIINYFKGGKLRFKKIKPEAFEANRFYTVINKKSGEIVPMEVNFNFDDPNLIILPLAFGKRQGREFIWNDLLSLETGSLKLANGRVIEKTLYNRRTRQDEPALFVALTFERREVLDSSNIKPMNLIGVDRGENIPAVIALTDPEGCPLSRFKDSLGNPTHILRIGESYKEKQRTIQAKKEVEQRRAGGYSRKYASKAKNLADDMVRNTARDLLYYAVTQDAMLIFENLSRGFGRQGKRTFMAERQYTRMEDWLTAKLAYEGLPSKTYLSKTLAQYTSKTCSNCGFTITSADYDRVLEKLKKTATGWMTTINGKELKVEGQITYYNRYKRQNVVKDLSVELDRLSEESVNNDISSWTKGRSGEALSLLKKRFSHRPVQEKFVCLNCGFETHADEQAALNIARSWLFLRSQEYKKYQTNKTTGNTDKRAFVETWQSFYRKKLKEVWKPAV

SEQ ID NO: 34768 - protein, 978 aa, synthetic construct
  REGION 1..978: note = engineered CasX variant
QEIKRINKIRRRLVKDSNTKKAGKTGPMKTLLVRVMTPDLRERLENLRKKPENIPQPISNTSRANLNKLLTDYTEMKKAILHVYWEEFQKDPVGLMSRVAQPASKKIDQNKLKPEMDEKGNLTTAGFACSQCGQPLFVYKLEQVSEKGKAYTNYFGRCNVAEHEKLIKLAQLKPEKDSDEAVTYSLGKFGQRALDFYSIHVTKESTHPVKPLAQIAGNRYASYPVGKALSDACMGTIASFLSKYQDIIIEHQKVVKGNQKRLESLRELAGKENLEYPSVTLPPQPHTKEGVDAYNEVIARVRMWVNLNLWQKLKLSRDDAKPLLRLKGFPSFPLVERQANEVDWWDMVCNVKKLINEKKEDGKVFWQNLAGYKRQEALRPYLSSEEDRKKGKKFARYQLGDLLLHLEKKHGEDWGKVYDEAWERIDKKVEGLSKHIKLEEERRSEDAQSKAALTDWLRAKASFVIEGLKEADKDEFCRCELKLQKWYGDLRGKPFAIEAENSILDISGFSKQYNCAFIWQKDGVKKLNLYLIINYFKGGKLRFKKIKPEAFEANRFYTVINKKSGEIVPMEVNFNFDDPNLIILPLAFGKRQGREFIWNDLLSLETGSLKLANGRVIEKTLYNRRTRQDEPALFVALTFERREVLDSSNIKPMNLIGVDRGENIPAVIALTDPEGCPLSRFKDSLGNPTHILRIGESYKEKQRTIQAKKEVEQRRAGGYSRKYASKAKNLADDMVRNTARDLLYYAVTQDAMLIFENLSRGFGRQGKRTFMAERQYTRMEDWLTAKLAYEGLASKTYLSKTLAQYTSKTCSNCGFTITSADYDRVLEKLKKTATGWMTTINGKELKVEGQITYYNRYKRQNVVKDLSVELDRLSEESVNNDISSWTKGRSGEALSLLKKRFSHRPVQEKFVCLNCGFETHADEQAALNIARSWLFLRSQEYKKYQTNKTTGNTDKRAFVETWQSFYRKKLKEVWKPAV

SEQ ID NO: 34769 - protein, 978 aa, synthetic construct
  REGION 1..978: note = engineered CasX variant
QEIKRINKIRRRLVKDSNTKKAGKTGPMKTLLVRVMTPDLRERLENLRKKPENIPQPISNTSRANLNKLLTDYTEMKKAILHVYWEEFQKDPVGLMSRVAQPASKKIDQNKLKPEMDEKGNLTTAGFACSQCGQPLFVYKLEQVSEKGKAYTNYFGRCNVAEHEKLIKLAQLKPEKDSDEAVTYSLGKFGQRALDFYSIHVTKESTHPVKPLAQIAGNRYASHPVGKALSDACMGTIASFLSKYQDIIIEHQKVVKGNQKRLESLRELAGKENLEYPSVTLPPQPHTKEGVDAYNEVIARVRMWVNLNLWQKLKLSRDDAKPLLRLKGFPSFPLVERQANEVDWWDMVCNVKKLINEKKEDGKVFWQNLAGYKRQEALRPYLSSEEDRKKGKKFARYQLGDLLLHLEKKHGEDWGKVYDEAWERIDKKVEGLSKHIKLEEERRSEDAQSKAALTDWLRAKASFVIEGLKEADKDEFCRCELKLQKWYGDLRGKPFAIEAENSILDISGFSKQYNCAFIWQKDGVKKLNLYLIINYFKGGKLRFKKIKPEAFEANRFYTVINKKSGEIVPMEVNFNFDDPNLIILPLAFGKRQGREFIWNDLLSLETGSLKLANGRVIEKTLYNRRTRQDEPALFVALTFERREVLDSSNIKPMNLIGVDRGENIPAVIALTDPEGCPLSRFKDSLGNPTHILRIGESYKEKQRTIQAKKEVEQRRAGGYSRKYASKAKNLADDMVRNTARDLLYYAVTQDAMLIFENLSRGFGRQGKRTFMAERQYTRMEDWLTAKLAYEGLASKTYLSKTLAQYTSKTCSNCGFTITSADYDRVLEKLKKTATGWMTTINGKELKVEGQITYYNRYKRQNVVKDLSVELDRLSEESVNNDISSWTKGRSGEALSLLKKRFSHRPVQEKFVCLNCGFETHADEQAALNIARSWLFLRSQEYKKYQTNKTTGNTDKRAFVETWQSFYRKKLKEVWKPAV

SEQ ID NO: 34770 - protein, 978 aa, synthetic construct
  REGION 1..978: note = engineered CasX variant
QEIKRINKIRRRLVKDSNTKKAGKTGPMKTLLVRVMTPDLRERLENLRKKPENIPQPISNTSRANLNKLLTDYTEMKKAILHVYWEEFQKDPVGLMSRVAQPASKKIDQNKLKPEMDEKGNLTTAGFACSQCGQPLFVYKLEQVSEKGKAYTNYFGRCNVAEHEKLIKLAQLKPEKDSDEAVTYSLGKFGQRALDFYSIHVTKESTHPVKPLAQIAGNRYASTPVGKALSDACMGTIASFLSKYQDIIIEHQKVVKGNQKRLESLRELAGKENLEYPSVTLPPQPHTKEGVDAYNEVIARVRMWVNLNLWQKLKLSRDDAKPLLRLKGFPSFPLVERQANEVDWWDMVCNVKKLINEKKEDGKVFWQNLAGYKRQEALRPYLSSEEDRKKGKKFARYQLGDLLLHLEKKHGEDWGKVYDEAWERIDKKVEGLSKHIKLEEERRSEDAQSKAALTDWLRAKASFVIEGLKEADKDEFCRCELKLQKWYGDLRGKPFAIEAENSILDISGFSKQYNCAFIWQKDGVKKLNLYLIINYFKGGKLRFKKIKPEAFEANRFYTVINKKSGEIVPMEVNFNFDDPNLIILPLAFGKRQGREFIWNDLLSLETGSLKLANGRVIEKTLYNRRTRQDEPALFVALTFERREVLDSSNIKPMNLIGVDRGENIPAVIALTDPEGCPLSRFKDSLGNPTHILRIGESYKEKQRTIQAKKEVEQRRAGGYSRKYASKAKNLADDMVRNTARDLLYYAVTQDAMLIFENLSRGFGRQGKRTFMAERQYTRMEDWLTAKLAYEGLASKTYLSKTLAQYTSKTCSNCGFTITSADYDRVLEKLKKTATGWMTTINGKELKVEGQITYYNRYKRQNVVKDLSVELDRLSEESVNNDISSWTKGRSGEALSLLKKRFSHRPVQEKFVCLNCGFETHADEQAALNIARSWLFLRSQEYKKYQTNKTTGNTDKRAFVETWQSFYRKKLKEVWKPAV

SEQ ID NO: 34771 - protein, 978 aa, synthetic construct
  REGION 1..978: note = engineered CasX variant
QEIKRINKIRRRLVKDSNTKKAGKTGPMKTLLVRVMTPDLRERLENLRKKPENIPQPISNTSRANLNKLLTDYTEMKKAILHVYWEEFQKDPVGLMSRVAQPASKKIDQNKLKPEMDEKGNLTTAGFACSQCGQPLFVYKLEQVSEKGKAYTNYFGRCNVAEHEKLIKLAQLKPEKDSDEAVTYSLGKFGQRALDFYSIHVTKESTHPVKPLAQIAGNRYASAPVGKALSDACMGTIASFLSKYQDIIIEHQKVVKGNQKRLESLRELAGKENLEYPSVTLPPQPHTKEGVDAYNEVIARVRMWVNLNLWQKLKLSRDDAKPLLRLKGFPSFPLVERQANEVDWWDMVCNVKKLINEKKEDGKVFWQNLAGYKRQEALRPYLSSEEDRKKGKKFARYQLGDLLLHLEKKHGEDWGKVYDEAWERIDKKVEGLSKHIKLEEERRSEDAQSKAALTDWLRAKASFVIEGLKEADKDEFCRCELKLQKWYGDLRGKPFAIEAENSILDISGFSKQYNCAFIWQKDGVKKLNLYLIINYFKGGKLRFKKIKPEAFEANRFYTVINKKSGEIVPMEVNFNFDDPNLIILPLAFGKRQGREFIWNDLLSLETGSLKLANGRVIEKTLYNRRTRQDEPALFVALTFERREVLDSSNIKPMNLIGVDRGENIPAVIALTDPEGCPLSRFKDSLGNPTHILRIGESYKEKQRTIQAKKEVEQRRAGGYSRKYASKAKNLADDMVRNTARDLLYYAVTQDAMLIFENLSRGFGRQGKRTFMAERQYTRMEDWLTAKLAYEGLASKTYLSKTLAQYTSKTCSNCGFTITSADYDRVLEKLKKTATGWMTTINGKELKVEGQITYYNRYKRQNVVKDLSVELDRLSEESVNNDISSWTKGRSGEALSLLKKRFSHRPVQEKFVCLNCGFETHADEQAALNIARSWLFLRSQEYKKYQTNKTTGNTDKRAFVETWQSFYRKKLKEVWKPAV

SEQ ID NO: 34772 - protein, 978 aa, synthetic construct
  REGION 1..978: note = engineered CasX variant
QEIKRINKIRRRLVKDSNTKKAGKTGPMKTLLVRVMTPDLRERLENLRKKPENIPQPISNTSRANLNKLLTDYTEMKKAILHVYWEEFQKDPVGLMSRVAQPASKKIDQNKLKPEMDEKGNLTTAGFACSQCGQPLFVYKLEQVSEKGKAYTNYFGRCNVAEHEKLIKLAQLKPEKDSDEAVTYSLGKFGQRALDFYSIHVTKESTHPVKPLAQIAGNRYASVPVGKALSDACMGTIASFLSKYQDIIIEHQKVVKGNQKRLESLRELAGKENLEYPSVTLPPQPHTKEGVDAYNEVIARVRMWVNLNLWQKLKLSRDDAKPLLRLKGFPSFPLVERQANEVDWWDMVCNVKKLINEKKEDGKVFWQNLAGYKRQEALRPYLSSEEDRKKGKKFARYQLGDLLLHLEKKHGEDWGKVYDEAWERIDKKVEGLSKHIKLEEERRSEDAQSKAALTDWLRAKASFVIEGLKEADKDEFCRCELKLQKWYGDLRGKPFAIEAENSILDISGFSKQYNCAFIWQKDGVKKLNLYLIINYFKGGKLRFKKIKPEAFEANRFYTVINKKSGEIVPMEVNFNFDDPNLIILPLAFGKRQGREFIWNDLLSLETGSLKLANGRVIEKTLYNRRTRQDEPALFVALTFERREVLDSSNIKPMNLIGVDRGENIPAVIALTDPEGCPLSRFKDSLGNPTHILRIGESYKEKQRTIQAKKEVEQRRAGGYSRKYASKAKNLADDMVRNTARDLLYYAVTQDAMLIFENLSRGFGRQGKRTFMAERQYTRMEDWLTAKLAYEGLASKTYLSKTLAQYTSKTCSNCGFTITSADYDRVLEKLKKTATGWMTTINGKELKVEGQITYYNRYKRQNVVKDLSVELDRLSEESVNNDISSWTKGRSGEALSLLKKRFSHRPVQEKFVCLNCGFETHADEQAALNIARSWLFLRSQEYKKYQTNKTTGNTDKRAFVETWQSFYRKKLKEVWKPAV

SEQ ID NO: 34773 - protein, 979 aa, synthetic construct
  REGION 1..979: note = engineered CasX variant
QEIKRINKIRRRLVKDSNTKKAGKTGPMKTLLVRVMTPDLRERLENLRKKPENIPQPISNTSRANLNKLLTDYTEMKKAILHVYWEEFQKDPVGLMSRVAQPASKKIDQNKLKPEMDEKGNLTTAGFACSQCGQPLFVYKLEQVSEKGKAYTNYFGRCNVAEHEKLIKKLAQLKPEKDSDEAVTYSLGKFGQRALDFYSIHVTKESTHPVKPLAQIAGNRYASGPVGKALSDACMGTIASFLSKYQDIIIEHQKVVKGNQKRLESLRELAGKENLEYPSVTLPPQPHTKEGVDAYNEVIARVRMWVNLNLWQKLKLSRDDAKPLLRLKGFPSFPLVERQANEVDWWDMVCNVKKLINEKKEDGKVFWQNLAGYKRQEALRPYLSSEEDRKKGKKFARYQLGDLLLHLEKKHGEDWGKVYDEAWERIDKKVEGLSKHIKLEEERRSEDAQSKAALTDWLRAKASFVIEGLKEADKDEFCRCELKLQKWYGDLRGKPFAIEAENSILDISGFSKQYNCAFIWQKDGVKKLNLYLIINYFKGGKLRFKKIKPEAFEANRFYTVINKKSGEIVPMEVNFNFDDPNLIILPLAFGKRQGREFIWNDLLSLETGSLKLANGRVIEKTLYNRRTRQDEPALFVALTFERREVLDSSNIKPMNLIGVDRGENIPAVIALTDPEGCPLSRFKDSLGNPTHILRIGESYKEKQRTIQAKKEVEQRRAGGYSRKYASKAKNLADDMVRNTARDLLYYAVTQDAMLIFENLSRGFGRQGKRTFMAERQYTRMEDWLTAKLAYEGLASKTYLSKTLAQYTSKTCSNCGFTITSADYDRVLEKLKKTATGWMTTINGKELKVEGQITYYNRYKRQNVVKDLSVELDRLSEESVNNDISSWTKGRSGEALSLLKKRFSHRPVQEKFVCLNCGFETHADEQAALNIARSWLFLRSQEYKKYQTNKTTGNTDKRAFVETWQSFYRKKLKEVWKPAV

SEQ ID NO: 34774 - protein, 977 aa, synthetic construct
  REGION 1..977: note = engineered CasX variant
QEIKRINKIRRRLVKDSNTKKAGKTGPMKTLLVRVMTPDLRERLENLRKKPENIPQPISNTSRANLNKLLTDYTEMKKAILHVYWEEFQKDPVGLMSRVAQPASKKIDQNKLKPEMDEKGNLTTAGFACSQCGQPLFVYKLEQVSEKGKAYTNYFGRCNVAEHEKLIKLAQLKPEKDSDEAVTYSLGKFGQRALDFYSIHVTKESTHPVKPLAQIAGNRYASPVGKALSDACMGTIASFLSKYQDIIIEHQKVVKGNQKRLESLRELAGKENLEYPSVTLPPQPHTKEGVDAYNEVIARVRMWVNLNLWQKLKLSRDDAKPLLRLKGFPSFPLVERQANEVDWWDMVCNVKKLINEKKEDGKVFWQNLAGYKRQEALRPYLSSEEDRKKGKKFARYQLGDLLLHLEKKHGEDWGKVYDEAWERIDKKVEGLSKHIKLEEERRSEDAQSKAALTDWLRAKASFVIEGLKEADKDEFCRCELKLQKWYGDLRGKPFAIEAENSILDISGFSKQYNCAFIWQKDGVKKLNLYLIINYFKGGKLRFKKIKPEAFEANRFYTVINKKSGEIVPMEVNFNFDDPNLIILPLAFGKRQGREFIWNDLLSLETGSLKLANGRVIEKTLYNRRTRQDEPALFVALTFERREVLDSSNIKPMNLIGVDRGENIPAVIALTDPEGCPLSRFKDSLGNPTHILRIGESYKEKQRTIQAKKEVEQRRAGGYSRKYASKAKNLADDMVRNTARDLLYYAVTQDAMLIFENLSRGFGRQGKRTFMAERQYTRMEDWLTAKLAYEGLASKTYLSKTLAQYTSKTCSNCGFTITSADYDRVLEKLKKTATGWMTTINGKELKVEGQITYYNRYKRQNVVKDLSVELDRLSEESVNNDISSWTKGRSGEALSLLKKRFSHRPVQEKFVCLNCGFETHADEQAALNIARSWLFLRSQEYKKYQTNKTTGNTDKRAFVETWQSFYRKKLKEVWKPAV

SEQ ID NO: 34775 - protein, 978 aa, synthetic construct
  REGION 1..978: note = engineered CasX variant
QEIKRINKIRRRLVKDSNTKKAGKTGPMKTLLVRVMTPDLRERLENLRKKPENIPQPISNTSRANLNKLLTDYTEMKKAILHVYWEEFQKDPVGLMSRVAQPASKKIDQNKLKPEMDEKGNLTTAGFACSQCGQPLFVYKLEQVSEKGKAYTNYFGRCNVAEHEKLIKLAQLKPEKDSDEAVTYSLGKFGQRALDFYSIHVTKESTHPVKPLAQIAGNRYASYPVGKALSDACMGTIASFLSKYQDIIIEHQKVVKGNQKRLESLRELAGKENLEYPSVTLPPQPHTKEGVDAYNEVIARVRMWVNLNLWQKLKLSRDDAKPLLRLKGFPSFPLVERQANEVDWWDMVCNVKKLINEKKEDGKVFWQNLAGYKRQEALRPYLSSEEDRKKGKKFARYQLGDLLLHLEKKHGEDWGKVYDEAWERIDKKVEGLSKHIKLEEERRSEDAQSKAALTDWLRAKASFVIEGLKEADKDEFCRCELKLQKWYGDLRGKPFAIEAENSILDISGFSKQYNCAFIWQKDGVKKLNLYLIINYFKGGKLRFKKIKPEAFEANRFYTVINKKSGEIVPMEVNFNFDDPNLIILPLAFGKRQGREFIWNDLLSLETGSLKLANGRVIEKTLYNRRTRQDEPALFVALTFERREVLDSSNIKPMNLIGVDRGENIPAVIALTDPEGCPLSRFKDSLGNPTHILRIGESYKEKQRTIQAKKEVEQRRAGGYSRKYASKAKNLADDMVRNTARDLLYYAVTQDAMLIFENLSRGFGRQGKRTFMAERQYTRMEDWLTAKLAYEGLPSKVYLSKTLAQYTSKTCSNCGFTITSADYDRVLEKLKKTATGWMTTINGKELKVEGQITYYNRYKRQNVVKDLSVELDRLSEESVNNDISSWTKGRSGEALSLLKKRFSHRPVQEKFVCLNCGFETHADEQAALNIARSWLFLRSQEYKKYQTNKTTGNTDKRAFVETWQSFYRKKLKEVWKPAV

SEQ ID NO: 34776 - protein, 978 aa, synthetic construct
  REGION 1..978: note = engineered CasX variant
QEIKRINKIRRRLVKDSNTKKAGKTGPMKTLLVRVMTPDLRERLENLRKKPENIPQPISNTSRANLNKLLTDYTEMKKAILHVYWEEFQKDPVGLMSRVAQPASKKIDQNKLKPEMDEKGNLTTAGFACSQCGQPLFVYKLEQVSEKGKAYTNYFGRCNVAEHEKLIKLAQLKPEKDSDEAVTYSLGKFGQRALDFYSIHVTKESTHPVKPLAQIAGNRYASHPVGKALSDACMGTIASFLSKYQDIIIEHQKVVKGNQKRLESLRELAGKENLEYPSVTLPPQPHTKEGVDAYNEVIARVRMWVNLNLWQKLKLSRDDAKPLLRLKGFPSFPLVERQANEVDWWDMVCNVKKLINEKKEDGKVFWQNLAGYKRQEALRPYLSSEEDRKKGKKFARYQLGDLLLHLEKKHGEDWGKVYDEAWERIDKKVEGLSKHIKLEEERRSEDAQSKAALTDWLRAKASFVIEGLKEADKDEFCRCELKLQKWYGDLRGKPFAIEAENSILDISGFSKQYNCAFIWQKDGVKKLNLYLIINYFKGGKLRFKKIKPEAFEANRFYTVINKKSGEIVPMEVNFNFDDPNLIILPLAFGKRQGREFIWNDLLSLETGSLKLANGRVIEKTLYNRRTRQDEPALFVALTFERREVLDSSNIKPMNLIGVDRGENIPAVIALTDPEGCPLSRFKDSLGNPTHILRIGESYKEKQRTIQAKKEVEQRRAGGYSRKYASKAKNLADDMVRNTARDLLYYAVTQDAMLIFENLSRGFGRQGKRTFMAERQYTRMEDWLTAKLAYEGLPSKVYLSKTLAQYTSKTCSNCGFTITSADYDRVLEKLKKTATGWMTTINGKELKVEGQITYYNRYKRQNVVKDLSVELDRLSEESVNNDISSWTKGRSGEALSLLKKRFSHRPVQEKFVCLNCGFETHADEQAALNIARSWLFLRSQEYKKYQTNKTTGNTDKRAFVETWQSFYRKKLKEVWKPAV

SEQ ID NO: 34777 - protein, 978 aa, synthetic construct
  REGION 1..978: note = engineered CasX variant
QEIKRINKIRRRLVKDSNTKKAGKTGPMKTLLVRVMTPDLRERLENLRKKPENIPQPISNTSRANLNKLLTDYTEMKKAILHVYWEEFQKDPVGLMSRVAQPASKKIDQNKLKPEMDEKGNLTTAGFACSQCGQPLFVYKLEQVSEKGKAYTNYFGRCNVAEHEKLIKLAQLKPEKDSDEAVTYSLGKFGQRALDFYSIHVTKESTHPVKPLAQIAGNRYASTPVGKALSDACMGTIASFLSKYQDIIIEHQKVVKGNQKRLESLRELAGKENLEYPSVTLPPQPHTKEGVDAYNEVIARVRMWVNLNLWQKLKLSRDDAKPLLRLKGFPSFPLVERQANEVDWWDMVCNVKKLINEKKEDGKVFWQNLAGYKRQEALRPYLSSEEDRKKGKKFARYQLGDLLLHLEKKHGEDWGKVYDEAWERIDKKVEGLSKHIKLEEERRSEDAQSKAALTDWLRAKASFVIEGLKEADKDEFCRCELKLQKWYGDLRGKPFAIEAENSILDISGFSKQYNCAFIWQKDGVKKLNLYLIINYFKGGKLRFKKIKPEAFEANRFYTVINKKSGEIVPMEVNFNFDDPNLIILPLAFGKRQGREFIWNDLLSLETGSLKLANGRVIEKTLYNRRTRQDEPALFVALTFERREVLDSSNIKPMNLIGVDRGENIPAVIALTDPEGCPLSRFKDSLGNPTHILRIGESYKEKQRTIQAKKEVEQRRAGGYSRKYASKAKNLADDMVRNTARDLLYYAVTQDAMLIFENLSRGFGRQGKRTFMAERQYTRMEDWLTAKLAYEGLPSKVYLSKTLAQYTSKTCSNCGFTITSADYDRVLEKLKKTATGWMTTINGKELKVEGQITYYNRYKRQNVVKDLSVELDRLSEESVNNDISSWTKGRSGEALSLLKKRFSHRPVQEKFVCLNCGFETHADEQAALNIARSWLFLRSQEYKKYQTNKTTGNTDKRAFVETWQSFYRKKLKEVWKPAV

SEQ ID NO: 34778 - protein, 978 aa, synthetic construct
  REGION 1..978: note = engineered CasX variant
QEIKRINKIRRRLVKDSNTKKAGKTGPMKTLLVRVMTPDLRERLENLRKKPENIPQPISNTSRANLNKLLTDYTEMKKAILHVYWEEFQKDPVGLMSRVAQPASKKIDQNKLKPEMDEKGNLTTAGFACSQCGQPLFVYKLEQVSEKGKAYTNYFGRCNVAEHEKLIKLAQLKPEKDSDEAVTYSLGKFGQRALDFYSIHVTKESTHPVKPLAQIAGNRYASAPVGKALSDACMGTIASFLSKYQDIIIEHQKVVKGNQKRLESLRELAGKENLEYPSVTLPPQPHTKEGVDAYNEVIARVRMWVNLNLWQKLKLSRDDAKPLLRLKGFPSFPLVERQANEVDWWDMVCNVKKLINEKKEDGKVFWQNLAGYKRQEALRPYLSSEEDRKKGKKFARYQLGDLLLHLEKKHGEDWGKVYDEAWERIDKKVEGLSKHIKLEEERRSEDAQSKAALTDWLRAKASFVIEGLKEADKDEFCRCELKLQKWYGDLRGKPFAIEAENSILDISGFSKQYNCAFIWQKDGVKKLNLYLIINYFKGGKLRFKKIKPEAFEANRFYTVINKKSGEIVPMEVNFNFDDPNLIILPLAFGKRQGREFIWNDLLSLETGSLKLANGRVIEKTLYNRRTRQDEPALFVALTFERREVLDSSNIKPMNLIGVDRGENIPAVIALTDPEGCPLSRFKDSLGNPTHILRIGESYKEKQRTIQAKKEVEQRRAGGYSRKYASKAKNLADDMVRNTARDLLYYAVTQDAMLIFENLSRGFGRQGKRTFMAERQYTRMEDWLTAKLAYEGLPSKVYLSKTLAQYTSKTCSNCGFTITSADYDRVLEKLKKTATGWMTTINGKELKVEGQITYYNRYKRQNVVKDLSVELDRLSEESVNNDISSWTKGRSGEALSLLKKRFSHRPVQEKFVCLNCGFETHADEQAALNIARSWLFLRSQEYKKYQTNKTTGNTDKRAFVETWQSFYRKKLKEVWKPAV

SEQ ID NO: 34779 - protein, 978 aa, synthetic construct
  REGION 1..978: note = engineered CasX variant
QEIKRINKIRRRLVKDSNTKKAGKTGPMKTLLVRVMTPDLRERLENLRKKPENIPQPISNTSRANLNKLLTDYTEMKKAILHVYWEEFQKDPVGLMSRVAQPASKKIDQNKLKPEMDEKGNLTTAGFACSQCGQPLFVYKLEQVSEKGKAYTNYFGRCNVAEHEKLIKLAQLKPEKDSDEAVTYSLGKFGQRALDFYSIHVTKESTHPVKPLAQIAGNRYASVPVGKALSDACMGTIASFLSKYQDIIIEHQKVVKGNQKRLESLRELAGKENLEYPSVTLPPQPHTKEGVDAYNEVIARVRMWVNLNLWQKLKLSRDDAKPLLRLKGFPSFPLVERQANEVDWWDMVCNVKKLINEKKEDGKVFWQNLAGYKRQEALRPYLSSEEDRKKGKKFARYQLGDLLLHLEKKHGEDWGKVYDEAWERIDKKVEGLSKHIKLEEERRSEDAQSKAALTDWLRAKASFVIEGLKEADKDEFCRCELKLQKWYGDLRGKPFAIEAENSILDISGFSKQYNCAFIWQKDGVKKLNLYLIINYFKGGKLRFKKIKPEAFEANRFYTVINKKSGEIVPMEVNFNFDDPNLIILPLAFGKRQGREFIWNDLLSLETGSLKLANGRVIEKTLYNRRTRQDEPALFVALTFERREVLDSSNIKPMNLIGVDRGENIPAVIALTDPEGCPLSRFKDSLGNPTHILRIGESYKEKQRTIQAKKEVEQRRAGGYSRKYASKAKNLADDMVRNTARDLLYYAVTQDAMLIFENLSRGFGRQGKRTFMAERQYTRMEDWLTAKLAYEGLPSKVYLSKTLAQYTSKTCSNCGFTITSADYDRVLEKLKKTATGWMTTINGKELKVEGQITYYNRYKRQNVVKDLSVELDRLSEESVNNDISSWTKGRSGEALSLLKKRFSHRPVQEKFVCLNCGFETHADEQAALNIARSWLFLRSQEYKKYQTNKTTGNTDKRAFVETWQSFYRKKLKEVWKPAV

SEQ ID NO: 34780 - protein, 979 aa, synthetic construct
  REGION 1..979: note = engineered CasX variant
QEIKRINKIRRRLVKDSNTKKAGKTGPMKTLLVRVMTPDLRERLENLRKKPENIPQPISNTSRANLNKLLTDYTEMKKAILHVYWEEFQKDPVGLMSRVAQPASKKIDQNKLKPEMDEKGNLTTAGFACSQCGQPLFVYKLEQVSEKGKAYTNYFGRCNVAEHEKLIKKLAQLKPEKDSDEAVTYSLGKFGQRALDFYSIHVTKESTHPVKPLAQIAGNRYASGPVGKALSDACMGTIASFLSKYQDIIIEHQKVVKGNQKRLESLRELAGKENLEYPSVTLPPQPHTKEGVDAYNEVIARVRMWVNLNLWQKLKLSRDDAKPLLRLKGFPSFPLVERQANEVDWWDMVCNVKKLINEKKEDGKVFWQNLAGYKRQEALRPYLSSEEDRKKGKKFARYQLGDLLLHLEKKHGEDWGKVYDEAWERIDKKVEGLSKHIKLEEERRSEDAQSKAALTDWLRAKASFVIEGLKEADKDEFCRCELKLQKWYGDLRGKPFAIEAENSILDISGFSKQYNCAFIWQKDGVKKLNLYLIINYFKGGKLRFKKIKPEAFEANRFYTVINKKSGEIVPMEVNFNFDDPNLIILPLAFGKRQGREFIWNDLLSLETGSLKLANGRVIEKTLYNRRTRQDEPALFVALTFERREVLDSSNIKPMNLIGVDRGENIPAVIALTDPEGCPLSRFKDSLGNPTHILRIGESYKEKQRTIQAKKEVEQRRAGGYSRKYASKAKNLADDMVRNTARDLLYYAVTQDAMLIFENLSRGFGRQGKRTFMAERQYTRMEDWLTAKLAYEGLPSKVYLSKTLAQYTSKTCSNCGFTITSADYDRVLEKLKKTATGWMTTINGKELKVEGQITYYNRYKRQNVVKDLSVELDRLSEESVNNDISSWTKGRSGEALSLLKKRFSHRPVQEKFVCLNCGFETHADEQAALNIARSWLFLRSQEYKKYQTNKTTGNTDKRAFVETWQSFYRKKLKEVWKPAV

SEQ ID NO: 34781 - protein, 977 aa, synthetic construct
  REGION 1..977: note = engineered CasX variant
QEIKRINKIRRRLVKDSNTKKAGKTGPMKTLLVRVMTPDLRERLENLRKKPENIPQPISNTSRANLNKLLTDYTEMKKAILHVYWEEFQKDPVGLMSRVAQPASKKIDQNKLKPEMDEKGNLTTAGFACSQCGQPLFVYKLEQVSEKGKAYTNYFGRCNVAEHEKLIKLAQLKPEKDSDEAVTYSLGKFGQRALDFYSIHVTKESTHPVKPLAQIAGNRYASPVGKALSDACMGTIASFLSKYQDIIIEHQKVVKGNQKRLESLRELAGKENLEYPSVTLPPQPHTKEGVDAYNEVIARVRMWVNLNLWQKLKLSRDDAKPLLRLKGFPSFPLVERQANEVDWWDMVCNVKKLINEKKEDGKVFWQNLAGYKRQEALRPYLSSEEDRKKGKKFARYQLGDLLLHLEKKHGEDWGKVYDEAWERIDKKVEGLSKHIKLEEERRSEDAQSKAALTDWLRAKASFVIEGLKEADKDEFCRCELKLQKWYGDLRGKPFAIEAENSILDISGFSKQYNCAFIWQKDGVKKLNLYLIINYFKGGKLRFKKIKPEAFEANRFYTVINKKSGEIVPMEVNFNFDDPNLIILPLAFGKRQGREFIWNDLLSLETGSLKLANGRVIEKTLYNRRTRQDEPALFVALTFERREVLDSSNIKPMNLIGVDRGENIPAVIALTDPEGCPLSRFKDSLGNPTHILRIGESYKEKQRTIQAKKEVEQRRAGGYSRKYASKAKNLADDMVRNTARDLLYYAVTQDAMLIFENLSRGFGRQGKRTFMAERQYTRMEDWLTAKLAYEGLPSKVYLSKTLAQYTSKTCSNCGFTITSADYDRVLEKLKKTATGWMTTINGKELKVEGQITYYNRYKRQNVVKDLSVELDRLSEESVNNDISSWTKGRSGEALSLLKKRFSHRPVQEKFVCLNCGFETHADEQAALNIARSWLFLRSQEYKKYQTNKTTGNTDKRAFVETWQSFYRKKLKEVWKPAV

SEQ ID NO: 34782 - protein, 979 aa, synthetic construct
  REGION 1..979: note = engineered CasX variant
QEIKRINKIRRRLVKDSNTKKAGKTGPMKTLLVRVMTPDLRERLENLRKKPENIPQPISNTSRANLNKLLTDYTEMKKAILHVYWEEFQKDPVGLMSRVAQPASKKIDQNKLKPEMDEKGNLTTAGFACSQCGQPLFVYKLEQVSEKGKAYTNYFGRCNVAEHEKLIKLAQLKPEKDSDEAVTYSLGKFGQRALDFYSIHVTKESTHPVKPLAQIAGNRYASYPVGKALSDACMGTIASFLSKYQDIIIEHQKVVKGNQKRLESLRELAGKENLEYPSVTLPPQPHTKEGVDAYNEVIARVRMWVNLNLWQKLKLSRDDAKPLLRLKGFPSFPLVERQANEVDWWDMVCNVKKLINEKKEDGKVFWQNLAGYKRQEALRPYLSSEEDRKKGKKFARYQLGDLLLHLEKKHGEDWGKVYDEAWERIDKKVEGLSKHIKLEEERRSEDAQSKAALTDWLRAKASFVIEGLKEADKDEFCRCELKLQKWYGDLRGKPFAIEAENSILDISGFSKQYNCAFIWQKDGVKKLNLYLIINYFKGGKLRFKKIKPEAFEANRFYTVINKKSGEIVPMEVNFNFDDPNLIILPLAFGKRQGREFIWNDLLSLETGSLKLANGRVIEKTLYNRRTRQDEPALFVALTFERREVLDSSNIKPMNLIGVDRGENIPAVIALTDPEGCPLSRFKDSLGNPTHILRIGESYKEKQRTIQAKKEVEQRRAGGYSRKYASKAKNLADDMVRNTARDLLYYAVTQDAMLIFENLSRGFGRQGKRTFMAERQYTRMEDWLTAKLAYEGPLPSKTYLSKTLAQYTSKTCSNCGFTITSADYDRVLEKLKKTATGWMTTINGKELKVEGQITYYNRYKRQNVVKDLSVELDRLSEESVNNDISSWTKGRSGEALSLLKKRFSHRPVQEKFVCLNCGFETHADEQAALNIARSWLFLRSQEYKKYQTNKTTGNTDKRAFVETWQSFYRKKLKEVWKPAV

SEQ ID NO: 34783 - protein, 979 aa, synthetic construct
  REGION 1..979: note = engineered CasX variant
QEIKRINKIRRRLVKDSNTKKAGKTGPMKTLLVRVMTPDLRERLENLRKKPENIPQPISNTSRANLNKLLTDYTEMKKAILHVYWEEFQKDPVGLMSRVAQPASKKIDQNKLKPEMDEKGNLTTAGFACSQCGQPLFVYKLEQVSEKGKAYTNYFGRCNVAEHEKLIKLAQLKPEKDSDEAVTYSLGKFGQRALDFYSIHVTKESTHPVKPLAQIAGNRYASHPVGKALSDACMGTIASFLSKYQDIIIEHQKVVKGNQKRLESLRELAGKENLEYPSVTLPPQPHTKEGVDAYNEVIARVRMWVNLNLWQKLKLSRDDAKPLLRLKGFPSFPLVERQANEVDWWDMVCNVKKLINEKKEDGKVFWQNLAGYKRQEALRPYLSSEEDRKKGKKFARYQLGDLLLHLEKKHGEDWGKVYDEAWERIDKKVEGLSKHIKLEEERRSEDAQSKAALTDWLRAKASFVIEGLKEADKDEFCRCELKLQKWYGDLRGKPFAIEAENSILDISGFSKQYNCAFIWQKDGVKKLNLYLIINYFKGGKLRFKKIKPEAFEANRFYTVINKKSGEIVPMEVNFNFDDPNLIILPLAFGKRQGREFIWNDLLSLETGSLKLANGRVIEKTLYNRRTRQDEPALFVALTFERREVLDSSNIKPMNLIGVDRGENIPAVIALTDPEGCPLSRFKDSLGNPTHILRIGESYKEKQRTIQAKKEVEQRRAGGYSRKYASKAKNLADDMVRNTARDLLYYAVTQDAMLIFENLSRGFGRQGKRTFMAERQYTRMEDWLTAKLAYEGPLPSKTYLSKTLAQYTSKTCSNCGFTITSADYDRVLEKLKKTATGWMTTINGKELKVEGQITYYNRYKRQNVVKDLSVELDRLSEESVNNDISSWTKGRSGEALSLLKKRFSHRPVQEKFVCLNCGFETHADEQAALNIARSWLFLRSQEYKKYQTNKTTGNTDKRAFVETWQSFYRKKLKEVWKPAV

SEQ ID NO: 34784 - protein, 979 aa, synthetic construct
  REGION 1..979: note = engineered CasX variant
QEIKRINKIRRRLVKDSNTKKAGKTGPMKTLLVRVMTPDLRERLENLRKKPENIPQPISNTSRANLNKLLTDYTEMKKAILHVYWEEFQKDPVGLMSRVAQPASKKIDQNKLKPEMDEKGNLTTAGFACSQCGQPLFVYKLEQVSEKGKAYTNYFGRCNVAEHEKLIKLAQLKPEKDSDEAVTYSLGKFGQRALDFYSIHVTKESTHPVKPLAQIAGNRYASTPVGKALSDACMGTIASFLSKYQDIIIEHQKVVKGNQKRLESLRELAGKENLEYPSVTLPPQPHTKEGVDAYNEVIARVRMWVNLNLWQKLKLSRDDAKPLLRLKGFPSFPLVERQANEVDWWDMVCNVKKLINEKKEDGKVFWQNLAGYKRQEALRPYLSSEEDRKKGKKFARYQLGDLLLHLEKKHGEDWGKVYDEAWERIDKKVEGLSKHIKLEEERRSEDAQSKAALTDWLRAKASFVIEGLKEADKDEFCRCELKLQKWYGDLRGKPFAIEAENSILDISGFSKQYNCAFIWQKDGVKKLNLYLIINYFKGGKLRFKKIKPEAFEANRFYTVINKKSGEIVPMEVNFNFDDPNLIILPLAFGKRQGREFIWNDLLSLETGSLKLANGRVIEKTLYNRRTRQDEPALFVALTFERREVLDSSNIKPMNLIGVDRGENIPAVIALTDPEGCPLSRFKDSLGNPTHILRIGESYKEKQRTIQAKKEVEQRRAGGYSRKYASKAKNLADDMVRNTARDLLYYAVTQDAMLIFENLSRGFGRQGKRTFMAERQYTRMEDWLTAKLAYEGPLPSKTYLSKTLAQYTSKTCSNCGFTITSADYDRVLEKLKKTATGWMTTINGKELKVEGQITYYNRYKRQNVVKDLSVELDRLSEESVNNDISSWTKGRSGEALSLLKKRFSHRPVQEKFVCLNCGFETHADEQAALNIARSWLFLRSQEYKKYQTNKTTGNTDKRAFVETWQSFYRKKLKEVWKPAV

SEQ ID NO: 34785 - protein, 979 aa, synthetic construct
  REGION 1..979: note = engineered CasX variant
QEIKRINKIRRRLVKDSNTKKAGKTGPMKTLLVRVMTPDLRERLENLRKKPENIPQPISNTSRANLNKLLTDYTEMKKAILHVYWEEFQKDPVGLMSRVAQPASKKIDQNKLKPEMDEKGNLTTAGFACSQCGQPLFVYKLEQVSEKGKAYTNYFGRCNVAEHEKLIKLAQLKPEKDSDEAVTYSLGKFGQRALDFYSIHVTKESTHPVKPLAQIAGNRYASAPVGKALSDACMGTIASFLSKYQDIIIEHQKVVKGNQKRLESLRELAGKENLEYPSVTLPPQPHTKEGVDAYNEVIARVRMWVNLNLWQKLKLSRDDAKPLLRLKGFPSFPLVERQANEVDWWDMVCNVKKLINEKKEDGKVFWQNLAGYKRQEALRPYLSSEEDRKKGKKFARYQLGDLLLHLEKKHGEDWGKVYDEAWERIDKKVEGLSKHIKLEEERRSEDAQSKAALTDWLRAKASFVIEGLKEADKDEFCRCELKLQKWYGDLRGKPFAIEAENSILDISGFSKQYNCAFIWQKDGVKKLNLYLIINYFKGGKLRFKKIKPEAFEANRFYTVINKKSGEIVPMEVNFNFDDPNLIILPLAFGKRQGREFIWNDLLSLETGSLKLANGRVIEKTLYNRRTRQDEPALFVALTFERREVLDSSNIKPMNLIGVDRGENIPAVIALTDPEGCPLSRFKDSLGNPTHILRIGESYKEKQRTIQAKKEVEQRRAGGYSRKYASKAKNLADDMVRNTARDLLYYAVTQDAMLIFENLSRGFGRQGKRTFMAERQYTRMEDWLTAKLAYEGPLPSKTYLSKTLAQYTSKTCSNCGFTITSADYDRVLEKLKKTATGWMTTINGKELKVEGQITYYNRYKRQNVVKDLSVELDRLSEESVNNDISSWTKGRSGEALSLLKKRFSHRPVQEKFVCLNCGFETHADEQAALNIARSWLFLRSQEYKKYQTNKTTGNTDKRAFVETWQSFYRKKLKEVWKPAV

SEQ ID NO: 34786 - protein, 979 aa, synthetic construct
  REGION 1..979: note = engineered CasX variant
QEIKRINKIRRRLVKDSNTKKAGKTGPMKTLLVRVMTPDLRERLENLRKKPENIPQPISNTSRANLNKLLTDYTEMKKAILHVYWEEFQKDPVGLMSRVAQPASKKIDQNKLKPEMDEKGNLTTAGFACSQCGQPLFVYKLEQVSEKGKAYTNYFGRCNVAEHEKLIKLAQLKPEKDSDEAVTYSLGKFGQRALDFYSIHVTKESTHPVKPLAQIAGNRYASVPVGKALSDACMGTIASFLSKYQDIIIEHQKVVKGNQKRLESLRELAGKENLEYPSVTLPPQPHTKEGVDAYNEVIARVRMWVNLNLWQKLKLSRDDAKPLLRLKGFPSFPLVERQANEVDWWDMVCNVKKLINEKKEDGKVFWQNLAGYKRQEALRPYLSSEEDRKKGKKFARYQLGDLLLHLEKKHGEDWGKVYDEAWERIDKKVEGLSKHIKLEEERRSEDAQSKAALTDWLRAKASFVIEGLKEADKDEFCRCELKLQKWYGDLRGKPFAIEAENSILDISGFSKQYNCAFIWQKDGVKKLNLYLIINYFKGGKLRFKKIKPEAFEANRFYTVINKKSGEIVPMEVNFNFDDPNLIILPLAFGKRQGREFIWNDLLSLETGSLKLANGRVIEKTLYNRRTRQDEPALFVALTFERREVLDSSNIKPMNLIGVDRGENIPAVIALTDPEGCPLSRFKDSLGNPTHILRIGESYKEKQRTIQAKKEVEQRRAGGYSRKYASKAKNLADDMVRNTARDLLYYAVTQDAMLIFENLSRGFGRQGKRTFMAERQYTRMEDWLTAKLAYEGPLPSKTYLSKTLAQYTSKTCSNCGFTITSADYDRVLEKLKKTATGWMTTINGKELKVEGQITYYNRYKRQNVVKDLSVELDRLSEESVNNDISSWTKGRSGEALSLLKKRFSHRPVQEKFVCLNCGFETHADEQAALNIARSWLFLRSQEYKKYQTNKTTGNTDKRAFVETWQSFYRKKLKEVWKPAV

SEQ ID NO: 34787 - protein, 980 aa, synthetic construct
  REGION 1..980: note = engineered CasX variant
QEIKRINKIRRRLVKDSNTKKAGKTGPMKTLLVRVMTPDLRERLENLRKKPENIPQPISNTSRANLNKLLTDYTEMKKAILHVYWEEFQKDPVGLMSRVAQPASKKIDQNKLKPEMDEKGNLTTAGFACSQCGQPLFVYKLEQVSEKGKAYTNYFGRCNVAEHEKLIKKLAQLKPEKDSDEAVTYSLGKFGQRALDFYSIHVTKESTHPVKPLAQIAGNRYASGPVGKALSDACMGTIASFLSKYQDIIIEHQKVVKGNQKRLESLRELAGKENLEYPSVTLPPQPHTKEGVDAYNEVIARVRMWVNLNLWQKLKLSRDDAKPLLRLKGFPSFPLVERQANEVDWWDMVCNVKKLINEKKEDGKVFWQNLAGYKRQEALRPYLSSEEDRKKGKKFARYQLGDLLLHLEKKHGEDWGKVYDEAWERIDKKVEGLSKHIKLEEERRSEDAQSKAALTDWLRAKASFVIEGLKEADKDEFCRCELKLQKWYGDLRGKPFAIEAENSILDISGFSKQYNCAFIWQKDGVKKLNLYLIINYFKGGKLRFKKIKPEAFEANRFYTVINKKSGEIVPMEVNFNFDDPNLIILPLAFGKRQGREFIWNDLLSLETGSLKLANGRVIEKTLYNRRTRQDEPALFVALTFERREVLDSSNIKPMNLIGVDRGENIPAVIALTDPEGCPLSRFKDSLGNPTHILRIGESYKEKQRTIQAKKEVEQRRAGGYSRKYASKAKNLADDMVRNTARDLLYYAVTQDAMLIFENLSRGFGRQGKRTFMAERQYTRMEDWLTAKLAYEGPLPSKTYLSKTLAQYTSKTCSNCGFTITSADYDRVLEKLKKTATGWMTTINGKELKVEGQITYYNRYKRQNVVKDLSVELDRLSEESVNNDISSWTKGRSGEALSLLKKRFSHRPVQEKFVCLNCGFETHADEQAALNIARSWLFLRSQEYKKYQTNKTTGNTDKRAFVETWQSFYRKKLKEVWKPAV

SEQ ID NO: 34788 - protein, 978 aa, synthetic construct
  REGION 1..978: note = engineered CasX variant
QEIKRINKIRRRLVKDSNTKKAGKTGPMKTLLVRVMTPDLRERLENLRKKPENIPQPISNTSRANLNKLLTDYTEMKKAILHVYWEEFQKDPVGLMSRVAQPASKKIDQNKLKPEMDEKGNLTTAGFACSQCGQPLFVYKLEQVSEKGKAYTNYFGRCNVAEHEKLIKLAQLKPEKDSDEAVTYSLGKFGQRALDFYSIHVTKESTHPVKPLAQIAGNRYASPVGKALSDACMGTIASFLSKYQDIIIEHQKVVKGNQKRLESLRELAGKENLEYPSVTLPPQPHTKEGVDAYNEVIARVRMWVNLNLWQKLKLSRDDAKPLLRLKGFPSFPLVERQANEVDWWDMVCNVKKLINEKKEDGKVFWQNLAGYKRQEALRPYLSSEEDRKKGKKFARYQLGDLLLHLEKKHGEDWGKVYDEAWERIDKKVEGLSKHIKLEEERRSEDAQSKAALTDWLRAKASFVIEGLKEADKDEFCRCELKLQKWYGDLRGKPFAIEAENSILDISGFSKQYNCAFIWQKDGVKKLNLYLIINYFKGGKLRFKKIKPEAFEANRFYTVINKKSGEIVPMEVNFNFDDPNLIILPLAFGKRQGREFIWNDLLSLETGSLKLANGRVIEKTLYNRRTRQDEPALFVALTFERREVLDSSNIKPMNLIGVDRGENIPAVIALTDPEGCPLSRFKDSLGNPTHILRIGESYKEKQRTIQAKKEVEQRRAGGYSRKYASKAKNLADDMVRNTARDLLYYAVTQDAMLIFENLSRGFGRQGKRTFMAERQYTRMEDWLTAKLAYEGPLPSKTYLSKTLAQYTSKTCSNCGFTITSADYDRVLEKLKKTATGWMTTINGKELKVEGQITYYNRYKRQNVVKDLSVELDRLSEESVNNDISSWTKGRSGEALSLLKKRFSHRPVQEKFVCLNCGFETHADEQAALNIARSWLFLRSQEYKKYQTNKTTGNTDKRAFVETWQSFYRKKLKEVWKPAV

SEQ ID NO: 34789 - protein, 979 aa, synthetic construct
  REGION 1..979: note = engineered CasX variant
QEIKRINKIRRRLVKDSNTKKAGKTGPMKTLLVRVMTPDLRERLENLRKKPENIPQPISNTSRANLNKLLTDYTEMKKAILHVYWEEFQKDPVGLMSRVAQPASKKIDQNKLKPEMDEKGNLTTAGFACSQCGQPLFVYKLEQVSEKGKAYTNYFGRCNVAEHEKLIKLAQLKPEKDSDEAVTYSLGKFGQRALDFYSIHVTKESTHPVKPLAQIAGNRYASYPVGKALSDACMGTIASFLSKYQDIIIEHQKVVKGNQKRLESLRELAGKENLEYPSVTLPPQPHTKEGVDAYNEVIARVRMWVNLNLWQKLKLSRDDAKPLLRLKGFPSFPLVERQANEVDWWDMVCNVKKLINEKKEDGKVFWQNLAGYKRQEALRPYLSSEEDVRKKGKKFARYQLGDLLLHLEKKHGEDWGKVYDEAWERIDKKVEGLSKHIKLEEERRSEDAQSKAALTDWLRAKASFVIEGLKEADKDEFCRCELKLQKWYGDLRGKPFAIEAENSILDISGFSKQYNCAFIWQKDGVKKLNLYLIINYFKGGKLRFKKIKPEAFEANRFYTVINKKSGEIVPMEVNFNFDDPNLIILPLAFGKRQGREFIWNDLLSLETGSLKLANGRVIEKTLYNRRTRQDEPALFVALTFERREVLDSSNIKPMNLIGVDRGENIPAVIALTDPEGCPLSRFKDSLGNPTHILRIGESYKEKQRTIQAKKEVEQRRAGGYSRKYASKAKNLADDMVRNTARDLLYYAVTQDAMLIFENLSRGFGRQGKRTFMAERQYTRMEDWLTAKLAYEGLPSKTYLSKTLAQYTSKTCSNCGFTITSADYDRVLEKLKKTATGWMTTINGKELKVEGQITYYNRYKRQNVVKDLSVELDRLSEESVNNDISSWTKGRSGEALSLLKKRFSHRPVQEKFVCLNCGFETHADEQAALNIARSWLFLRSQEYKKYQTNKTTGNTDKRAFVETWQSFYRKKLKEVWKPAV

SEQ ID NO: 34790 - protein, 979 aa, synthetic construct
  REGION 1..979: note = engineered CasX variant
QEIKRINKIRRRLVKDSNTKKAGKTGPMKTLLVRVMTPDLRERLENLRKKPENIPQPISNTSRANLNKLLTDYTEMKKAILHVYWEEFQKDPVGLMSRVAQPASKKIDQNKLKPEMDEKGNLTTAGFACSQCGQPLFVYKLEQVSEKGKAYTNYFGRCNVAEHEKLIKLAQLKPEKDSDEAVTYSLGKFGQRALDFYSIHVTKESTHPVKPLAQIAGNRYASHPVGKALSDACMGTIASFLSKYQDIIIEHQKVVKGNQKRLESLRELAGKENLEYPSVTLPPQPHTKEGVDAYNEVIARVRMWVNLNLWQKLKLSRDDAKPLLRLKGFPSFPLVERQANEVDWWDMVCNVKKLINEKKEDGKVFWQNLAGYKRQEALRPYLSSEEDVRKKGKKFARYQLGDLLLHLEKKHGEDWGKVYDEAWERIDKKVEGLSKHIKLEEERRSEDAQSKAALTDWLRAKASFVIEGLKEADKDEFCRCELKLQKWYGDLRGKPFAIEAENSILDISGFSKQYNCAFIWQKDGVKKLNLYLIINYFKGGKLRFKKIKPEAFEANRFYTVINKKSGEIVPMEVNFNFDDPNLIILPLAFGKRQGREFIWNDLLSLETGSLKLANGRVIEKTLYNRRTRQDEPALFVALTFERREVLDSSNIKPMNLIGVDRGENIPAVIALTDPEGCPLSRFKDSLGNPTHILRIGESYKEKQRTIQAKKEVEQRRAGGYSRKYASKAKNLADDMVRNTARDLLYYAVTQDAMLIFENLSRGFGRQGKRTFMAERQYTRMEDWLTAKLAYEGLPSKTYLSKTLAQYTSKTCSNCGFTITSADYDRVLEKLKKTATGWMTTINGKELKVEGQITYYNRYKRQNVVKDLSVELDRLSEESVNNDISSWTKGRSGEALSLLKKRFSHRPVQEKFVCLNCGFETHADEQAALNIARSWLFLRSQEYKKYQTNKTTGNTDKRAFVETWQSFYRKKLKEVWKPAV

SEQ ID NO: 34791 - protein, 979 aa, synthetic construct
  REGION 1..979: note = engineered CasX variant
QEIKRINKIRRRLVKDSNTKKAGKTGPMKTLLVRVMTPDLRERLENLRKKPENIPQPISNTSRANLNKLLTDYTEMKKAILHVYWEEFQKDPVGLMSRVAQPASKKIDQNKLKPEMDEKGNLTTAGFACSQCGQPLFVYKLEQVSEKGKAYTNYFGRCNVAEHEKLIKLAQLKPEKDSDEAVTYSLGKFGQRALDFYSIHVTKESTHPVKPLAQIAGNRYASTPVGKALSDACMGTIASFLSKYQDIIIEHQKVVKGNQKRLESLRELAGKENLEYPSVTLPPQPHTKEGVDAYNEVIARVRMWVNLNLWQKLKLSRDDAKPLLRLKGFPSFPLVERQANEVDWWDMVCNVKKLINEKKEDGKVFWQNLAGYKRQEALRPYLSSEEDVRKKGKKFARYQLGDLLLHLEKKHGEDWGKVYDEAWERIDKKVEGLSKHIKLEEERRSEDAQSKAALTDWLRAKASFVIEGLKEADKDEFCRCELKLQKWYGDLRGKPFAIEAENSILDISGFSKQYNCAFIWQKDGVKKLNLYLIINYFKGGKLRFKKIKPEAFEANRFYTVINKKSGEIVPMEVNFNFDDPNLIILPLAFGKRQGREFIWNDLLSLETGSLKLANGRVIEKTLYNRRTRQDEPALFVALTFERREVLDSSNIKPMNLIGVDRGENIPAVIALTDPEGCPLSRFKDSLGNPTHILRIGESYKEKQRTIQAKKEVEQRRAGGYSRKYASKAKNLADDMVRNTARDLLYYAVTQDAMLIFENLSRGFGRQGKRTFMAERQYTRMEDWLTAKLAYEGLPSKTYLSKTLAQYTSKTCSNCGFTITSADYDRVLEKLKKTATGWMTTINGKELKVEGQITYYNRYKRQNVVKDLSVELDRLSEESVNNDISSWTKGRSGEALSLLKKRFSHRPVQEKFVCLNCGFETHADEQAALNIARSWLFLRSQEYKKYQTNKTTGNTDKRAFVETWQSFYRKKLKEVWKPAV

SEQ ID NO: 34792 - protein, 979 aa, synthetic construct
  REGION 1..979: note = engineered CasX variant
QEIKRINKIRRRLVKDSNTKKAGKTGPMKTLLVRVMTPDLRERLENLRKKPENIPQPISNTSRANLNKLLTDYTEMKKAILHVYWEEFQKDPVGLMSRVAQPASKKIDQNKLKPEMDEKGNLTTAGFACSQCGQPLFVYKLEQVSEKGKAYTNYFGRCNVAEHEKLIKLAQLKPEKDSDEAVTYSLGKFGQRALDFYSIHVTKESTHPVKPLAQIAGNRYASAPVGKALSDACMGTIASFLSKYQDIIIEHQKVVKGNQKRLESLRELAGKENLEYPSVTLPPQPHTKEGVDAYNEVIARVRMWVNLNLWQKLKLSRDDAKPLLRLKGFPSFPLVERQANEVDWWDMVCNVKKLINEKKEDGKVFWQNLAGYKRQEALRPYLSSEEDVRKKGKKFARYQLGDLLLHLEKKHGEDWGKVYDEAWERIDKKVEGLSKHIKLEEERRSEDAQSKAALTDWLRAKASFVIEGLKEADKDEFCRCELKLQKWYGDLRGKPFAIEAENSILDISGFSKQYNCAFIWQKDGVKKLNLYLIINYFKGGKLRFKKIKPEAFEANRFYTVINKKSGEIVPMEVNFNFDDPNLIILPLAFGKRQGREFIWNDLLSLETGSLKLANGRVIEKTLYNRRTRQDEPALFVALTFERREVLDSSNIKPMNLIGVDRGENIPAVIALTDPEGCPLSRFKDSLGNPTHILRIGESYKEKQRTIQAKKEVEQRRAGGYSRKYASKAKNLADDMVRNTARDLLYYAVTQDAMLIFENLSRGFGRQGKRTFMAERQYTRMEDWLTAKLAYEGLPSKTYLSKTLAQYTSKTCSNCGFTITSADYDRVLEKLKKTATGWMTTINGKELKVEGQITYYNRYKRQNVVKDLSVELDRLSEESVNNDISSWTKGRSGEALSLLKKRFSHRPVQEKFVCLNCGFETHADEQAALNIARSWLFLRSQEYKKYQTNKTTGNTDKRAFVETWQSFYRKKLKEVWKPAV

SEQ ID NO: 34793 - protein, 979 aa, synthetic construct
  REGION 1..979: note = engineered CasX variant
QEIKRINKIRRRLVKDSNTKKAGKTGPMKTLLVRVMTPDLRERLENLRKKPENIPQPISNTSRANLNKLLTDYTEMKKAILHVYWEEFQKDPVGLMSRVAQPASKKIDQNKLKPEMDEKGNLTTAGFACSQCGQPLFVYKLEQVSEKGKAYTNYFGRCNVAEHEKLIKLAQLKPEKDSDEAVTYSLGKFGQRALDFYSIHVTKESTHPVKPLAQIAGNRYASVPVGKALSDACMGTIASFLSKYQDIIIEHQKVVKGNQKRLESLRELAGKENLEYPSVTLPPQPHTKEGVDAYNEVIARVRMWVNLNLWQKLKLSRDDAKPLLRLKGFPSFPLVERQANEVDWWDMVCNVKKLINEKKEDGKVFWQNLAGYKRQEALRPYLSSEEDVRKKGKKFARYQLGDLLLHLEKKHGEDWGKVYDEAWERIDKKVEGLSKHIKLEEERRSEDAQSKAALTDWLRAKASFVIEGLKEADKDEFCRCELKLQKWYGDLRGKPFAIEAENSILDISGFSKQYNCAFIWQKDGVKKLNLYLIINYFKGGKLRFKKIKPEAFEANRFYTVINKKSGEIVPMEVNFNFDDPNLIILPLAFGKRQGREFIWNDLLSLETGSLKLANGRVIEKTLYNRRTRQDEPALFVALTFERREVLDSSNIKPMNLIGVDRGENIPAVIALTDPEGCPLSRFKDSLGNPTHILRIGESYKEKQRTIQAKKEVEQRRAGGYSRKYASKAKNLADDMVRNTARDLLYYAVTQDAMLIFENLSRGFGRQGKRTFMAERQYTRMEDWLTAKLAYEGLPSKTYLSKTLAQYTSKTCSNCGFTITSADYDRVLEKLKKTATGWMTTINGKELKVEGQITYYNRYKRQNVVKDLSVELDRLSEESVNNDISSWTKGRSGEALSLLKKRFSHRPVQEKFVCLNCGFETHADEQAALNIARSWLFLRSQEYKKYQTNKTTGNTDKRAFVETWQSFYRKKLKEVWKPAV

SEQ ID NO: 34794 - protein, 980 aa, synthetic construct
  REGION 1..980: note = engineered CasX variant
QEIKRINKIRRRLVKDSNTKKAGKTGPMKTLLVRVMTPDLRERLENLRKKPENIPQPISNTSRANLNKLLTDYTEMKKAILHVYWEEFQKDPVGLMSRVAQPASKKIDQNKLKPEMDEKGNLTTAGFACSQCGQPLFVYKLEQVSEKGKAYTNYFGRCNVAEHEKLIKKLAQLKPEKDSDEAVTYSLGKFGQRALDFYSIHVTKESTHPVKPLAQIAGNRYASGPVGKALSDACMGTIASFLSKYQDIIIEHQKVVKGNQKRLESLRELAGKENLEYPSVTLPPQPHTKEGVDAYNEVIARVRMWVNLNLWQKLKLSRDDAKPLLRLKGFPSFPLVERQANEVDWWDMVCNVKKLINEKKEDGKVFWQNLAGYKRQEALRPYLSSEEDVRKKGKKFARYQLGDLLLHLEKKHGEDWGKVYDEAWERIDKKVEGLSKHIKLEEERRSEDAQSKAALTDWLRAKASFVIEGLKEADKDEFCRCELKLQKWYGDLRGKPFAIEAENSILDISGFSKQYNCAFIWQKDGVKKLNLYLIINYFKGGKLRFKKIKPEAFEANRFYTVINKKSGEIVPMEVNFNFDDPNLIILPLAFGKRQGREFIWNDLLSLETGSLKLANGRVIEKTLYNRRTRQDEPALFVALTFERREVLDSSNIKPMNLIGVDRGENIPAVIALTDPEGCPLSRFKDSLGNPTHILRIGESYKEKQRTIQAKKEVEQRRAGGYSRKYASKAKNLADDMVRNTARDLLYYAVTQDAMLIFENLSRGFGRQGKRTFMAERQYTRMEDWLTAKLAYEGLPSKTYLSKTLAQYTSKTCSNCGFTITSADYDRVLEKLKKTATGWMTTINGKELKVEGQITYYNRYKRQNVVKDLSVELDRLSEESVNNDISSWTKGRSGEALSLLKKRFSHRPVQEKFVCLNCGFETHADEQAALNIARSWLFLRSQEYKKYQTNKTTGNTDKRAFVETWQSFYRKKLKEVWKPAV

SEQ ID NO: 34795 - protein, 978 aa, synthetic construct
  REGION 1..978: note = engineered CasX variant
QEIKRINKIRRRLVKDSNTKKAGKTGPMKTLLVRVMTPDLRERLENLRKKPENIPQPISNTSRANLNKLLTDYTEMKKAILHVYWEEFQKDPVGLMSRVAQPASKKIDQNKLKPEMDEKGNLTTAGFACSQCGQPLFVYKLEQVSEKGKAYTNYFGRCNVAEHEKLIKLAQLKPEKDSDEAVTYSLGKFGQRALDFYSIHVTKESTHPVKPLAQIAGNRYASPVGKALSDACMGTIASFLSKYQDIIIEHQKVVKGNQKRLESLRELAGKENLEYPSVTLPPQPHTKEGVDAYNEVIARVRMWVNLNLWQKLKLSRDDAKPLLRLKGFPSFPLVERQANEVDWWDMVCNVKKLINEKKEDGKVFWQNLAGYKRQEALRPYLSSEEDVRKKGKKFARYQLGDLLLHLEKKHGEDWGKVYDEAWERIDKKVEGLSKHIKLEEERRSEDAQSKAALTDWLRAKASFVIEGLKEADKDEFCRCELKLQKWYGDLRGKPFAIEAENSILDISGFSKQYNCAFIWQKDGVKKLNLYLIINYFKGGKLRFKKIKPEAFEANRFYTVINKKSGEIVPMEVNFNFDDPNLIILPLAFGKRQGREFIWNDLLSLETGSLKLANGRVIEKTLYNRRTRQDEPALFVALTFERREVLDSSNIKPMNLIGVDRGENIPAVIALTDPEGCPLSRFKDSLGNPTHILRIGESYKEKQRTIQAKKEVEQRRAGGYSRKYASKAKNLADDMVRNTARDLLYYAVTQDAMLIFENLSRGFGRQGKRTFMAERQYTRMEDWLTAKLAYEGLPSKTYLSKTLAQYTSKTCSNCGFTITSADYDRVLEKLKKTATGWMTTINGKELKVEGQITYYNRYKRQNVVKDLSVELDRLSEESVNNDISSWTKGRSGEALSLLKKRFSHRPVQEKFVCLNCGFETHADEQAALNIARSWLFLRSQEYKKYQTNKTTGNTDKRAFVETWQSFYRKKLKEVWKPAV

SEQ ID NO: 34796 - protein, 978 aa, synthetic construct
  REGION 1..978: note = engineered CasX variant
QEIKRINKIRRRLVKDSNTKKAGKTGPMKTLLVRVMTPDLRERLENLRKKPENIPQPISNTSRANLNKLLTDYTEMKKAILHVYWEEFQKDPVGLMSRVAQPASKKIDQNKLKPEMDEKGNLTTAGFACSQCGQPLFVYKLEQVSEKGKAYTNYFGRCNVAEHEKLIKLAQLKPEKDSDEAVTYSLGKFGQRALDFYSIHVTKESTHPVKPLAQIAGNRYASYPVGKALSDACMGTIASFLSKYQDIIIEHQKVVKGNQKRLESLRELAGKENLEYPSVTLPPQPHTKEGVDAYNEVIARVRMWVNLNLWQKLKLSRDDAKPLLRLKGFPSFPLVERQANEVDWWDMVCNVKKLINEKKEDGKVFWQNLAGYKRQEALRPYLSSEEDRKKGKKFARYQLGDLLLHLEKKHGEDWGKVYDEAWERIDKKVEGLSKHIKLEEERRSEDAQSKAALTDWLRAKASFVIEGLKEADKDEFCRCELKLQKWYGDLRGKPFAIEAENSILDISGFSKQYNCAFIWQKDGVKKLNLYLIINYFKGGKLRFKKIKPEAFEANRFYTVINKKSGEIVPMEVNFNFDDPNLIILPLAFGKRQGREFIWNDLLSLETGSLKLANGRVIEKTLYNRRTRQDEPALFVALTFERREVLDSSNIKPMNLIGVDRGENIPAVIALTDPEGCPLSRFKDSLGNPTHILRIGESYKEKQRTIQAKKEVEQRRAGGYSRKYASKAKNLADDMVRNTARDLLYYAVTQDAMLIFENLSRGFGRQGKRTFMAERQYTRMEDWLTAKLAYEGLPSKTYLSKTLAQYTSKTCSNCGFTITSADYDRMLEKLKKTATGWMTTINGKELKVEGQITYYNRYKRQNVVKDLSVELDRLSEESVNNDISSWTKGRSGEALSLLKKRFSHRPVQEKFVCLNCGFETHADEQAALNIARSWLFLRSQEYKKYQTNKTTGNTDKRAFVETWQSFYRKKLKEVWKPAV

SEQ ID NO: 34797 - protein, 978 aa, synthetic construct
  REGION 1..978: note = engineered CasX variant
QEIKRINKIRRRLVKDSNTKKAGKTGPMKTLLVRVMTPDLRERLENLRKKPENIPQPISNTSRANLNKLLTDYTEMKKAILHVYWEEFQKDPVGLMSRVAQPASKKIDQNKLKPEMDEKGNLTTAGFACSQCGQPLFVYKLEQVSEKGKAYTNYFGRCNVAEHEKLIKLAQLKPEKDSDEAVTYSLGKFGQRALDFYSIHVTKESTHPVKPLAQIAGNRYASHPVGKALSDACMGTIASFLSKYQDIIIEHQKVVKGNQKRLESLRELAGKENLEYPSVTLPPQPHTKEGVDAYNEVIARVRMWVNLNLWQKLKLSRDDAKPLLRLKGFPSFPLVERQANEVDWWDMVCNVKKLINEKKEDGKVFWQNLAGYKRQEALRPYLSSEEDRKKGKKFARYQLGDLLLHLEKKHGEDWGKVYDEAWERIDKKVEGLSKHIKLEEERRSEDAQSKAALTDWLRAKASFVIEGLKEADKDEFCRCELKLQKWYGDLRGKPFAIEAENSILDISGFSKQYNCAFIWQKDGVKKLNLYLIINYFKGGKLRFKKIKPEAFEANRFYTVINKKSGEIVPMEVNFNFDDPNLIILPLAFGKRQGREFIWNDLLSLETGSLKLANGRVIEKTLYNRRTRQDEPALFVALTFERREVLDSSNIKPMNLIGVDRGENIPAVIALTDPEGCPLSRFKDSLGNPTHILRIGESYKEKQRTIQAKKEVEQRRAGGYSRKYASKAKNLADDMVRNTARDLLYYAVTQDAMLIFENLSRGFGRQGKRTFMAERQYTRMEDWLTAKLAYEGLPSKTYLSKTLAQYTSKTCSNCGFTITSADYDRMLEKLKKTATGWMTTINGKELKVEGQITYYNRYKRQNVVKDLSVELDRLSEESVNNDISSWTKGRSGEALSLLKKRFSHRPVQEKFVCLNCGFETHADEQAALNIARSWLFLRSQEYKKYQTNKTTGNTDKRAFVETWQSFYRKKLKEVWKPAV

SEQ ID NO: 34798 - protein, 978 aa, synthetic construct
  REGION 1..978: note = engineered CasX variant
QEIKRINKIRRRLVKDSNTKKAGKTGPMKTLLVRVMTPDLRERLENLRKKPENIPQPISNTSRANLNKLLTDYTEMKKAILHVYWEEFQKDPVGLMSRVAQPASKKIDQNKLKPEMDEKGNLTTAGFACSQCGQPLFVYKLEQVSEKGKAYTNYFGRCNVAEHEKLIKLAQLKPEKDSDEAVTYSLGKFGQRALDFYSIHVTKESTHPVKPLAQIAGNRYASTPVGKALSDACMGTIASFLSKYQDIIIEHQKVVKGNQKRLESLRELAGKENLEYPSVTLPPQPHTKEGVDAYNEVIARVRMWVNLNLWQKLKLSRDDAKPLLRLKGFPSFPLVERQANEVDWWDMVCNVKKLINEKKEDGKVFWQNLAGYKRQEALRPYLSSEEDRKKGKKFARYQLGDLLLHLEKKHGEDWGKVYDEAWERIDKKVEGLSKHIKLEEERRSEDAQSKAALTDWLRAKASFVIEGLKEADKDEFCRCELKLQKWYGDLRGKPFAIEAENSILDISGFSKQYNCAFIWQKDGVKKLNLYLIINYFKGGKLRFKKIKPEAFEANRFYTVINKKSGEIVPMEVNFNFDDPNLIILPLAFGKRQGREFIWNDLLSLETGSLKLANGRVIEKTLYNRRTRQDEPALFVALTFERREVLDSSNIKPMNLIGVDRGENIPAVIALTDPEGCPLSRFKDSLGNPTHILRIGESYKEKQRTIQAKKEVEQRRAGGYSRKYASKAKNLADDMVRNTARDLLYYAVTQDAMLIFENLSRGFGRQGKRTFMAERQYTRMEDWLTAKLAYEGLPSKTYLSKTLAQYTSKTCSNCGFTITSADYDRMLEKLKKTATGWMTTINGKELKVEGQITYYNRYKRQNVVKDLSVELDRLSEESVNNDISSWTKGRSGEALSLLKKRFSHRPVQEKFVCLNCGFETHADEQAALNIARSWLFLRSQEYKKYQTNKTTGNTDKRAFVETWQSFYRKKLKEVWKPAV

SEQ ID NO: 34799 - protein, 978 aa, synthetic construct
  REGION 1..978: note = engineered CasX variant
QEIKRINKIRRRLVKDSNTKKAGKTGPMKTLLVRVMTPDLRERLENLRKKPENIPQPISNTSRANLNKLLTDYTEMKKAILHVYWEEFQKDPVGLMSRVAQPASKKIDQNKLKPEMDEKGNLTTAGFACSQCGQPLFVYKLEQVSEKGKAYTNYFGRCNVAEHEKLIKLAQLKPEKDSDEAVTYSLGKFGQRALDFYSIHVTKESTHPVKPLAQIAGNRYASAPVGKALSDACMGTIASFLSKYQDIIIEHQKVVKGNQKRLESLRELAGKENLEYPSVTLPPQPHTKEGVDAYNEVIARVRMWVNLNLWQKLKLSRDDAKPLLRLKGFPSFPLVERQANEVDWWDMVCNVKKLINEKKEDGKVFWQNLAGYKRQEALRPYLSSEEDRKKGKKFARYQLGDLLLHLEKKHGEDWGKVYDEAWERIDKKVEGLSKHIKLEEERRSEDAQSKAALTDWLRAKASFVIEGLKEADKDEFCRCELKLQKWYGDLRGKPFAIEAENSILDISGFSKQYNCAFIWQKDGVKKLNLYLIINYFKGGKLRFKKIKPEAFEANRFYTVINKKSGEIVPMEVNFNFDDPNLIILPLAFGKRQGREFIWNDLLSLETGSLKLANGRVIEKTLYNRRTRQDEPALFVALTFERREVLDSSNIKPMNLIGVDRGENIPAVIALTDPEGCPLSRFKDSLGNPTHILRIGESYKEKQRTIQAKKEVEQRRAGGYSRKYASKAKNLADDMVRNTARDLLYYAVTQDAMLIFENLSRGFGRQGKRTFMAERQYTRMEDWLTAKLAYEGLPSKTYLSKTLAQYTSKTCSNCGFTITSADYDRMLEKLKKTATGWMTTINGKELKVEGQITYYNRYKRQNVVKDLSVELDRLSEESVNNDISSWTKGRSGEALSLLKKRFSHRPVQEKFVCLNCGFETHADEQAALNIARSWLFLRSQEYKKYQTNKTTGNTDKRAFVETWQSFYRKKLKEVWKPAV

SEQ ID NO: 34800 - protein, 978 aa, synthetic construct
  REGION 1..978: note = engineered CasX variant
QEIKRINKIRRRLVKDSNTKKAGKTGPMKTLLVRVMTPDLRERLENLRKKPENIPQPISNTSRANLNKLLTDYTEMKKAILHVYWEEFQKDPVGLMSRVAQPASKKIDQNKLKPEMDEKGNLTTAGFACSQCGQPLFVYKLEQVSEKGKAYTNYFGRCNVAEHEKLIKLAQLKPEKDSDEAVTYSLGKFGQRALDFYSIHVTKESTHPVKPLAQIAGNRYASVPVGKALSDACMGTIASFLSKYQDIIIEHQKVVKGNQKRLESLRELAGKENLEYPSVTLPPQPHTKEGVDAYNEVIARVRMWVNLNLWQKLKLSRDDAKPLLRLKGFPSFPLVERQANEVDWWDMVCNVKKLINEKKEDGKVFWQNLAGYKRQEALRPYLSSEEDRKKGKKFARYQLGDLLLHLEKKHGEDWGKVYDEAWERIDKKVEGLSKHIKLEEERRSEDAQSKAALTDWLRAKASFVIEGLKEADKDEFCRCELKLQKWYGDLRGKPFAIEAENSILDISGFSKQYNCAFIWQKDGVKKLNLYLIINYFKGGKLRFKKIKPEAFEANRFYTVINKKSGEIVPMEVNFNFDDPNLIILPLAFGKRQGREFIWNDLLSLETGSLKLANGRVIEKTLYNRRTRQDEPALFVALTFERREVLDSSNIKPMNLIGVDRGENIPAVIALTDPEGCPLSRFKDSLGNPTHILRIGESYKEKQRTIQAKKEVEQRRAGGYSRKYASKAKNLADDMVRNTARDLLYYAVTQDAMLIFENLSRGFGRQGKRTFMAERQYTRMEDWLTAKLAYEGLPSKTYLSKTLAQYTSKTCSNCGFTITSADYDRMLEKLKKTATGWMTTINGKELKVEGQITYYNRYKRQNVVKDLSVELDRLSEESVNNDISSWTKGRSGEALSLLKKRFSHRPVQEKFVCLNCGFETHADEQAALNIARSWLFLRSQEYKKYQTNKTTGNTDKRAFVETWQSFYRKKLKEVWKPAV

SEQ ID NO: 34801 - protein, 979 aa, synthetic construct
  REGION 1..979: note = engineered CasX variant
QEIKRINKIRRRLVKDSNTKKAGKTGPMKTLLVRVMTPDLRERLENLRKKPENIPQPISNTSRANLNKLLTDYTEMKKAILHVYWEEFQKDPVGLMSRVAQPASKKIDQNKLKPEMDEKGNLTTAGFACSQCGQPLFVYKLEQVSEKGKAYTNYFGRCNVAEHEKLIKKLAQLKPEKDSDEAVTYSLGKFGQRALDFYSIHVTKESTHPVKPLAQIAGNRYASGPVGKALSDACMGTIASFLSKYQDIIIEHQKVVKGNQKRLESLRELAGKENLEYPSVTLPPQPHTKEGVDAYNEVIARVRMWVNLNLWQKLKLSRDDAKPLLRLKGFPSFPLVERQANEVDWWDMVCNVKKLINEKKEDGKVFWQNLAGYKRQEALRPYLSSEEDRKKGKKFARYQLGDLLLHLEKKHGEDWGKVYDEAWERIDKKVEGLSKHIKLEEERRSEDAQSKAALTDWLRAKASFVIEGLKEADKDEFCRCELKLQKWYGDLRGKPFAIEAENSILDISGFSKQYNCAFIWQKDGVKKLNLYLIINYFKGGKLRFKKIKPEAFEANRFYTVINKKSGEIVPMEVNFNFDDPNLIILPLAFGKRQGREFIWNDLLSLETGSLKLANGRVIEKTLYNRRTRQDEPALFVALTFERREVLDSSNIKPMNLIGVDRGENIPAVIALTDPEGCPLSRFKDSLGNPTHILRIGESYKEKQRTIQAKKEVEQRRAGGYSRKYASKAKNLADDMVRNTARDLLYYAVTQDAMLIFENLSRGFGRQGKRTFMAERQYTRMEDWLTAKLAYEGLPSKTYLSKTLAQYTSKTCSNCGFTITSADYDRMLEKLKKTATGWMTTINGKELKVEGQITYYNRYKRQNVVKDLSVELDRLSEESVNNDISSWTKGRSGEALSLLKKRFSHRPVQEKFVCLNCGFETHADEQAALNIARSWLFLRSQEYKKYQTNKTTGNTDKRAFVETWQSFYRKKLKEVWKPAV

SEQ ID NO: 34802 - protein, 977 aa, synthetic construct
  REGION 1..977: note = engineered CasX variant
QEIKRINKIRRRLVKDSNTKKAGKTGPMKTLLVRVMTPDLRERLENLRKKPENIPQPISNTSRANLNKLLTDYTEMKKAILHVYWEEFQKDPVGLMSRVAQPASKKIDQNKLKPEMDEKGNLTTAGFACSQCGQPLFVYKLEQVSEKGKAYTNYFGRCNVAEHEKLIKLAQLKPEKDSDEAVTYSLGKFGQRALDFYSIHVTKESTHPVKPLAQIAGNRYASPVGKALSDACMGTIASFLSKYQDIIIEHQKVVKGNQKRLESLRELAGKENLEYPSVTLPPQPHTKEGVDAYNEVIARVRMWVNLNLWQKLKLSRDDAKPLLRLKGFPSFPLVERQANEVDWWDMVCNVKKLINEKKEDGKVFWQNLAGYKRQEALRPYLSSEEDRKKGKKFARYQLGDLLLHLEKKHGEDWGKVYDEAWERIDKKVEGLSKHIKLEEERRSEDAQSKAALTDWLRAKASFVIEGLKEADKDEFCRCELKLQKWYGDLRGKPFAIEAENSILDISGFSKQYNCAFIWQKDGVKKLNLYLIINYFKGGKLRFKKIKPEAFEANRFYTVINKKSGEIVPMEVNFNFDDPNLIILPLAFGKRQGREFIWNDLLSLETGSLKLANGRVIEKTLYNRRTRQDEPALFVALTFERREVLDSSNIKPMNLIGVDRGENIPAVIALTDPEGCPLSRFKDSLGNPTHILRIGESYKEKQRTIQAKKEVEQRRAGGYSRKYASKAKNLADDMVRNTARDLLYYAVTQDAMLIFENLSRGFGRQGKRTFMAERQYTRMEDWLTAKLAYEGLPSKTYLSKTLAQYTSKTCSNCGFTITSADYDRMLEKLKKTATGWMTTINGKELKVEGQITYYNRYKRQNVVKDLSVELDRLSEESVNNDISSWTKGRSGEALSLLKKRFSHRPVQEKFVCLNCGFETHADEQAALNIARSWLFLRSQEYKKYQTNKTTGNTDKRAFVETWQSFYRKKLKEVWKPAV

SEQ ID NO: 34803 - protein, 978 aa, synthetic construct
  REGION 1..978: note = engineered CasX variant
QEIKRINKIRRRLVKDSNTKKAGKTGPMKTLLVRVMTPDLRERLENLRKKPENIPQPISNTSRANLNKLLTDYTEMKKAILHVYWEEFQKDPVGLMSRVAQPASKKIDQNKLKPEMDEKGNLTTAGFACSQCGQPLFVYKLEQVSEKGKAYTNYFGRCNVAEHEKLIKLAQLKPEKDSDEAVTYSLGKFGQRALDFYSIHVTKESTHPVKPLAQIAGNRYASYPVGKALSDACMGTIASFLSKYQDIIIEHQKVVKGNQKRLESLRELAGKENLEYPSVTLPPQPHTKEGVDAYNEVIARVRMWVNLNLWQKLKLSRDDAKPLLRLKGFPSFPLVERQANEVDWWDMVCNVKKLINEKKEDGKVFWQNLAGYKRQEALRPYLSSEEDRKKGKKFARYQLGDLLLHLEKKHGEDWGKVYDEAWERIDKKVEGLSKHIKLEEERRSEDAQSKAALTDWLRAKASFVIEGLKEADKDEFCRCELKLQKWYGDLRGKPFAIEAENSILDISGFSKQYNCAFIWQKDGVKKLNLYLIINYFKGGKLRFKKIKPEAFEANRFYTVINKKSGEIVPMEVNFNFDDPNLIILPLAFGKRQGREFIWNDLLSLETGSLKLANGRVIEKTLYNRRTRQDEPALFVALTFERREVLDSSNIKPMNLIGVDRGENIPAVIALTDPEGCPLSRFKDSLGNPTHILRIGESYKEKQRTIQAKKEVEQRRAGGYSRKYASKAKNLADDMVRNTARDLLYYAVTQDAMLIFENLSRGFGRQGKRTFMAERQYTRMEDWLTAKLAYEGLPSKTYLSKTLAQYTSKTCSNCGFTITSADYDRVLEKLKKTATGWMTTINGKELKVEGQITYYNRYKRQNVVKDLSVELDRLSEESVNNDISSWTKGRQGEALSLLKKRFSHRPVQEKFVCLNCGFETHADEQAALNIARSWLFLRSQEYKKYQTNKTTGNTDKRAFVETWQSFYRKKLKEVWKPAV

SEQ ID NO: 34804 - protein, 978 aa, synthetic construct
  REGION 1..978: note = engineered CasX variant
QEIKRINKIRRRLVKDSNTKKAGKTGPMKTLLVRVMTPDLRERLENLRKKPENIPQPISNTSRANLNKLLTDYTEMKKAILHVYWEEFQKDPVGLMSRVAQPASKKIDQNKLKPEMDEKGNLTTAGFACSQCGQPLFVYKLEQVSEKGKAYTNYFGRCNVAEHEKLIKLAQLKPEKDSDEAVTYSLGKFGQRALDFYSIHVTKESTHPVKPLAQIAGNRYASHPVGKALSDACMGTIASFLSKYQDIIIEHQKVVKGNQKRLESLRELAGKENLEYPSVTLPPQPHTKEGVDAYNEVIARVRMWVNLNLWQKLKLSRDDAKPLLRLKGFPSFPLVERQANEVDWWDMVCNVKKLINEKKEDGKVFWQNLAGYKRQEALRPYLSSEEDRKKGKKFARYQLGDLLLHLEKKHGEDWGKVYDEAWERIDKKVEGLSKHIKLEEERRSEDAQSKAALTDWLRAKASFVIEGLKEADKDEFCRCELKLQKWYGDLRGKPFAIEAENSILDISGFSKQYNCAFIWQKDGVKKLNLYLIINYFKGGKLRFKKIKPEAFEANRFYTVINKKSGEIVPMEVNFNFDDPNLIILPLAFGKRQGREFIWNDLLSLETGSLKLANGRVIEKTLYNRRTRQDEPALFVALTFERREVLDSSNIKPMNLIGVDRGENIPAVIALTDPEGCPLSRFKDSLGNPTHILRIGESYKEKQRTIQAKKEVEQRRAGGYSRKYASKAKNLADDMVRNTARDLLYYAVTQDAMLIFENLSRGFGRQGKRTFMAERQYTRMEDWLTAKLAYEGLPSKTYLSKTLAQYTSKTCSNCGFTITSADYDRVLEKLKKTATGWMTTINGKELKVEGQITYYNRYKRQNVVKDLSVELDRLSEESVNNDISSWTKGRQGEALSLLKKRFSHRPVQEKFVCLNCGFETHADEQAALNIARSWLFLRSQEYKKYQTNKTTGNTDKRAFVETWQSFYRKKLKEVWKPAV

SEQ ID NO: 34805 - protein, 978 aa, synthetic construct
  REGION 1..978: note = engineered CasX variant
QEIKRINKIRRRLVKDSNTKKAGKTGPMKTLLVRVMTPDLRERLENLRKKPENIPQPISNTSRANLNKLLTDYTEMKKAILHVYWEEFQKDPVGLMSRVAQPASKKIDQNKLKPEMDEKGNLTTAGFACSQCGQPLFVYKLEQVSEKGKAYTNYFGRCNVAEHEKLIKLAQLKPEKDSDEAVTYSLGKFGQRALDFYSIHVTKESTHPVKPLAQIAGNRYASTPVGKALSDACMGTIASFLSKYQDIIIEHQKVVKGNQKRLESLRELAGKENLEYPSVTLPPQPHTKEGVDAYNEVIARVRMWVNLNLWQKLKLSRDDAKPLLRLKGFPSFPLVERQANEVDWWDMVCNVKKLINEKKEDGKVFWQNLAGYKRQEALRPYLSSEEDRKKGKKFARYQLGDLLLHLEKKHGEDWGKVYDEAWERIDKKVEGLSKHIKLEEERRSEDAQSKAALTDWLRAKASFVIEGLKEADKDEFCRCELKLQKWYGDLRGKPFAIEAENSILDISGFSKQYNCAFIWQKDGVKKLNLYLIINYFKGGKLRFKKIKPEAFEANRFYTVINKKSGEIVPMEVNFNFDDPNLIILPLAFGKRQGREFIWNDLLSLETGSLKLANGRVIEKTLYNRRTRQDEPALFVALTFERREVLDSSNIKPMNLIGVDRGENIPAVIALTDPEGCPLSRFKDSLGNPTHILRIGESYKEKQRTIQAKKEVEQRRAGGYSRKYASKAKNLADDMVRNTARDLLYYAVTQDAMLIFENLSRGFGRQGKRTFMAERQYTRMEDWLTAKLAYEGLPSKTYLSKTLAQYTSKTCSNCGFTITSADYDRVLEKLKKTATGWMTTINGKELKVEGQITYYNRYKRQNVVKDLSVELDRLSEESVNNDISSWTKGRQGEALSLLKKRFSHRPVQEKFVCLNCGFETHADEQAALNIARSWLFLRSQEYKKYQTNKTTGNTDKRAFVETWQSFYRKKLKEVWKPAV

SEQ ID NO: 34806 - protein, 978 aa, synthetic construct
  REGION 1..978: note = engineered CasX variant
QEIKRINKIRRRLVKDSNTKKAGKTGPMKTLLVRVMTPDLRERLENLRKKPENIPQPISNTSRANLNKLLTDYTEMKKAILHVYWEEFQKDPVGLMSRVAQPASKKIDQNKLKPEMDEKGNLTTAGFACSQCGQPLFVYKLEQVSEKGKAYTNYFGRCNVAEHEKLIKLAQLKPEKDSDEAVTYSLGKFGQRALDFYSIHVTKESTHPVKPLAQIAGNRYASAPVGKALSDACMGTIASFLSKYQDIIIEHQKVVKGNQKRLESLRELAGKENLEYPSVTLPPQPHTKEGVDAYNEVIARVRMWVNLNLWQKLKLSRDDAKPLLRLKGFPSFPLVERQANEVDWWDMVCNVKKLINEKKEDGKVFWQNLAGYKRQEALRPYLSSEEDRKKGKKFARYQLGDLLLHLEKKHGEDWGKVYDEAWERIDKKVEGLSKHIKLEEERRSEDAQSKAALTDWLRAKASFVIEGLKEADKDEFCRCELKLQKWYGDLRGKPFAIEAENSILDISGFSKQYNCAFIWQKDGVKKLNLYLIINYFKGGKLRFKKIKPEAFEANRFYTVINKKSGEIVPMEVNFNFDDPNLIILPLAFGKRQGREFIWNDLLSLETGSLKLANGRVIEKTLYNRRTRQDEPALFVALTFERREVLDSSNIKPMNLIGVDRGENIPAVIALTDPEGCPLSRFKDSLGNPTHILRIGESYKEKQRTIQAKKEVEQRRAGGYSRKYASKAKNLADDMVRNTARDLLYYAVTQDAMLIFENLSRGFGRQGKRTFMAERQYTRMEDWLTAKLAYEGLPSKTYLSKTLAQYTSKTCSNCGFTITSADYDRVLEKLKKTATGWMTTINGKELKVEGQITYYNRYKRQNVVKDLSVELDRLSEESVNNDISSWTKGRQGEALSLLKKRFSHRPVQEKFVCLNCGFETHADEQAALNIARSWLFLRSQEYKKYQTNKTTGNTDKRAFVETWQSFYRKKLKEVWKPAV

SEQ ID NO: 34807 - protein, 978 aa, synthetic construct
  REGION 1..978: note = engineered CasX variant
QEIKRINKIRRRLVKDSNTKKAGKTGPMKTLLVRVMTPDLRERLENLRKKPENIPQPISNTSRANLNKLLTDYTEMKKAILHVYWEEFQKDPVGLMSRVAQPASKKIDQNKLKPEMDEKGNLTTAGFACSQCGQPLFVYKLEQVSEKGKAYTNYFGRCNVAEHEKLIKLAQLKPEKDSDEAVTYSLGKFGQRALDFYSIHVTKESTHPVKPLAQIAGNRYASVPVGKALSDACMGTIASFLSKYQDIIIEHQKVVKGNQKRLESLRELAGKENLEYPSVTLPPQPHTKEGVDAYNEVIARVRMWVNLNLWQKLKLSRDDAKPLLRLKGFPSFPLVERQANEVDWWDMVCNVKKLINEKKEDGKVFWQNLAGYKRQEALRPYLSSEEDRKKGKKFARYQLGDLLLHLEKKHGEDWGKVYDEAWERIDKKVEGLSKHIKLEEERRSEDAQSKAALTDWLRAKASFVIEGLKEADKDEFCRCELKLQKWYGDLRGKPFAIEAENSILDISGFSKQYNCAFIWQKDGVKKLNLYLIINYFKGGKLRFKKIKPEAFEANRFYTVINKKSGEIVPMEVNFNFDDPNLIILPLAFGKRQGREFIWNDLLSLETGSLKLANGRVIEKTLYNRRTRQDEPALFVALTFERREVLDSSNIKPMNLIGVDRGENIPAVIALTDPEGCPLSRFKDSLGNPTHILRIGESYKEKQRTIQAKKEVEQRRAGGYSRKYASKAKNLADDMVRNTARDLLYYAVTQDAMLIFENLSRGFGRQGKRTFMAERQYTRMEDWLTAKLAYEGLPSKTYLSKTLAQYTSKTCSNCGFTITSADYDRVLEKLKKTATGWMTTINGKELKVEGQITYYNRYKRQNVVKDLSVELDRLSEESVNNDISSWTKGRQGEALSLLKKRFSHRPVQEKFVCLNCGFETHADEQAALNIARSWLFLRSQEYKKYQTNKTTGNTDKRAFVETWQSFYRKKLKEVWKPAV

SEQ ID NO: 34808 - protein, 979 aa, synthetic construct
  REGION 1..979: note = engineered CasX variant
QEIKRINKIRRRLVKDSNTKKAGKTGPMKTLLVRVMTPDLRERLENLRKKPENIPQPISNTSRANLNKLLTDYTEMKKAILHVYWEEFQKDPVGLMSRVAQPASKKIDQNKLKPEMDEKGNLTTAGFACSQCGQPLFVYKLEQVSEKGKAYTNYFGRCNVAEHEKLIKKLAQLKPEKDSDEAVTYSLGKFGQRALDFYSIHVTKESTHPVKPLAQIAGNRYASGPVGKALSDACMGTIASFLSKYQDIIIEHQKVVKGNQKRLESLRELAGKENLEYPSVTLPPQPHTKEGVDAYNEVIARVRMWVNLNLWQKLKLSRDDAKPLLRLKGFPSFPLVERQANEVDWWDMVCNVKKLINEKKEDGKVFWQNLAGYKRQEALRPYLSSEEDRKKGKKFARYQLGDLLLHLEKKHGEDWGKVYDEAWERIDKKVEGLSKHIKLEEERRSEDAQSKAALTDWLRAKASFVIEGLKEADKDEFCRCELKLQKWYGDLRGKPFAIEAENSILDISGFSKQYNCAFIWQKDGVKKLNLYLIINYFKGGKLRFKKIKPEAFEANRFYTVINKKSGEIVPMEVNFNFDDPNLIILPLAFGKRQGREFIWNDLLSLETGSLKLANGRVIEKTLYNRRTRQDEPALFVALTFERREVLDSSNIKPMNLIGVDRGENIPAVIALTDPEGCPLSRFKDSLGNPTHILRIGESYKEKQRTIQAKKEVEQRRAGGYSRKYASKAKNLADDMVRNTARDLLYYAVTQDAMLIFENLSRGFGRQGKRTFMAERQYTRMEDWLTAKLAYEGLPSKTYLSKTLAQYTSKTCSNCGFTITSADYDRVLEKLKKTATGWMTTINGKELKVEGQITYYNRYKRQNVVKDLSVELDRLSEESVNNDISSWTKGRQGEALSLLKKRFSHRPVQEKFVCLNCGFETHADEQAALNIARSWLFLRSQEYKKYQTNKTTGNTDKRAFVETWQSFYRKKLKEVWKPAV

SEQ ID NO: 34809 - protein, 977 aa, synthetic construct
  REGION 1..977: note = engineered CasX variant
QEIKRINKIRRRLVKDSNTKKAGKTGPMKTLLVRVMTPDLRERLENLRKKPENIPQPISNTSRANLNKLLTDYTEMKKAILHVYWEEFQKDPVGLMSRVAQPASKKIDQNKLKPEMDEKGNLTTAGFACSQCGQPLFVYKLEQVSEKGKAYTNYFGRCNVAEHEKLIKLAQLKPEKDSDEAVTYSLGKFGQRALDFYSIHVTKESTHPVKPLAQIAGNRYASPVGKALSDACMGTIASFLSKYQDIIIEHQKVVKGNQKRLESLRELAGKENLEYPSVTLPPQPHTKEGVDAYNEVIARVRMWVNLNLWQKLKLSRDDAKPLLRLKGFPSFPLVERQANEVDWWDMVCNVKKLINEKKEDGKVFWQNLAGYKRQEALRPYLSSEEDRKKGKKFARYQLGDLLLHLEKKHGEDWGKVYDEAWERIDKKVEGLSKHIKLEEERRSEDAQSKAALTDWLRAKASFVIEGLKEADKDEFCRCELKLQKWYGDLRGKPFAIEAENSILDISGFSKQYNCAFIWQKDGVKKLNLYLIINYFKGGKLRFKKIKPEAFEANRFYTVINKKSGEIVPMEVNFNFDDPNLIILPLAFGKRQGREFIWNDLLSLETGSLKLANGRVIEKTLYNRRTRQDEPALFVALTFERREVLDSSNIKPMNLIGVDRGENIPAVIALTDPEGCPLSRFKDSLGNPTHILRIGESYKEKQRTIQAKKEVEQRRAGGYSRKYASKAKNLADDMVRNTARDLLYYAVTQDAMLIFENLSRGFGRQGKRTFMAERQYTRMEDWLTAKLAYEGLPSKTYLSKTLAQYTSKTCSNCGFTITSADYDRVLEKLKKTATGWMTTINGKELKVEGQITYYNRYKRQNVVKDLSVELDRLSEESVNNDISSWTKGRQGEALSLLKKRFSHRPVQEKFVCLNCGFETHADEQAALNIARSWLFLRSQEYKKYQTNKTTGNTDKRAFVETWQSFYRKKLKEVWKPAV

SEQ ID NO: 34810 - protein, 978 aa, synthetic construct
  REGION 1..978: note = engineered CasX variant
QEIKRINKIRRRLVKDSNTKKAGKTGPMKTLLVRVMTPDLRERLENLRKKPENIPQPISNTSRANLNKLLTDYTEMKKAILHVYWEEFQKDPVGLMSRVAQPASKKIDQNKLKPEMDEKGNLTTAGFACSQCGQPLFVYKLEQVSEKGKAYTNYFGRCNVAEHEKLIKLAQLKPEKDSDEAVTYSLGKFGQRALDFYSIHVTKESTHPVKPLAQIAGNRYASYPVGKALSDACMGTIASFLSKYQDIIIEHQKVVKGNQKRLESLRELAGKENLEYPSVTLPPQPHTKEGVDAYNEVIARVRMWVNLNLWQKLKLSRDDAKPLLRLKGFPSFPLVERQANEVDWWDMVCNVKKLINEKKEDGKVFWQNLAGYKRQEALRPYLSSEEDRKKGKKFARYQLGDLLLHLEKKHGEDWGKVYDEAWERIDKKVEGLSKHIKLEEERRSEDAQSKAALTDWLRAKASFVIEGLKEADKDEFCRCELKLQKWYGDLRGKPFAIEAENSILDISGFSKQYNCAFIWQKDGVKKLNLYLIINYFKGGKLRFKKIKPEAFEANRFYTVINKKSGEIVPMEVNFNFDDPNLIILPLAFGKRQGREFIWNDLLSLETGSLKLANGRVIEKTLYNRRTRQDEPALFVALTFERREVLDSSNIKPMNLIGVDRGENIPAVIALTDPEGCPLSRFKDSLGNPTHILRIGESYKEKQRTIQAKKEVEQRRAGGYSRKYASKAKNLADDMVRNTARDLLYYAVTQDAMLIFENLSRGFGRQGKRTFMAERQYTRMEDWLTAKLAYEGLPSKTYLSKTLAQYTSKTCSNCGFTITSADYDRVLEKLKKTATGWMTTINGKELKVEGQITYYNRYKRQNVVKDLSVELDRLSEESVNNDISSWTKGRSGEALSLLKKRFSHRPVQEKFVCLNCEFETHADEQAALNIARSWLFLRSQEYKKYQTNKTTGNTDKRAFVETWQSFYRKKLKEVWKPAV

SEQ ID NO: 34811 - protein, 978 aa, synthetic construct
  REGION 1..978: note = engineered CasX variant
QEIKRINKIRRRLVKDSNTKKAGKTGPMKTLLVRVMTPDLRERLENLRKKPENIPQPISNTSRANLNKLLTDYTEMKKAILHVYWEEFQKDPVGLMSRVAQPASKKIDQNKLKPEMDEKGNLTTAGFACSQCGQPLFVYKLEQVSEKGKAYTNYFGRCNVAEHEKLIKLAQLKPEKDSDEAVTYSLGKFGQRALDFYSIHVTKESTHPVKPLAQIAGNRYASHPVGKALSDACMGTIASFLSKYQDIIIEHQKVVKGNQKRLESLRELAGKENLEYPSVTLPPQPHTKEGVDAYNEVIARVRMWVNLNLWQKLKLSRDDAKPLLRLKGFPSFPLVERQANEVDWWDMVCNVKKLINEKKEDGKVFWQNLAGYKRQEALRPYLSSEEDRKKGKKFARYQLGDLLLHLEKKHGEDWGKVYDEAWERIDKKVEGLSKHIKLEEERRSEDAQSKAALTDWLRAKASFVIEGLKEADKDEFCRCELKLQKWYGDLRGKPFAIEAENSILDISGFSKQYNCAFIWQKDGVKKLNLYLIINYFKGGKLRFKKIKPEAFEANRFYTVINKKSGEIVPMEVNFNFDDPNLIILPLAFGKRQGREFIWNDLLSLETGSLKLANGRVIEKTLYNRRTRQDEPALFVALTFERREVLDSSNIKPMNLIGVDRGENIPAVIALTDPEGCPLSRFKDSLGNPTHILRIGESYKEKQRTIQAKKEVEQRRAGGYSRKYASKAKNLADDMVRNTARDLLYYAVTQDAMLIFENLSRGFGRQGKRTFMAERQYTRMEDWLTAKLAYEGLPSKTYLSKTLAQYTSKTCSNCGFTITSADYDRVLEKLKKTATGWMTTINGKELKVEGQITYYNRYKRQNVVKDLSVELDRLSEESVNNDISSWTKGRSGEALSLLKKRFSHRPVQEKFVCLNCEFETHADEQAALNIARSWLFLRSQEYKKYQTNKTTGNTDKRAFVETWQSFYRKKLKEVWKPAV

SEQ ID NO: 34812 - protein, 978 aa, synthetic construct
  REGION 1..978: note = engineered CasX variant
QEIKRINKIRRRLVKDSNTKKAGKTGPMKTLLVRVMTPDLRERLENLRKKPENIPQPISNTSRANLNKLLTDYTEMKKAILHVYWEEFQKDPVGLMSRVAQPASKKIDQNKLKPEMDEKGNLTTAGFACSQCGQPLFVYKLEQVSEKGKAYTNYFGRCNVAEHEKLIKLAQLKPEKDSDEAVTYSLGKFGQRALDFYSIHVTKESTHPVKPLAQIAGNRYASTPVGKALSDACMGTIASFLSKYQDIIIEHQKVVKGNQKRLESLRELAGKENLEYPSVTLPPQPHTKEGVDAYNEVIARVRMWVNLNLWQKLKLSRDDAKPLLRLKGFPSFPLVERQANEVDWWDMVCNVKKLINEKKEDGKVFWQNLAGYKRQEALRPYLSSEEDRKKGKKFARYQLGDLLLHLEKKHGEDWGKVYDEAWERIDKKVEGLSKHIKLEEERRSEDAQSKAALTDWLRAKASFVIEGLKEADKDEFCRCELKLQKWYGDLRGKPFAIEAENSILDISGFSKQYNCAFIWQKDGVKKLNLYLIINYFKGGKLRFKKIKPEAFEANRFYTVINKKSGEIVPMEVNFNFDDPNLIILPLAFGKRQGREFIWNDLLSLETGSLKLANGRVIEKTLYNRRTRQDEPALFVALTFERREVLDSSNIKPMNLIGVDRGENIPAVIALTDPEGCPLSRFKDSLGNPTHILRIGESYKEKQRTIQAKKEVEQRRAGGYSRKYASKAKNLADDMVRNTARDLLYYAVTQDAMLIFENLSRGFGRQGKRTFMAERQYTRMEDWLTAKLAYEGLPSKTYLSKTLAQYTSKTCSNCGFTITSADYDRVLEKLKKTATGWMTTINGKELKVEGQITYYNRYKRQNVVKDLSVELDRLSEESVNNDISSWTKGRSGEALSLLKKRFSHRPVQEKFVCLNCEFETHADEQAALNIARSWLFLRSQEYKKYQTNKTTGNTDKRAFVETWQSFYRKKLKEVWKPAV

SEQ ID NO: 34813 - protein, 978 aa, synthetic construct
  REGION 1..978: note = engineered CasX variant
QEIKRINKIRRRLVKDSNTKKAGKTGPMKTLLVRVMTPDLRERLENLRKKPENIPQPISNTSRANLNKLLTDYTEMKKAILHVYWEEFQKDPVGLMSRVAQPASKKIDQNKLKPEMDEKGNLTTAGFACSQCGQPLFVYKLEQVSEKGKAYTNYFGRCNVAEHEKLIKLAQLKPEKDSDEAVTYSLGKFGQRALDFYSIHVTKESTHPVKPLAQIAGNRYASAPVGKALSDACMGTIASFLSKYQDIIIEHQKVVKGNQKRLESLRELAGKENLEYPSVTLPPQPHTKEGVDAYNEVIARVRMWVNLNLWQKLKLSRDDAKPLLRLKGFPSFPLVERQANEVDWWDMVCNVKKLINEKKEDGKVFWQNLAGYKRQEALRPYLSSEEDRKKGKKFARYQLGDLLLHLEKKHGEDWGKVYDEAWERIDKKVEGLSKHIKLEEERRSEDAQSKAALTDWLRAKASFVIEGLKEADKDEFCRCELKLQKWYGDLRGKPFAIEAENSILDISGFSKQYNCAFIWQKDGVKKLNLYLIINYFKGGKLRFKKIKPEAFEANRFYTVINKKSGEIVPMEVNFNFDDPNLIILPLAFGKRQGREFIWNDLLSLETGSLKLANGRVIEKTLYNRRTRQDEPALFVALTFERREVLDSSNIKPMNLIGVDRGENIPAVIALTDPEGCPLSRFKDSLGNPTHILRIGESYKEKQRTIQAKKEVEQRRAGGYSRKYASKAKNLADDMVRNTARDLLYYAVTQDAMLIFENLSRGFGRQGKRTFMAERQYTRMEDWLTAKLAYEGLPSKTYLSKTLAQYTSKTCSNCGFTITSADYDRVLEKLKKTATGWMTTINGKELKVEGQITYYNRYKRQNVVKDLSVELDRLSEESVNNDISSWTKGRSGEALSLLKKRFSHRPVQEKFVCLNCEFETHADEQAALNIARSWLFLRSQEYKKYQTNKTTGNTDKRAFVETWQSFYRKKLKEVWKPAV

SEQ ID NO: 34814 - protein, 978 aa, synthetic construct
  REGION 1..978: note = engineered CasX variant
QEIKRINKIRRRLVKDSNTKKAGKTGPMKTLLVRVMTPDLRERLENLRKKPENIPQPISNTSRANLNKLLTDYTEMKKAILHVYWEEFQKDPVGLMSRVAQPASKKIDQNKLKPEMDEKGNLTTAGFACSQCGQPLFVYKLEQVSEKGKAYTNYFGRCNVAEHEKLIKLAQLKPEKDSDEAVTYSLGKFGQRALDFYSIHVTKESTHPVKPLAQIAGNRYASVPVGKALSDACMGTIASFLSKYQDIIIEHQKVVKGNQKRLESLRELAGKENLEYPSVTLPPQPHTKEGVDAYNEVIARVRMWVNLNLWQKLKLSRDDAKPLLRLKGFPSFPLVERQANEVDWWDMVCNVKKLINEKKEDGKVFWQNLAGYKRQEALRPYLSSEEDRKKGKKFARYQLGDLLLHLEKKHGEDWGKVYDEAWERIDKKVEGLSKHIKLEEERRSEDAQSKAALTDWLRAKASFVIEGLKEADKDEFCRCELKLQKWYGDLRGKPFAIEAENSILDISGFSKQYNCAFIWQKDGVKKLNLYLIINYFKGGKLRFKKIKPEAFEANRFYTVINKKSGEIVPMEVNFNFDDPNLIILPLAFGKRQGREFIWNDLLSLETGSLKLANGRVIEKTLYNRRTRQDEPALFVALTFERREVLDSSNIKPMNLIGVDRGENIPAVIALTDPEGCPLSRFKDSLGNPTHILRIGESYKEKQRTIQAKKEVEQRRAGGYSRKYASKAKNLADDMVRNTARDLLYYAVTQDAMLIFENLSRGFGRQGKRTFMAERQYTRMEDWLTAKLAYEGLPSKTYLSKTLAQYTSKTCSNCGFTITSADYDRVLEKLKKTATGWMTTINGKELKVEGQITYYNRYKRQNVVKDLSVELDRLSEESVNNDISSWTKGRSGEALSLLKKRFSHRPVQEKFVCLNCEFETHADEQAALNIARSWLFLRSQEYKKYQTNKTTGNTDKRAFVETWQSFYRKKLKEVWKPAV

SEQ ID NO: 34815 - protein, 979 aa, synthetic construct
  REGION 1..979: note = engineered CasX variant
QEIKRINKIRRRLVKDSNTKKAGKTGPMKTLLVRVMTPDLRERLENLRKKPENIPQPISNTSRANLNKLLTDYTEMKKAILHVYWEEFQKDPVGLMSRVAQPASKKIDQNKLKPEMDEKGNLTTAGFACSQCGQPLFVYKLEQVSEKGKAYTNYFGRCNVAEHEKLIKKLAQLKPEKDSDEAVTYSLGKFGQRALDFYSIHVTKESTHPVKPLAQIAGNRYASGPVGKALSDACMGTIASFLSKYQDIIIEHQKVVKGNQKRLESLRELAGKENLEYPSVTLPPQPHTKEGVDAYNEVIARVRMWVNLNLWQKLKLSRDDAKPLLRLKGFPSFPLVERQANEVDWWDMVCNVKKLINEKKEDGKVFWQNLAGYKRQEALRPYLSSEEDRKKGKKFARYQLGDLLLHLEKKHGEDWGKVYDEAWERIDKKVEGLSKHIKLEEERRSEDAQSKAALTDWLRAKASFVIEGLKEADKDEFCRCELKLQKWYGDLRGKPFAIEAENSILDISGFSKQYNCAFIWQKDGVKKLNLYLIINYFKGGKLRFKKIKPEAFEANRFYTVINKKSGEIVPMEVNFNFDDPNLIILPLAFGKRQGREFIWNDLLSLETGSLKLANGRVIEKTLYNRRTRQDEPALFVALTFERREVLDSSNIKPMNLIGVDRGENIPAVIALTDPEGCPLSRFKDSLGNPTHILRIGESYKEKQRTIQAKKEVEQRRAGGYSRKYASKAKNLADDMVRNTARDLLYYAVTQDAMLIFENLSRGFGRQGKRTFMAERQYTRMEDWLTAKLAYEGLPSKTYLSKTLAQYTSKTCSNCGFTITSADYDRVLEKLKKTATGWMTTINGKELKVEGQITYYNRYKRQNVVKDLSVELDRLSEESVNNDISSWTKGRSGEALSLLKKRFSHRPVQEKFVCLNCEFETHADEQAALNIARSWLFLRSQEYKKYQTNKTTGNTDKRAFVETWQSFYRKKLKEVWKPAV

SEQ ID NO: 34816 - protein, 977 aa, synthetic construct
  REGION 1..977: note = engineered CasX variant
QEIKRINKIRRRLVKDSNTKKAGKTGPMKTLLVRVMTPDLRERLENLRKKPENIPQPISNTSRANLNKLLTDYTEMKKAILHVYWEEFQKDPVGLMSRVAQPASKKIDQNKLKPEMDEKGNLTTAGFACSQCGQPLFVYKLEQVSEKGKAYTNYFGRCNVAEHEKLIKLAQLKPEKDSDEAVTYSLGKFGQRALDFYSIHVTKESTHPVKPLAQIAGNRYASPVGKALSDACMGTIASFLSKYQDIIIEHQKVVKGNQKRLESLRELAGKENLEYPSVTLPPQPHTKEGVDAYNEVIARVRMWVNLNLWQKLKLSRDDAKPLLRLKGFPSFPLVERQANEVDWWDMVCNVKKLINEKKEDGKVFWQNLAGYKRQEALRPYLSSEEDRKKGKKFARYQLGDLLLHLEKKHGEDWGKVYDEAWERIDKKVEGLSKHIKLEEERRSEDAQSKAALTDWLRAKASFVIEGLKEADKDEFCRCELKLQKWYGDLRGKPFAIEAENSILDISGFSKQYNCAFIWQKDGVKKLNLYLIINYFKGGKLRFKKIKPEAFEANRFYTVINKKSGEIVPMEVNFNFDDPNLIILPLAFGKRQGREFIWNDLLSLETGSLKLANGRVIEKTLYNRRTRQDEPALFVALTFERREVLDSSNIKPMNLIGVDRGENIPAVIALTDPEGCPLSRFKDSLGNPTHILRIGESYKEKQRTIQAKKEVEQRRAGGYSRKYASKAKNLADDMVRNTARDLLYYAVTQDAMLIFENLSRGFGRQGKRTFMAERQYTRMEDWLTAKLAYEGLPSKTYLSKTLAQYTSKTCSNCGFTITSADYDRVLEKLKKTATGWMTTINGKELKVEGQITYYNRYKRQNVVKDLSVELDRLSEESVNNDISSWTKGRSGEALSLLKKRFSHRPVQEKFVCLNCEFETHADEQAALNIARSWLFLRSQEYKKYQTNKTTGNTDKRAFVETWQSFYRKKLKEVWKPAV

SEQ ID NO: 34817 - protein, 979 aa, synthetic construct
  REGION 1..979: note = engineered CasX variant
QEIKRINKIRRRLVKDSNTKKAGKTGPMKTLLVRVMTPDLRERLENLRKKPENIPQPISNTSRANLNKLLTDYTEMKKAILHVYWEEFQKDPVGLMSRVAQPASKKIDQNKLKPEMDEKGNLTTAGFACSQCGQPLFVYKLEQVSEKGKAYTNYFGRCNVAEHEKLIKLAQLKPEKDSDEAVTYSLGKFGQRALDFYSIHVTKESTHPVKPLAQIAGNRYASYPVGKALSDACMGTIASFLSKYQDIIIEHQKVVKGNQKRLESLRELAGKENLEYPSVTLPPQPHTKEGVDAYNEVIARVRMWVNLNLWQKLKLSRDDAKPLLRLKGFPSFPLVERQANEVDWWDMVCNVKKLINEKKEDGKVFWQNLAGYKRQEALRPYLSSEEDRKKGKKFARYQLGDLLLHLEKKHGEDWGKVYDEAWERIDKKVEGLSKHIKLEEERRSEDAQSKAALTDWLRAKASFVIEGLKEADKDEFCRCELKLQKWYGDLRGKPFAIEAENSILDISGFSKQYNCAFIWQKDGVKKLNLYLIINYFKGGKLRFKKIKPEAFEANRFYTVINKKSGEIVPMEVNFNFDDPNLIILPLAFGKRQGREFIWNDLLSLETGSLKLANGRVIEKTLYNRRTRQDEPALFVALTFERREVLDSSNIKPMNLIGVDRGENIPAVIALTDPEGCPLSRFKDSLGNPTHILRIGESYKEKQRTIQAKKEVEQRRAGGYSRKYASKAKNLADDMVRNTARDLLYYAVTQDAMLIFENLSRGFGRQGKRTFMAERQYTRMEDWLTAKLAYEGLPSKTYLSKTLAQYTSKTCSNCGFTITSADYDRVLEKLKKTATGWMTTINGKELKVEGQITYYNRYKRQNVVKDLSVELDRLSEESVNNDISSWTKGRSGEALSLLKKRFSHRPVQEKFVCLNCGFETHADEQAALNIARSWLFLRSQEYKKYQTNKTSTGNTDKRAFVETWQSFYRKKLKEVWKPAV

SEQ ID NO: 34818 - protein, 979 aa, synthetic construct
  REGION 1..979: note = engineered CasX variant
QEIKRINKIRRRLVKDSNTKKAGKTGPMKTLLVRVMTPDLRERLENLRKKPENIPQPISNTSRANLNKLLTDYTEMKKAILHVYWEEFQKDPVGLMSRVAQPASKKIDQNKLKPEMDEKGNLTTAGFACSQCGQPLFVYKLEQVSEKGKAYTNYFGRCNVAEHEKLIKLAQLKPEKDSDEAVTYSLGKFGQRALDFYSIHVTKESTHPVKPLAQIAGNRYASHPVGKALSDACMGTIASFLSKYQDIIIEHQKVVKGNQKRLESLRELAGKENLEYPSVTLPPQPHTKEGVDAYNEVIARVRMWVNLNLWQKLKLSRDDAKPLLRLKGFPSFPLVERQANEVDWWDMVCNVKKLINEKKEDGKVFWQNLAGYKRQEALRPYLSSEEDRKKGKKFARYQLGDLLLHLEKKHGEDWGKVYDEAWERIDKKVEGLSKHIKLEEERRSEDAQSKAALTDWLRAKASFVIEGLKEADKDEFCRCELKLQKWYGDLRGKPFAIEAENSILDISGFSKQYNCAFIWQKDGVKKLNLYLIINYFKGGKLRFKKIKPEAFEANRFYTVINKKSGEIVPMEVNFNFDDPNLIILPLAFGKRQGREFIWNDLLSLETGSLKLANGRVIEKTLYNRRTRQDEPALFVALTFERREVLDSSNIKPMNLIGVDRGENIPAVIALTDPEGCPLSRFKDSLGNPTHILRIGESYKEKQRTIQAKKEVEQRRAGGYSRKYASKAKNLADDMVRNTARDLLYYAVTQDAMLIFENLSRGFGRQGKRTFMAERQYTRMEDWLTAKLAYEGLPSKTYLSKTLAQYTSKTCSNCGFTITSADYDRVLEKLKKTATGWMTTINGKELKVEGQITYYNRYKRQNVVKDLSVELDRLSEESVNNDISSWTKGRSGEALSLLKKRFSHRPVQEKFVCLNCGFETHADEQAALNIARSWLFLRSQEYKKYQTNKTSTGNTDKRAFVETWQSFYRKKLKEVWKPAV

SEQ ID NO: 34819 - protein, 979 aa, synthetic construct
  REGION 1..979: note = engineered CasX variant
QEIKRINKIRRRLVKDSNTKKAGKTGPMKTLLVRVMTPDLRERLENLRKKPENIPQPISNTSRANLNKLLTDYTEMKKAILHVYWEEFQKDPVGLMSRVAQPASKKIDQNKLKPEMDEKGNLTTAGFACSQCGQPLFVYKLEQVSEKGKAYTNYFGRCNVAEHEKLIKLAQLKPEKDSDEAVTYSLGKFGQRALDFYSIHVTKESTHPVKPLAQIAGNRYASTPVGKALSDACMGTIASFLSKYQDIIIEHQKVVKGNQKRLESLRELAGKENLEYPSVTLPPQPHTKEGVDAYNEVIARVRMWVNLNLWQKLKLSRDDAKPLLRLKGFPSFPLVERQANEVDWWDMVCNVKKLINEKKEDGKVFWQNLAGYKRQEALRPYLSSEEDRKKGKKFARYQLGDLLLHLEKKHGEDWGKVYDEAWERIDKKVEGLSKHIKLEEERRSEDAQSKAALTDWLRAKASFVIEGLKEADKDEFCRCELKLQKWYGDLRGKPFAIEAENSILDISGFSKQYNCAFIWQKDGVKKLNLYLIINYFKGGKLRFKKIKPEAFEANRFYTVINKKSGEIVPMEVNFNFDDPNLIILPLAFGKRQGREFIWNDLLSLETGSLKLANGRVIEKTLYNRRTRQDEPALFVALTFERREVLDSSNIKPMNLIGVDRGENIPAVIALTDPEGCPLSRFKDSLGNPTHILRIGESYKEKQRTIQAKKEVEQRRAGGYSRKYASKAKNLADDMVRNTARDLLYYAVTQDAMLIFENLSRGFGRQGKRTFMAERQYTRMEDWLTAKLAYEGLPSKTYLSKTLAQYTSKTCSNCGFTITSADYDRVLEKLKKTATGWMTTINGKELKVEGQITYYNRYKRQNVVKDLSVELDRLSEESVNNDISSWTKGRSGEALSLLKKRFSHRPVQEKFVCLNCGFETHADEQAALNIARSWLFLRSQEYKKYQTNKTSTGNTDKRAFVETWQSFYRKKLKEVWKPAV

SEQ ID NO: 34820 - protein, 979 aa, synthetic construct
  REGION 1..979: note = engineered CasX variant
QEIKRINKIRRRLVKDSNTKKAGKTGPMKTLLVRVMTPDLRERLENLRKKPENIPQPISNTSRANLNKLLTDYTEMKKAILHVYWEEFQKDPVGLMSRVAQPASKKIDQNKLKPEMDEKGNLTTAGFACSQCGQPLFVYKLEQVSEKGKAYTNYFGRCNVAEHEKLIKLAQLKPEKDSDEAVTYSLGKFGQRALDFYSIHVTKESTHPVKPLAQIAGNRYASAPVGKALSDACMGTIASFLSKYQDIIIEHQKVVKGNQKRLESLRELAGKENLEYPSVTLPPQPHTKEGVDAYNEVIARVRMWVNLNLWQKLKLSRDDAKPLLRLKGFPSFPLVERQANEVDWWDMVCNVKKLINEKKEDGKVFWQNLAGYKRQEALRPYLSSEEDRKKGKKFARYQLGDLLLHLEKKHGEDWGKVYDEAWERIDKKVEGLSKHIKLEEERRSEDAQSKAALTDWLRAKASFVIEGLKEADKDEFCRCELKLQKWYGDLRGKPFAIEAENSILDISGFSKQYNCAFIWQKDGVKKLNLYLIINYFKGGKLRFKKIKPEAFEANRFYTVINKKSGEIVPMEVNFNFDDPNLIILPLAFGKRQGREFIWNDLLSLETGSLKLANGRVIEKTLYNRRTRQDEPALFVALTFERREVLDSSNIKPMNLIGVDRGENIPAVIALTDPEGCPLSRFKDSLGNPTHILRIGESYKEKQRTIQAKKEVEQRRAGGYSRKYASKAKNLADDMVRNTARDLLYYAVTQDAMLIFENLSRGFGRQGKRTFMAERQYTRMEDWLTAKLAYEGLPSKTYLSKTLAQYTSKTCSNCGFTITSADYDRVLEKLKKTATGWMTTINGKELKVEGQITYYNRYKRQNVVKDLSVELDRLSEESVNNDISSWTKGRSGEALSLLKKRFSHRPVQEKFVCLNCGFETHADEQAALNIARSWLFLRSQEYKKYQTNKTSTGNTDKRAFVETWQSFYRKKLKEVWKPAV

SEQ ID NO: 34821 - protein, 979 aa, synthetic construct
  REGION 1..979: note = engineered CasX variant
QEIKRINKIRRRLVKDSNTKKAGKTGPMKTLLVRVMTPDLRERLENLRKKPENIPQPISNTSRANLNKLLTDYTEMKKAILHVYWEEFQKDPVGLMSRVAQPASKKIDQNKLKPEMDEKGNLTTAGFACSQCGQPLFVYKLEQVSEKGKAYTNYFGRCNVAEHEKLIKLAQLKPEKDSDEAVTYSLGKFGQRALDFYSIHVTKESTHPVKPLAQIAGNRYASVPVGKALSDACMGTIASFLSKYQDIIIEHQKVVKGNQKRLESLRELAGKENLEYPSVTLPPQPHTKEGVDAYNEVIARVRMWVNLNLWQKLKLSRDDAKPLLRLKGFPSFPLVERQANEVDWWDMVCNVKKLINEKKEDGKVFWQNLAGYKRQEALRPYLSSEEDRKKGKKFARYQLGDLLLHLEKKHGEDWGKVYDEAWERIDKKVEGLSKHIKLEEERRSEDAQSKAALTDWLRAKASFVIEGLKEADKDEFCRCELKLQKWYGDLRGKPFAIEAENSILDISGFSKQYNCAFIWQKDGVKKLNLYLIINYFKGGKLRFKKIKPEAFEANRFYTVINKKSGEIVPMEVNFNFDDPNLIILPLAFGKRQGREFIWNDLLSLETGSLKLANGRVIEKTLYNRRTRQDEPALFVALTFERREVLDSSNIKPMNLIGVDRGENIPAVIALTDPEGCPLSRFKDSLGNPTHILRIGESYKEKQRTIQAKKEVEQRRAGGYSRKYASKAKNLADDMVRNTARDLLYYAVTQDAMLIFENLSRGFGRQGKRTFMAERQYTRMEDWLTAKLAYEGLPSKTYLSKTLAQYTSKTCSNCGFTITSADYDRVLEKLKKTATGWMTTINGKELKVEGQITYYNRYKRQNVVKDLSVELDRLSEESVNNDISSWTKGRSGEALSLLKKRFSHRPVQEKFVCLNCGFETHADEQAALNIARSWLFLRSQEYKKYQTNKTSTGNTDKRAFVETWQSFYRKKLKEVWKPAV

SEQ ID NO: 34822 - protein, 980 aa, synthetic construct
  REGION 1..980: note = engineered CasX variant
QEIKRINKIRRRLVKDSNTKKAGKTGPMKTLLVRVMTPDLRERLENLRKKPENIPQPISNTSRANLNKLLTDYTEMKKAILHVYWEEFQKDPVGLMSRVAQPASKKIDQNKLKPEMDEKGNLTTAGFACSQCGQPLFVYKLEQVSEKGKAYTNYFGRCNVAEHEKLIKKLAQLKPEKDSDEAVTYSLGKFGQRALDFYSIHVTKESTHPVKPLAQIAGNRYASGPVGKALSDACMGTIASFLSKYQDIIIEHQKVVKGNQKRLESLRELAGKENLEYPSVTLPPQPHTKEGVDAYNEVIARVRMWVNLNLWQKLKLSRDDAKPLLRLKGFPSFPLVERQANEVDWWDMVCNVKKLINEKKEDGKVFWQNLAGYKRQEALRPYLSSEEDRKKGKKFARYQLGDLLLHLEKKHGEDWGKVYDEAWERIDKKVEGLSKHIKLEEERRSEDAQSKAALTDWLRAKASFVIEGLKEADKDEFCRCELKLQKWYGDLRGKPFAIEAENSILDISGFSKQYNCAFIWQKDGVKKLNLYLIINYFKGGKLRFKKIKPEAFEANRFYTVINKKSGEIVPMEVNFNFDDPNLIILPLAFGKRQGREFIWNDLLSLETGSLKLANGRVIEKTLYNRRTRQDEPALFVALTFERREVLDSSNIKPMNLIGVDRGENIPAVIALTDPEGCPLSRFKDSLGNPTHILRIGESYKEKQRTIQAKKEVEQRRAGGYSRKYASKAKNLADDMVRNTARDLLYYAVTQDAMLIFENLSRGFGRQGKRTFMAERQYTRMEDWLTAKLAYEGLPSKTYLSKTLAQYTSKTCSNCGFTITSADYDRVLEKLKKTATGWMTTINGKELKVEGQITYYNRYKRQNVVKDLSVELDRLSEESVNNDISSWTKGRSGEALSLLKKRFSHRPVQEKFVCLNCGFETHADEQAALNIARSWLFLRSQEYKKYQTNKTSTGNTDKRAFVETWQSFYRKKLKEVWKPAV

SEQ ID NO: 34823 - protein, 978 aa, synthetic construct
  REGION 1..978: note = engineered CasX variant
QEIKRINKIRRRLVKDSNTKKAGKTGPMKTLLVRVMTPDLRERLENLRKKPENIPQPISNTSRANLNKLLTDYTEMKKAILHVYWEEFQKDPVGLMSRVAQPASKKIDQNKLKPEMDEKGNLTTAGFACSQCGQPLFVYKLEQVSEKGKAYTNYFGRCNVAEHEKLIKLAQLKPEKDSDEAVTYSLGKFGQRALDFYSIHVTKESTHPVKPLAQIAGNRYASPVGKALSDACMGTIASFLSKYQDIIIEHQKVVKGNQKRLESLRELAGKENLEYPSVTLPPQPHTKEGVDAYNEVIARVRMWVNLNLWQKLKLSRDDAKPLLRLKGFPSFPLVERQANEVDWWDMVCNVKKLINEKKEDGKVFWQNLAGYKRQEALRPYLSSEEDRKKGKKFARYQLGDLLLHLEKKHGEDWGKVYDEAWERIDKKVEGLSKHIKLEEERRSEDAQSKAALTDWLRAKASFVIEGLKEADKDEFCRCELKLQKWYGDLRGKPFAIEAENSILDISGFSKQYNCAFIWQKDGVKKLNLYLIINYFKGGKLRFKKIKPEAFEANRFYTVINKKSGEIVPMEVNFNFDDPNLIILPLAFGKRQGREFIWNDLLSLETGSLKLANGRVIEKTLYNRRTRQDEPALFVALTFERREVLDSSNIKPMNLIGVDRGENIPAVIALTDPEGCPLSRFKDSLGNPTHILRIGESYKEKQRTIQAKKEVEQRRAGGYSRKYASKAKNLADDMVRNTARDLLYYAVTQDAMLIFENLSRGFGRQGKRTFMAERQYTRMEDWLTAKLAYEGLPSKTYLSKTLAQYTSKTCSNCGFTITSADYDRVLEKLKKTATGWMTTINGKELKVEGQITYYNRYKRQNVVKDLSVELDRLSEESVNNDISSWTKGRSGEALSLLKKRFSHRPVQEKFVCLNCGFETHADEQAALNIARSWLFLRSQEYKKYQTNKTSTGNTDKRAFVETWQSFYRKKLKEVWKPAV

SEQ ID NO: 34824 - protein, 979 aa, synthetic construct
  REGION 1..979: note = engineered CasX variant
QEIKRINKIRRRLVKDSNTKKAGKTGPMKTLLVRVMTPDLRERLENLRKKPENIPQPISNTSRANLNKLLTDYTEMKKAILHVYWEEFQKDPVGLMSRVAQPASKKIDQNKLKPEMDEKGNLTTAGFACSQCGQPLFVYKLEQVSEKGKAYTNYFGRCNVAEHEKLIKLAQLKPEKDSDEAVTYSLGKFGQRALDFYSIHVTKESTHPVKPLAQIAGNRYASYPVGKALSDACMGTIASFLSKYQDIIIEHQKVVKGNQKRLESLRELAGKENLEYPSVTLPPQPHTKEGVDAYNEVIARVRMWVNLNLWQKLKLSRDDAKPLLRLKGFPSFPLVERQANEVDWWDMVCNVKKLINEKKEDGKVFWQNLAGYKRQEALRPYLSSEEDRKKGKKFARYQLGDLLLHLEKKHGEDWGKVYDEAWERIDKKVEGLSKHIKLEEERRSEDAQSKAALTDWLRAKASFVIEGLKEADKDEFCRCELKLQKWYGDLRGKPFAIEAENSILDISGFSKQYNCAFIWQKDGVKKLNLYLIINYFKGGKLRFKKIKPEAFEANRFYTVINKKSGEIVPMEVNFNFDDPNLIILPLAFGKRQGREFIWNDLLSLETGSLKLANGRVIEKTLYNRRTRQDEPALFVALTFERREVLDSSNIKPMNLIGVDRGENIPAVIALTDPEGCPLSRFKDSLGNPTHILRIGESYKEKQRTIQAKKEVEQRRAGGYSRKYASKAKNLADDMVRNTARDLLYYAVTQDAMLIFENLSRGFGRQGKRTFMAERQYTRMEDWLTAKLAYEGLPSKTYLSKTLAQYTSKTCSNCGFTITSADYDRVLEKLKKTATGWMTTINGKELKVEGQITYYNRYKRQNVVKDLSVELDRLSEESVNNDISSWTKGRSGEALSLLKKRFSHRPVQEKFVCLNCGFETHADEQAALNIARSWLFLRSQEYKKYQTNKTTGKNTDKRAFVETWQSFYRKKLKEVWKPAV

SEQ ID NO: 34825 - protein, 979 aa, synthetic construct
  REGION 1..979: note = engineered CasX variant
QEIKRINKIRRRLVKDSNTKKAGKTGPMKTLLVRVMTPDLRERLENLRKKPENIPQPISNTSRANLNKLLTDYTEMKKAILHVYWEEFQKDPVGLMSRVAQPASKKIDQNKLKPEMDEKGNLTTAGFACSQCGQPLFVYKLEQVSEKGKAYTNYFGRCNVAEHEKLIKLAQLKPEKDSDEAVTYSLGKFGQRALDFYSIHVTKESTHPVKPLAQIAGNRYASHPVGKALSDACMGTIASFLSKYQDIIIEHQKVVKGNQKRLESLRELAGKENLEYPSVTLPPQPHTKEGVDAYNEVIARVRMWVNLNLWQKLKLSRDDAKPLLRLKGFPSFPLVERQANEVDWWDMVCNVKKLINEKKEDGKVFWQNLAGYKRQEALRPYLSSEEDRKKGKKFARYQLGDLLLHLEKKHGEDWGKVYDEAWERIDKKVEGLSKHIKLEEERRSEDAQSKAALTDWLRAKASFVIEGLKEADKDEFCRCELKLQKWYGDLRGKPFAIEAENSILDISGFSKQYNCAFIWQKDGVKKLNLYLIINYFKGGKLRFKKIKPEAFEANRFYTVINKKSGEIVPMEVNFNFDDPNLIILPLAFGKRQGREFIWNDLLSLETGSLKLANGRVIEKTLYNRRTRQDEPALFVALTFERREVLDSSNIKPMNLIGVDRGENIPAVIALTDPEGCPLSRFKDSLGNPTHILRIGESYKEKQRTIQAKKEVEQRRAGGYSRKYASKAKNLADDMVRNTARDLLYYAVTQDAMLIFENLSRGFGRQGKRTFMAERQYTRMEDWLTAKLAYEGLPSKTYLSKTLAQYTSKTCSNCGFTITSADYDRVLEKLKKTATGWMTTINGKELKVEGQITYYNRYKRQNVVKDLSVELDRLSEESVNNDISSWTKGRSGEALSLLKKRFSHRPVQEKFVCLNCGFETHADEQAALNIARSWLFLRSQEYKKYQTNKTTGKNTDKRAFVETWQSFYRKKLKEVWKPAV

SEQ ID NO: 34826 - protein, 979 aa, synthetic construct
  REGION 1..979: note = engineered CasX variant
QEIKRINKIRRRLVKDSNTKKAGKTGPMKTLLVRVMTPDLRERLENLRKKPENIPQPISNTSRANLNKLLTDYTEMKKAILHVYWEEFQKDPVGLMSRVAQPASKKIDQNKLKPEMDEKGNLTTAGFACSQCGQPLFVYKLEQVSEKGKAYTNYFGRCNVAEHEKLIKLAQLKPEKDSDEAVTYSLGKFGQRALDFYSIHVTKESTHPVKPLAQIAGNRYASTPVGKALSDACMGTIASFLSKYQDIIIEHQKVVKGNQKRLESLRELAGKENLEYPSVTLPPQPHTKEGVDAYNEVIARVRMWVNLNLWQKLKLSRDDAKPLLRLKGFPSFPLVERQANEVDWWDMVCNVKKLINEKKEDGKVFWQNLAGYKRQEALRPYLSSEEDRKKGKKFARYQLGDLLLHLEKKHGEDWGKVYDEAWERIDKKVEGLSKHIKLEEERRSEDAQSKAALTDWLRAKASFVIEGLKEADKDEFCRCELKLQKWYGDLRGKPFAIEAENSILDISGFSKQYNCAFIWQKDGVKKLNLYLIINYFKGGKLRFKKIKPEAFEANRFYTVINKKSGEIVPMEVNFNFDDPNLIILPLAFGKRQGREFIWNDLLSLETGSLKLANGRVIEKTLYNRRTRQDEPALFVALTFERREVLDSSNIKPMNLIGVDRGENIPAVIALTDPEGCPLSRFKDSLGNPTHILRIGESYKEKQRTIQAKKEVEQRRAGGYSRKYASKAKNLADDMVRNTARDLLYYAVTQDAMLIFENLSRGFGRQGKRTFMAERQYTRMEDWLTAKLAYEGLPSKTYLSKTLAQYTSKTCSNCGFTITSADYDRVLEKLKKTATGWMTTINGKELKVEGQITYYNRYKRQNVVKDLSVELDRLSEESVNNDISSWTKGRSGEALSLLKKRFSHRPVQEKFVCLNCGFETHADEQAALNIARSWLFLRSQEYKKYQTNKTTGKNTDKRAFVETWQSFYRKKLKEVWKPAV

SEQ ID NO: 34827 - protein, 979 aa, synthetic construct
  REGION 1..979: note = engineered CasX variant
QEIKRINKIRRRLVKDSNTKKAGKTGPMKTLLVRVMTPDLRERLENLRKKPENIPQPISNTSRANLNKLLTDYTEMKKAILHVYWEEFQKDPVGLMSRVAQPASKKIDQNKLKPEMDEKGNLTTAGFACSQCGQPLFVYKLEQVSEKGKAYTNYFGRCNVAEHEKLIKLAQLKPEKDSDEAVTYSLGKFGQRALDFYSIHVTKESTHPVKPLAQIAGNRYASAPVGKALSDACMGTIASFLSKYQDIIIEHQKVVKGNQKRLESLRELAGKENLEYPSVTLPPQPHTKEGVDAYNEVIARVRMWVNLNLWQKLKLSRDDAKPLLRLKGFPSFPLVERQANEVDWWDMVCNVKKLINEKKEDGKVFWQNLAGYKRQEALRPYLSSEEDRKKGKKFARYQLGDLLLHLEKKHGEDWGKVYDEAWERIDKKVEGLSKHIKLEEERRSEDAQSKAALTDWLRAKASFVIEGLKEADKDEFCRCELKLQKWYGDLRGKPFAIEAENSILDISGFSKQYNCAFIWQKDGVKKLNLYLIINYFKGGKLRFKKIKPEAFEANRFYTVINKKSGEIVPMEVNFNFDDPNLIILPLAFGKRQGREFIWNDLLSLETGSLKLANGRVIEKTLYNRRTRQDEPALFVALTFERREVLDSSNIKPMNLIGVDRGENIPAVIALTDPEGCPLSRFKDSLGNPTHILRIGESYKEKQRTIQAKKEVEQRRAGGYSRKYASKAKNLADDMVRNTARDLLYYAVTQDAMLIFENLSRGFGRQGKRTFMAERQYTRMEDWLTAKLAYEGLPSKTYLSKTLAQYTSKTCSNCGFTITSADYDRVLEKLKKTATGWMTTINGKELKVEGQITYYNRYKRQNVVKDLSVELDRLSEESVNNDISSWTKGRSGEALSLLKKRFSHRPVQEKFVCLNCGFETHADEQAALNIARSWLFLRSQEYKKYQTNKTTGKNTDKRAFVETWQSFYRKKLKEVWKPAV

SEQ ID NO: 34828 - protein, 979 aa, synthetic construct
  REGION 1..979: note = engineered CasX variant
QEIKRINKIRRRLVKDSNTKKAGKTGPMKTLLVRVMTPDLRERLENLRKKPENIPQPISNTSRANLNKLLTDYTEMKKAILHVYWEEFQKDPVGLMSRVAQPASKKIDQNKLKPEMDEKGNLTTAGFACSQCGQPLFVYKLEQVSEKGKAYTNYFGRCNVAEHEKLIKLAQLKPEKDSDEAVTYSLGKFGQRALDFYSIHVTKESTHPVKPLAQIAGNRYASVPVGKALSDACMGTIASFLSKYQDIIIEHQKVVKGNQKRLESLRELAGKENLEYPSVTLPPQPHTKEGVDAYNEVIARVRMWVNLNLWQKLKLSRDDAKPLLRLKGFPSFPLVERQANEVDWWDMVCNVKKLINEKKEDGKVFWQNLAGYKRQEALRPYLSSEEDRKKGKKFARYQLGDLLLHLEKKHGEDWGKVYDEAWERIDKKVEGLSKHIKLEEERRSEDAQSKAALTDWLRAKASFVIEGLKEADKDEFCRCELKLQKWYGDLRGKPFAIEAENSILDISGFSKQYNCAFIWQKDGVKKLNLYLIINYFKGGKLRFKKIKPEAFEANRFYTVINKKSGEIVPMEVNFNFDDPNLIILPLAFGKRQGREFIWNDLLSLETGSLKLANGRVIEKTLYNRRTRQDEPALFVALTFERREVLDSSNIKPMNLIGVDRGENIPAVIALTDPEGCPLSRFKDSLGNPTHILRIGESYKEKQRTIQAKKEVEQRRAGGYSRKYASKAKNLADDMVRNTARDLLYYAVTQDAMLIFENLSRGFGRQGKRTFMAERQYTRMEDWLTAKLAYEGLPSKTYLSKTLAQYTSKTCSNCGFTITSADYDRVLEKLKKTATGWMTTINGKELKVEGQITYYNRYKRQNVVKDLSVELDRLSEESVNNDISSWTKGRSGEALSLLKKRFSHRPVQEKFVCLNCGFETHADEQAALNIARSWLFLRSQEYKKYQTNKTTGKNTDKRAFVETWQSFYRKKLKEVWKPAV

SEQ ID NO: 34829 - protein, 980 aa, synthetic construct
  REGION 1..980: note = engineered CasX variant
QEIKRINKIRRRLVKDSNTKKAGKTGPMKTLLVRVMTPDLRERLENLRKKPENIPQPISNTSRANLNKLLTDYTEMKKAILHVYWEEFQKDPVGLMSRVAQPASKKIDQNKLKPEMDEKGNLTTAGFACSQCGQPLFVYKLEQVSEKGKAYTNYFGRCNVAEHEKLIKKLAQLKPEKDSDEAVTYSLGKFGQRALDFYSIHVTKESTHPVKPLAQIAGNRYASGPVGKALSDACMGTIASFLSKYQDIIIEHQKVVKGNQKRLESLRELAGKENLEYPSVTLPPQPHTKEGVDAYNEVIARVRMWVNLNLWQKLKLSRDDAKPLLRLKGFPSFPLVERQANEVDWWDMVCNVKKLINEKKEDGKVFWQNLAGYKRQEALRPYLSSEEDRKKGKKFARYQLGDLLLHLEKKHGEDWGKVYDEAWERIDKKVEGLSKHIKLEEERRSEDAQSKAALTDWLRAKASFVIEGLKEADKDEFCRCELKLQKWYGDLRGKPFAIEAENSILDISGFSKQYNCAFIWQKDGVKKLNLYLIINYFKGGKLRFKKIKPEAFEANRFYTVINKKSGEIVPMEVNFNFDDPNLIILPLAFGKRQGREFIWNDLLSLETGSLKLANGRVIEKTLYNRRTRQDEPALFVALTFERREVLDSSNIKPMNLIGVDRGENIPAVIALTDPEGCPLSRFKDSLGNPTHILRIGESYKEKQRTIQAKKEVEQRRAGGYSRKYASKAKNLADDMVRNTARDLLYYAVTQDAMLIFENLSRGFGRQGKRTFMAERQYTRMEDWLTAKLAYEGLPSKTYLSKTLAQYTSKTCSNCGFTITSADYDRVLEKLKKTATGWMTTINGKELKVEGQITYYNRYKRQNVVKDLSVELDRLSEESVNNDISSWTKGRSGEALSLLKKRFSHRPVQEKFVCLNCGFETHADEQAALNIARSWLFLRSQEYKKYQTNKTTGKNTDKRAFVETWQSFYRKKLKEVWKPAV

SEQ ID NO: 34830 - protein, 978 aa, synthetic construct
  REGION 1..978: note = engineered CasX variant
QEIKRINKIRRRLVKDSNTKKAGKTGPMKTLLVRVMTPDLRERLENLRKKPENIPQPISNTSRANLNKLLTDYTEMKKAILHVYWEEFQKDPVGLMSRVAQPASKKIDQNKLKPEMDEKGNLTTAGFACSQCGQPLFVYKLEQVSEKGKAYTNYFGRCNVAEHEKLIKLAQLKPEKDSDEAVTYSLGKFGQRALDFYSIHVTKESTHPVKPLAQIAGNRYASPVGKALSDACMGTIASFLSKYQDIIIEHQKVVKGNQKRLESLRELAGKENLEYPSVTLPPQPHTKEGVDAYNEVIARVRMWVNLNLWQKLKLSRDDAKPLLRLKGFPSFPLVERQANEVDWWDMVCNVKKLINEKKEDGKVFWQNLAGYKRQEALRPYLSSEEDRKKGKKFARYQLGDLLLHLEKKHGEDWGKVYDEAWERIDKKVEGLSKHIKLEEERRSEDAQSKAALTDWLRAKASFVIEGLKEADKDEFCRCELKLQKWYGDLRGKPFAIEAENSILDISGFSKQYNCAFIWQKDGVKKLNLYLIINYFKGGKLRFKKIKPEAFEANRFYTVINKKSGEIVPMEVNFNFDDPNLIILPLAFGKRQGREFIWNDLLSLETGSLKLANGRVIEKTLYNRRTRQDEPALFVALTFERREVLDSSNIKPMNLIGVDRGENIPAVIALTDPEGCPLSRFKDSLGNPTHILRIGESYKEKQRTIQAKKEVEQRRAGGYSRKYASKAKNLADDMVRNTARDLLYYAVTQDAMLIFENLSRGFGRQGKRTFMAERQYTRMEDWLTAKLAYEGLPSKTYLSKTLAQYTSKTCSNCGFTITSADYDRVLEKLKKTATGWMTTINGKELKVEGQITYYNRYKRQNVVKDLSVELDRLSEESVNNDISSWTKGRSGEALSLLKKRFSHRPVQEKFVCLNCGFETHADEQAALNIARSWLFLRSQEYKKYQTNKTTGKNTDKRAFVETWQSFYRKKLKEVWKPAV

SEQ ID NO: 34831 - protein, 978 aa, synthetic construct
  REGION 1..978: note = engineered CasX variant
QEIKRINKIRRRLVKDSNTKKAGKTGPMKTLLVRVMTPDLRERLENLRKKPENIPQPISNTSRANLNKLLTDYTEMKKAILHVYWEEFQKDPVGLMSRVAQPASKKIDQNKLKPEMDEKGNLTTAGFACSQCGQPLFVYKLEQVSEKGKAYTNYFGRCNVAEHEKLIKLAQLKPEKDSDEAVTYSLGKFGQRALDFYSIHVTKESTHPVKPLAQIAGNRYASYPVGKALSDACMGTIASFLSKYQDIIIEHQKVVKGNQKRLESLRELAGKENLEYPSVTLPPQPHTKEGVDAYNEVIARVRMWVNLNLWQKLKLSRDDAKPLLRLKKFPSFPLVERQANEVDWWDMVCNVKKLINEKKEDGKVFWQNLAGYKRQEALRPYLSSEEDRKKGKKFARYQLGDLLLHLEKKHGEDWGKVYDEAWERIDKKVEGLSKHIKLEEERRSEDAQSKAALTDWLRAKASFVIEGLKEADKDEFCRCELKLQKWYGDLRGKPFAIEAENSILDISGFSKQYNCAFIWQKDGVKKLNLYLIINYFKGGKLRFKKIKPEAFEANRFYTVINKKSGEIVPMEVNFNFDDPNLIILPLAFGKRQGREFIWNDLLSLETGSLKLANGRVIEKTLYNRRTRQDEPALFVALTFERREVLDSSNIKPMNLIGVDRGENIPAVIALTDPEGCPLSRFKDSLGNPTHILRIGESYKEKQRTIQAKKEVEQRRAGGYSRKYASKAKNLADDMVRNTARDLLYYAVTQDAMLIFENLSRGFGRQGKRTFMAERQYTRMEDWLTAKLAYEGLPSKTYLSKTLAQYTSKTCSNCGFTITSADYDRVLEKLKKTATGWMTTINGKELKVEGQITYYNRYKRQNVVKDLSVELDRLSEESVNNDISSWTKGRSGEALSLLKKRFSHRPVQEKFVCLNCGFETHADEQAALNIARSWLFLRSQEYKKYQTNKTTGNTDKRAFVETWQSFYRKKLKEVWKPAV

SEQ ID NO: 34832 - protein, 978 aa, synthetic construct
  REGION 1..978: note = engineered CasX variant
QEIKRINKIRRRLVKDSNTKKAGKTGPMKTLLVRVMTPDLRERLENLRKKPENIPQPISNTSRANLNKLLTDYTEMKKAILHVYWEEFQKDPVGLMSRVAQPASKKIDQNKLKPEMDEKGNLTTAGFACSQCGQPLFVYKLEQVSEKGKAYTNYFGRCNVAEHEKLIKLAQLKPEKDSDEAVTYSLGKFGQRALDFYSIHVTKESTHPVKPLAQIAGNRYASHPVGKALSDACMGTIASFLSKYQDIIIEHQKVVKGNQKRLESLRELAGKENLEYPSVTLPPQPHTKEGVDAYNEVIARVRMWVNLNLWQKLKLSRDDAKPLLRLKKFPSFPLVERQANEVDWWDMVCNVKKLINEKKEDGKVFWQNLAGYKRQEALRPYLSSEEDRKKGKKFARYQLGDLLLHLEKKHGEDWGKVYDEAWERIDKKVEGLSKHIKLEEERRSEDAQSKAALTDWLRAKASFVIEGLKEADKDEFCRCELKLQKWYGDLRGKPFAIEAENSILDISGFSKQYNCAFIWQKDGVKKLNLYLIINYFKGGKLRFKKIKPEAFEANRFYTVINKKSGEIVPMEVNFNFDDPNLIILPLAFGKRQGREFIWNDLLSLETGSLKLANGRVIEKTLYNRRTRQDEPALFVALTFERREVLDSSNIKPMNLIGVDRGENIPAVIALTDPEGCPLSRFKDSLGNPTHILRIGESYKEKQRTIQAKKEVEQRRAGGYSRKYASKAKNLADDMVRNTARDLLYYAVTQDAMLIFENLSRGFGRQGKRTFMAERQYTRMEDWLTAKLAYEGLPSKTYLSKTLAQYTSKTCSNCGFTITSADYDRVLEKLKKTATGWMTTINGKELKVEGQITYYNRYKRQNVVKDLSVELDRLSEESVNNDISSWTKGRSGEALSLLKKRFSHRPVQEKFVCLNCGFETHADEQAALNIARSWLFLRSQEYKKYQTNKTTGNTDKRAFVETWQSFYRKKLKEVWKPAV

SEQ ID NO: 34833 - protein, 978 aa, synthetic construct
  REGION 1..978: note = engineered CasX variant
QEIKRINKIRRRLVKDSNTKKAGKTGPMKTLLVRVMTPDLRERLENLRKKPENIPQPISNTSRANLNKLLTDYTEMKKAILHVYWEEFQKDPVGLMSRVAQPASKKIDQNKLKPEMDEKGNLTTAGFACSQCGQPLFVYKLEQVSEKGKAYTNYFGRCNVAEHEKLIKLAQLKPEKDSDEAVTYSLGKFGQRALDFYSIHVTKESTHPVKPLAQIAGNRYASTPVGKALSDACMGTIASFLSKYQDIIIEHQKVVKGNQKRLESLRELAGKENLEYPSVTLPPQPHTKEGVDAYNEVIARVRMWVNLNLWQKLKLSRDDAKPLLRLKKFPSFPLVERQANEVDWWDMVCNVKKLINEKKEDGKVFWQNLAGYKRQEALRPYLSSEEDRKKGKKFARYQLGDLLLHLEKKHGEDWGKVYDEAWERIDKKVEGLSKHIKLEEERRSEDAQSKAALTDWLRAKASFVIEGLKEADKDEFCRCELKLQKWYGDLRGKPFAIEAENSILDISGFSKQYNCAFIWQKDGVKKLNLYLIINYFKGGKLRFKKIKPEAFEANRFYTVINKKSGEIVPMEVNFNFDDPNLIILPLAFGKRQGREFIWNDLLSLETGSLKLANGRVIEKTLYNRRTRQDEPALFVALTFERREVLDSSNIKPMNLIGVDRGENIPAVIALTDPEGCPLSRFKDSLGNPTHILRIGESYKEKQRTIQAKKEVEQRRAGGYSRKYASKAKNLADDMVRNTARDLLYYAVTQDAMLIFENLSRGFGRQGKRTFMAERQYTRMEDWLTAKLAYEGLPSKTYLSKTLAQYTSKTCSNCGFTITSADYDRVLEKLKKTATGWMTTINGKELKVEGQITYYNRYKRQNVVKDLSVELDRLSEESVNNDISSWTKGRSGEALSLLKKRFSHRPVQEKFVCLNCGFETHADEQAALNIARSWLFLRSQEYKKYQTNKTTGNTDKRAFVETWQSFYRKKLKEVWKPAV

SEQ ID NO: 34834 - protein, 978 aa, synthetic construct
  REGION 1..978: note = engineered CasX variant
QEIKRINKIRRRLVKDSNTKKAGKTGPMKTLLVRVMTPDLRERLENLRKKPENIPQPISNTSRANLNKLLTDYTEMKKAILHVYWEEFQKDPVGLMSRVAQPASKKIDQNKLKPEMDEKGNLTTAGFACSQCGQPLFVYKLEQVSEKGKAYTNYFGRCNVAEHEKLIKLAQLKPEKDSDEAVTYSLGKFGQRALDFYSIHVTKESTHPVKPLAQIAGNRYASAPVGKALSDACMGTIASFLSKYQDIIIEHQKVVKGNQKRLESLRELAGKENLEYPSVTLPPQPHTKEGVDAYNEVIARVRMWVNLNLWQKLKLSRDDAKPLLRLKKFPSFPLVERQANEVDWWDMVCNVKKLINEKKEDGKVFWQNLAGYKRQEALRPYLSSEEDRKKGKKFARYQLGDLLLHLEKKHGEDWGKVYDEAWERIDKKVEGLSKHIKLEEERRSEDAQSKAALTDWLRAKASFVIEGLKEADKDEFCRCELKLQKWYGDLRGKPFAIEAENSILDISGFSKQYNCAFIWQKDGVKKLNLYLIINYFKGGKLRFKKIKPEAFEANRFYTVINKKSGEIVPMEVNFNFDDPNLIILPLAFGKRQGREFIWNDLLSLETGSLKLANGRVIEKTLYNRRTRQDEPALFVALTFERREVLDSSNIKPMNLIGVDRGENIPAVIALTDPEGCPLSRFKDSLGNPTHILRIGESYKEKQRTIQAKKEVEQRRAGGYSRKYASKAKNLADDMVRNTARDLLYYAVTQDAMLIFENLSRGFGRQGKRTFMAERQYTRMEDWLTAKLAYEGLPSKTYLSKTLAQYTSKTCSNCGFTITSADYDRVLEKLKKTATGWMTTINGKELKVEGQITYYNRYKRQNVVKDLSVELDRLSEESVNNDISSWTKGRSGEALSLLKKRFSHRPVQEKFVCLNCGFETHADEQAALNIARSWLFLRSQEYKKYQTNKTTGNTDKRAFVETWQSFYRKKLKEVWKPAV

SEQ ID NO: 34835 - protein, 978 aa, synthetic construct
  REGION 1..978: note = engineered CasX variant
QEIKRINKIRRRLVKDSNTKKAGKTGPMKTLLVRVMTPDLRERLENLRKKPENIPQPISNTSRANLNKLLTDYTEMKKAILHVYWEEFQKDPVGLMSRVAQPASKKIDQNKLKPEMDEKGNLTTAGFACSQCGQPLFVYKLEQVSEKGKAYTNYFGRCNVAEHEKLIKLAQLKPEKDSDEAVTYSLGKFGQRALDFYSIHVTKESTHPVKPLAQIAGNRYASVPVGKALSDACMGTIASFLSKYQDIIIEHQKVVKGNQKRLESLRELAGKENLEYPSVTLPPQPHTKEGVDAYNEVIARVRMWVNLNLWQKLKLSRDDAKPLLRLKKFPSFPLVERQANEVDWWDMVCNVKKLINEKKEDGKVFWQNLAGYKRQEALRPYLSSEEDRKKGKKFARYQLGDLLLHLEKKHGEDWGKVYDEAWERIDKKVEGLSKHIKLEEERRSEDAQSKAALTDWLRAKASFVIEGLKEADKDEFCRCELKLQKWYGDLRGKPFAIEAENSILDISGFSKQYNCAFIWQKDGVKKLNLYLIINYFKGGKLRFKKIKPEAFEANRFYTVINKKSGEIVPMEVNFNFDDPNLIILPLAFGKRQGREFIWNDLLSLETGSLKLANGRVIEKTLYNRRTRQDEPALFVALTFERREVLDSSNIKPMNLIGVDRGENIPAVIALTDPEGCPLSRFKDSLGNPTHILRIGESYKEKQRTIQAKKEVEQRRAGGYSRKYASKAKNLADDMVRNTARDLLYYAVTQDAMLIFENLSRGFGRQGKRTFMAERQYTRMEDWLTAKLAYEGLPSKTYLSKTLAQYTSKTCSNCGFTITSADYDRVLEKLKKTATGWMTTINGKELKVEGQITYYNRYKRQNVVKDLSVELDRLSEESVNNDISSWTKGRSGEALSLLKKRFSHRPVQEKFVCLNCGFETHADEQAALNIARSWLFLRSQEYKKYQTNKTTGNTDKRAFVETWQSFYRKKLKEVWKPAV

SEQ ID NO: 34836 - protein, 979 aa, synthetic construct
  REGION 1..979: note = engineered CasX variant
QEIKRINKIRRRLVKDSNTKKAGKTGPMKTLLVRVMTPDLRERLENLRKKPENIPQPISNTSRANLNKLLTDYTEMKKAILHVYWEEFQKDPVGLMSRVAQPASKKIDQNKLKPEMDEKGNLTTAGFACSQCGQPLFVYKLEQVSEKGKAYTNYFGRCNVAEHEKLIKKLAQLKPEKDSDEAVTYSLGKFGQRALDFYSIHVTKESTHPVKPLAQIAGNRYASGPVGKALSDACMGTIASFLSKYQDIIIEHQKVVKGNQKRLESLRELAGKENLEYPSVTLPPQPHTKEGVDAYNEVIARVRMWVNLNLWQKLKLSRDDAKPLLRLKKFPSFPLVERQANEVDWWDMVCNVKKLINEKKEDGKVFWQNLAGYKRQEALRPYLSSEEDRKKGKKFARYQLGDLLLHLEKKHGEDWGKVYDEAWERIDKKVEGLSKHIKLEEERRSEDAQSKAALTDWLRAKASFVIEGLKEADKDEFCRCELKLQKWYGDLRGKPFAIEAENSILDISGFSKQYNCAFIWQKDGVKKLNLYLIINYFKGGKLRFKKIKPEAFEANRFYTVINKKSGEIVPMEVNFNFDDPNLIILPLAFGKRQGREFIWNDLLSLETGSLKLANGRVIEKTLYNRRTRQDEPALFVALTFERREVLDSSNIKPMNLIGVDRGENIPAVIALTDPEGCPLSRFKDSLGNPTHILRIGESYKEKQRTIQAKKEVEQRRAGGYSRKYASKAKNLADDMVRNTARDLLYYAVTQDAMLIFENLSRGFGRQGKRTFMAERQYTRMEDWLTAKLAYEGLPSKTYLSKTLAQYTSKTCSNCGFTITSADYDRVLEKLKKTATGWMTTINGKELKVEGQITYYNRYKRQNVVKDLSVELDRLSEESVNNDISSWTKGRSGEALSLLKKRFSHRPVQEKFVCLNCGFETHADEQAALNIARSWLFLRSQEYKKYQTNKTTGNTDKRAFVETWQSFYRKKLKEVWKPAV

SEQ ID NO: 34837 - protein, 977 aa, synthetic construct
  REGION 1..977: note = engineered CasX variant
QEIKRINKIRRRLVKDSNTKKAGKTGPMKTLLVRVMTPDLRERLENLRKKPENIPQPISNTSRANLNKLLTDYTEMKKAILHVYWEEFQKDPVGLMSRVAQPASKKIDQNKLKPEMDEKGNLTTAGFACSQCGQPLFVYKLEQVSEKGKAYTNYFGRCNVAEHEKLIKLAQLKPEKDSDEAVTYSLGKFGQRALDFYSIHVTKESTHPVKPLAQIAGNRYASPVGKALSDACMGTIASFLSKYQDIIIEHQKVVKGNQKRLESLRELAGKENLEYPSVTLPPQPHTKEGVDAYNEVIARVRMWVNLNLWQKLKLSRDDAKPLLRLKKFPSFPLVERQANEVDWWDMVCNVKKLINEKKEDGKVFWQNLAGYKRQEALRPYLSSEEDRKKGKKFARYQLGDLLLHLEKKHGEDWGKVYDEAWERIDKKVEGLSKHIKLEEERRSEDAQSKAALTDWLRAKASFVIEGLKEADKDEFCRCELKLQKWYGDLRGKPFAIEAENSILDISGFSKQYNCAFIWQKDGVKKLNLYLIINYFKGGKLRFKKIKPEAFEANRFYTVINKKSGEIVPMEVNFNFDDPNLIILPLAFGKRQGREFIWNDLLSLETGSLKLANGRVIEKTLYNRRTRQDEPALFVALTFERREVLDSSNIKPMNLIGVDRGENIPAVIALTDPEGCPLSRFKDSLGNPTHILRIGESYKEKQRTIQAKKEVEQRRAGGYSRKYASKAKNLADDMVRNTARDLLYYAVTQDAMLIFENLSRGFGRQGKRTFMAERQYTRMEDWLTAKLAYEGLPSKTYLSKTLAQYTSKTCSNCGFTITSADYDRVLEKLKKTATGWMTTINGKELKVEGQITYYNRYKRQNVVKDLSVELDRLSEESVNNDISSWTKGRSGEALSLLKKRFSHRPVQEKFVCLNCGFETHADEQAALNIARSWLFLRSQEYKKYQTNKTTGNTDKRAFVETWQSFYRKKLKEVWKPAV

SEQ ID NO: 34838 - protein, 978 aa, synthetic construct
  REGION 1..978: note = engineered CasX variant
QEIKRINKIRRRLVKDSNTKKAGKTGPMKTLLVRVMTPDLRERLENLRKKPENIPQPISNTSRANLNKLLTDYTEMKKAILHVYWEEFQKDPVGLMSRVAQPASKKIDQNKLKPEMDEKGNLTTAGFACSQCGQPLFVYKLEQVSEKGKAYTNYFGRCNVAEHEKLIKLAQLKPEKDSDEAVTYSLGKFGQRALDFYSIHVTKESTHPVKPLAQIAGNRYASYPVGKALSDACMGTIASFLSKYQDIIIEHQKVVKGNQKRLESLRELAGKENLEYPSVTLPPQPHTKEGVDAYNEVIARVRMWVNLNLWQKLKLSRDDAKPLLRLKGFPSFPLVERQANEVDWWDMVCNVKKLINEKKEDGKVFWQNLAGYKRQEALRPYLSSEEDRKKGKKFARYQLGDLLLHLEKKHGEDWGKVYDEAWERIDKKVEGLSKHIKLEEERRSEDAQSKAALTDWLRAKASFVIEGLKEADKDEFCRCELKLQKWYGDLRGKPFAIEAENSILDISGFSKQYNCAFIWQKDGVKKLNLYLIINYFKGGKLRFKKIKPEAFEANRFYTVINKKSGEIVPMEVNFNFDDPNLIILPLAFGKRQGREFIWNDLLSLETGSLKLANGRVIEKTLYNRRTRQDEPALFVALTFERREVLDSSNIKPMNLIGVDRGENIPAVIALTDPEGCPLSRFKDSLGNPTHILRIGERYKEKQRTIQAKKEVEQRRAGGYSRKYASKAKNLADDMVRNTARDLLYYAVTQDAMLIFENLSRGFGRQGKRTFMAERQYTRMEDWLTAKLAYEGLPSKTYLSKTLAQYTSKTCSNCGFTITSADYDRVLEKLKKTATGWMTTINGKELKVEGQITYYNRYKRQNVVKDLSVELDRLSEESVNNDISSWTKGRSGEALSLLKKRFSHRPVQEKFVCLNCGFETHADEQAALNIARSWLFLRSQEYKKYQTNKTTGNTDKRAFVETWQSFYRKKLKEVWKPAV

SEQ ID NO: 34839 - protein, 978 aa, synthetic construct
  REGION 1..978: note = engineered CasX variant
QEIKRINKIRRRLVKDSNTKKAGKTGPMKTLLVRVMTPDLRERLENLRKKPENIPQPISNTSRANLNKLLTDYTEMKKAILHVYWEEFQKDPVGLMSRVAQPASKKIDQNKLKPEMDEKGNLTTAGFACSQCGQPLFVYKLEQVSEKGKAYTNYFGRCNVAEHEKLIKLAQLKPEKDSDEAVTYSLGKFGQRALDFYSIHVTKESTHPVKPLAQIAGNRYASHPVGKALSDACMGTIASFLSKYQDIIIEHQKVVKGNQKRLESLRELAGKENLEYPSVTLPPQPHTKEGVDAYNEVIARVRMWVNLNLWQKLKLSRDDAKPLLRLKGFPSFPLVERQANEVDWWDMVCNVKKLINEKKEDGKVFWQNLAGYKRQEALRPYLSSEEDRKKGKKFARYQLGDLLLHLEKKHGEDWGKVYDEAWERIDKKVEGLSKHIKLEEERRSEDAQSKAALTDWLRAKASFVIEGLKEADKDEFCRCELKLQKWYGDLRGKPFAIEAENSILDISGFSKQYNCAFIWQKDGVKKLNLYLIINYFKGGKLRFKKIKPEAFEANRFYTVINKKSGEIVPMEVNFNFDDPNLIILPLAFGKRQGREFIWNDLLSLETGSLKLANGRVIEKTLYNRRTRQDEPALFVALTFERREVLDSSNIKPMNLIGVDRGENIPAVIALTDPEGCPLSRFKDSLGNPTHILRIGERYKEKQRTIQAKKEVEQRRAGGYSRKYASKAKNLADDMVRNTARDLLYYAVTQDAMLIFENLSRGFGRQGKRTFMAERQYTRMEDWLTAKLAYEGLPSKTYLSKTLAQYTSKTCSNCGFTITSADYDRVLEKLKKTATGWMTTINGKELKVEGQITYYNRYKRQNVVKDLSVELDRLSEESVNNDISSWTKGRSGEALSLLKKRFSHRPVQEKFVCLNCGFETHADEQAALNIARSWLFLRSQEYKKYQTNKTTGNTDKRAFVETWQSFYRKKLKEVWKPAV

SEQ ID NO: 34840 - protein, 978 aa, synthetic construct
  REGION 1..978: note = engineered CasX variant
QEIKRINKIRRRLVKDSNTKKAGKTGPMKTLLVRVMTPDLRERLENLRKKPENIPQPISNTSRANLNKLLTDYTEMKKAILHVYWEEFQKDPVGLMSRVAQPASKKIDQNKLKPEMDEKGNLTTAGFACSQCGQPLFVYKLEQVSEKGKAYTNYFGRCNVAEHEKLIKLAQLKPEKDSDEAVTYSLGKFGQRALDFYSIHVTKESTHPVKPLAQIAGNRYASTPVGKALSDACMGTIASFLSKYQDIIIEHQKVVKGNQKRLESLRELAGKENLEYPSVTLPPQPHTKEGVDAYNEVIARVRMWVNLNLWQKLKLSRDDAKPLLRLKGFPSFPLVERQANEVDWWDMVCNVKKLINEKKEDGKVFWQNLAGYKRQEALRPYLSSEEDRKKGKKFARYQLGDLLLHLEKKHGEDWGKVYDEAWERIDKKVEGLSKHIKLEEERRSEDAQSKAALTDWLRAKASFVIEGLKEADKDEFCRCELKLQKWYGDLRGKPFAIEAENSILDISGFSKQYNCAFIWQKDGVKKLNLYLIINYFKGGKLRFKKIKPEAFEANRFYTVINKKSGEIVPMEVNFNFDDPNLIILPLAFGKRQGREFIWNDLLSLETGSLKLANGRVIEKTLYNRRTRQDEPALFVALTFERREVLDSSNIKPMNLIGVDRGENIPAVIALTDPEGCPLSRFKDSLGNPTHILRIGERYKEKQRTIQAKKEVEQRRAGGYSRKYASKAKNLADDMVRNTARDLLYYAVTQDAMLIFENLSRGFGRQGKRTFMAERQYTRMEDWLTAKLAYEGLPSKTYLSKTLAQYTSKTCSNCGFTITSADYDRVLEKLKKTATGWMTTINGKELKVEGQITYYNRYKRQNVVKDLSVELDRLSEESVNNDISSWTKGRSGEALSLLKKRFSHRPVQEKFVCLNCGFETHADEQAALNIARSWLFLRSQEYKKYQTNKTTGNTDKRAFVETWQSFYRKKLKEVWKPAV

SEQ ID NO: 34841 - protein, 978 aa, synthetic construct
  REGION 1..978: note = engineered CasX variant
QEIKRINKIRRRLVKDSNTKKAGKTGPMKTLLVRVMTPDLRERLENLRKKPENIPQPISNTSRANLNKLLTDYTEMKKAILHVYWEEFQKDPVGLMSRVAQPASKKIDQNKLKPEMDEKGNLTTAGFACSQCGQPLFVYKLEQVSEKGKAYTNYFGRCNVAEHEKLIKLAQLKPEKDSDEAVTYSLGKFGQRALDFYSIHVTKESTHPVKPLAQIAGNRYASAPVGKALSDACMGTIASFLSKYQDIIIEHQKVVKGNQKRLESLRELAGKENLEYPSVTLPPQPHTKEGVDAYNEVIARVRMWVNLNLWQKLKLSRDDAKPLLRLKGFPSFPLVERQANEVDWWDMVCNVKKLINEKKEDGKVFWQNLAGYKRQEALRPYLSSEEDRKKGKKFARYQLGDLLLHLEKKHGEDWGKVYDEAWERIDKKVEGLSKHIKLEEERRSEDAQSKAALTDWLRAKASFVIEGLKEADKDEFCRCELKLQKWYGDLRGKPFAIEAENSILDISGFSKQYNCAFIWQKDGVKKLNLYLIINYFKGGKLRFKKIKPEAFEANRFYTVINKKSGEIVPMEVNFNFDDPNLIILPLAFGKRQGREFIWNDLLSLETGSLKLANGRVIEKTLYNRRTRQDEPALFVALTFERREVLDSSNIKPMNLIGVDRGENIPAVIALTDPEGCPLSRFKDSLGNPTHILRIGERYKEKQRTIQAKKEVEQRRAGGYSRKYASKAKNLADDMVRNTARDLLYYAVTQDAMLIFENLSRGFGRQGKRTFMAERQYTRMEDWLTAKLAYEGLPSKTYLSKTLAQYTSKTCSNCGFTITSADYDRVLEKLKKTATGWMTTINGKELKVEGQITYYNRYKRQNVVKDLSVELDRLSEESVNNDISSWTKGRSGEALSLLKKRFSHRPVQEKFVCLNCGFETHADEQAALNIARSWLFLRSQEYKKYQTNKTTGNTDKRAFVETWQSFYRKKLKEVWKPAV

SEQ ID NO: 34842 - protein, 978 aa, synthetic construct
  REGION 1..978: note = engineered CasX variant
QEIKRINKIRRRLVKDSNTKKAGKTGPMKTLLVRVMTPDLRERLENLRKKPENIPQPISNTSRANLNKLLTDYTEMKKAILHVYWEEFQKDPVGLMSRVAQPASKKIDQNKLKPEMDEKGNLTTAGFACSQCGQPLFVYKLEQVSEKGKAYTNYFGRCNVAEHEKLIKLAQLKPEKDSDEAVTYSLGKFGQRALDFYSIHVTKESTHPVKPLAQIAGNRYASVPVGKALSDACMGTIASFLSKYQDIIIEHQKVVKGNQKRLESLRELAGKENLEYPSVTLPPQPHTKEGVDAYNEVIARVRMWVNLNLWQKLKLSRDDAKPLLRLKGFPSFPLVERQANEVDWWDMVCNVKKLINEKKEDGKVFWQNLAGYKRQEALRPYLSSEEDRKKGKKFARYQLGDLLLHLEKKHGEDWGKVYDEAWERIDKKVEGLSKHIKLEEERRSEDAQSKAALTDWLRAKASFVIEGLKEADKDEFCRCELKLQKWYGDLRGKPFAIEAENSILDISGFSKQYNCAFIWQKDGVKKLNLYLIINYFKGGKLRFKKIKPEAFEANRFYTVINKKSGEIVPMEVNFNFDDPNLIILPLAFGKRQGREFIWNDLLSLETGSLKLANGRVIEKTLYNRRTRQDEPALFVALTFERREVLDSSNIKPMNLIGVDRGENIPAVIALTDPEGCPLSRFKDSLGNPTHILRIGERYKEKQRTIQAKKEVEQRRAGGYSRKYASKAKNLADDMVRNTARDLLYYAVTQDAMLIFENLSRGFGRQGKRTFMAERQYTRMEDWLTAKLAYEGLPSKTYLSKTLAQYTSKTCSNCGFTITSADYDRVLEKLKKTATGWMTTINGKELKVEGQITYYNRYKRQNVVKDLSVELDRLSEESVNNDISSWTKGRSGEALSLLKKRFSHRPVQEKFVCLNCGFETHADEQAALNIARSWLFLRSQEYKKYQTNKTTGNTDKRAFVETWQSFYRKKLKEVWKPAV

SEQ ID NO: 34843 - protein, 979 aa, synthetic construct
  REGION 1..979: note = engineered CasX variant
QEIKRINKIRRRLVKDSNTKKAGKTGPMKTLLVRVMTPDLRERLENLRKKPENIPQPISNTSRANLNKLLTDYTEMKKAILHVYWEEFQKDPVGLMSRVAQPASKKIDQNKLKPEMDEKGNLTTAGFACSQCGQPLFVYKLEQVSEKGKAYTNYFGRCNVAEHEKLIKKLAQLKPEKDSDEAVTYSLGKFGQRALDFYSIHVTKESTHPVKPLAQIAGNRYASGPVGKALSDACMGTIASFLSKYQDIIIEHQKVVKGNQKRLESLRELAGKENLEYPSVTLPPQPHTKEGVDAYNEVIARVRMWVNLNLWQKLKLSRDDAKPLLRLKGFPSFPLVERQANEVDWWDMVCNVKKLINEKKEDGKVFWQNLAGYKRQEALRPYLSSEEDRKKGKKFARYQLGDLLLHLEKKHGEDWGKVYDEAWERIDKKVEGLSKHIKLEEERRSEDAQSKAALTDWLRAKASFVIEGLKEADKDEFCRCELKLQKWYGDLRGKPFAIEAENSILDISGFSKQYNCAFIWQKDGVKKLNLYLIINYFKGGKLRFKKIKPEAFEANRFYTVINKKSGEIVPMEVNFNFDDPNLIILPLAFGKRQGREFIWNDLLSLETGSLKLANGRVIEKTLYNRRTRQDEPALFVALTFERREVLDSSNIKPMNLIGVDRGENIPAVIALTDPEGCPLSRFKDSLGNPTHILRIGERYKEKQRTIQAKKEVEQRRAGGYSRKYASKAKNLADDMVRNTARDLLYYAVTQDAMLIFENLSRGFGRQGKRTFMAERQYTRMEDWLTAKLAYEGLPSKTYLSKTLAQYTSKTCSNCGFTITSADYDRVLEKLKKTATGWMTTINGKELKVEGQITYYNRYKRQNVVKDLSVELDRLSEESVNNDISSWTKGRSGEALSLLKKRFSHRPVQEKFVCLNCGFETHADEQAALNIARSWLFLRSQEYKKYQTNKTTGNTDKRAFVETWQSFYRKKLKEVWKPAV

SEQ ID NO: 34844 - protein, 977 aa, synthetic construct
  REGION 1..977: note = engineered CasX variant
QEIKRINKIRRRLVKDSNTKKAGKTGPMKTLLVRVMTPDLRERLENLRKKPENIPQPISNTSRANLNKLLTDYTEMKKAILHVYWEEFQKDPVGLMSRVAQPASKKIDQNKLKPEMDEKGNLTTAGFACSQCGQPLFVYKLEQVSEKGKAYTNYFGRCNVAEHEKLIKLAQLKPEKDSDEAVTYSLGKFGQRALDFYSIHVTKESTHPVKPLAQIAGNRYASPVGKALSDACMGTIASFLSKYQDIIIEHQKVVKGNQKRLESLRELAGKENLEYPSVTLPPQPHTKEGVDAYNEVIARVRMWVNLNLWQKLKLSRDDAKPLLRLKGFPSFPLVERQANEVDWWDMVCNVKKLINEKKEDGKVFWQNLAGYKRQEALRPYLSSEEDRKKGKKFARYQLGDLLLHLEKKHGEDWGKVYDEAWERIDKKVEGLSKHIKLEEERRSEDAQSKAALTDWLRAKASFVIEGLKEADKDEFCRCELKLQKWYGDLRGKPFAIEAENSILDISGFSKQYNCAFIWQKDGVKKLNLYLIINYFKGGKLRFKKIKPEAFEANRFYTVINKKSGEIVPMEVNFNFDDPNLIILPLAFGKRQGREFIWNDLLSLETGSLKLANGRVIEKTLYNRRTRQDEPALFVALTFERREVLDSSNIKPMNLIGVDRGENIPAVIALTDPEGCPLSRFKDSLGNPTHILRIGERYKEKQRTIQAKKEVEQRRAGGYSRKYASKAKNLADDMVRNTARDLLYYAVTQDAMLIFENLSRGFGRQGKRTFMAERQYTRMEDWLTAKLAYEGLPSKTYLSKTLAQYTSKTCSNCGFTITSADYDRVLEKLKKTATGWMTTINGKELKVEGQITYYNRYKRQNVVKDLSVELDRLSEESVNNDISSWTKGRSGEALSLLKKRFSHRPVQEKFVCLNCGFETHADEQAALNIARSWLFLRSQEYKKYQTNKTTGNTDKRAFVETWQSFYRKKLKEVWKPAV

SEQ ID NO: 34845 - protein, 978 aa, synthetic construct
  REGION 1..978: note = engineered CasX variant
QEIKRINKIRRRLVKDSNTKKAGKTGPMKTLLVRVMTPDLRERLENLRKKPENIPQPISNTSRANLNKLLTDYTEMKKAILHVYWEEFQKDPVGLMSRVAQPASKKIDQNKLKPEMDEKGNLTTAGFACSQCGQPLFVYKLEQVSEKGKAYTNYFGRCNVAEHEKLIKLAQLKPEKDSDEAVTYSLGKFGQRALDFYSIHVTKESTHPVKPLAQIAGNRYASYPVGKALSDACMGTIASFLSKYQDIIIEHQKVVKGNQKRLESLRELAGKENLEYPSVTLPPQPHTKEGVDAYNEVIARVRMWVNLNLWQKLKLSRDDAKPLLRLKGFPSFPLVERQANEVDWWDMVCNVKKLINEKKEDGKVFWQNLAGYKRQEALRPYLSSEEDRKKGKKFARYQLGDLLLHLEKKHGEDWGKVYDEAWERIDKKVEGLSKHIKLEEERRSEDAQSKAALTDWLRAKASFVIEGLKEADKDEFCRCELKLQKWYGDLRGKPFAIEAENSILDISGFSKQYNCAFIWQKDGVKKLNLYLIINYFKGGKLRFKKIKPEAFEANRFYTVINKKSGEIVPMEVNFNFDDPNLIILPLAFGKRQGREFIWNDLLSLETGSLQLANGRVIEKTLYNRRTRQDEPALFVALTFERREVLDSSNIKPMNLIGVDRGENIPAVIALTDPEGCPLSRFKDSLGNPTHILRIGESYKEKQRTIQAKKEVEQRRAGGYSRKYASKAKNLADDMVRNTARDLLYYAVTQDAMLIFENLSRGFGRQGKRTFMAERQYTRMEDWLTAKLAYEGLPSKTYLSKTLAQYTSKTCSNCGFTITSADYDRVLEKLKKTATGWMTTINGKELKVEGQITYYNRYKRQNVVKDLSVELDRLSEESVNNDISSWTKGRSGEALSLLKKRFSHRPVQEKFVCLNCGFETHADEQAALNIARSWLFLRSQEYKKYQTNKTTGNTDKRAFVETWQSFYRKKLKEVWKPAV

SEQ ID NO: 34846 - protein, 978 aa, synthetic construct
  REGION 1..978: note = engineered CasX variant
QEIKRINKIRRRLVKDSNTKKAGKTGPMKTLLVRVMTPDLRERLENLRKKPENIPQPISNTSRANLNKLLTDYTEMKKAILHVYWEEFQKDPVGLMSRVAQPASKKIDQNKLKPEMDEKGNLTTAGFACSQCGQPLFVYKLEQVSEKGKAYTNYFGRCNVAEHEKLIKLAQLKPEKDSDEAVTYSLGKFGQRALDFYSIHVTKESTHPVKPLAQIAGNRYASHPVGKALSDACMGTIASFLSKYQDIIIEHQKVVKGNQKRLESLRELAGKENLEYPSVTLPPQPHTKEGVDAYNEVIARVRMWVNLNLWQKLKLSRDDAKPLLRLKGFPSFPLVERQANEVDWWDMVCNVKKLINEKKEDGKVFWQNLAGYKRQEALRPYLSSEEDRKKGKKFARYQLGDLLLHLEKKHGEDWGKVYDEAWERIDKKVEGLSKHIKLEEERRSEDAQSKAALTDWLRAKASFVIEGLKEADKDEFCRCELKLQKWYGDLRGKPFAIEAENSILDISGFSKQYNCAFIWQKDGVKKLNLYLIINYFKGGKLRFKKIKPEAFEANRFYTVINKKSGEIVPMEVNFNFDDPNLIILPLAFGKRQGREFIWNDLLSLETGSLQLANGRVIEKTLYNRRTRQDEPALFVALTFERREVLDSSNIKPMNLIGVDRGENIPAVIALTDPEGCPLSRFKDSLGNPTHILRIGESYKEKQRTIQAKKEVEQRRAGGYSRKYASKAKNLADDMVRNTARDLLYYAVTQDAMLIFENLSRGFGRQGKRTFMAERQYTRMEDWLTAKLAYEGLPSKTYLSKTLAQYTSKTCSNCGFTITSADYDRVLEKLKKTATGWMTTINGKELKVEGQITYYNRYKRQNVVKDLSVELDRLSEESVNNDISSWTKGRSGEALSLLKKRFSHRPVQEKFVCLNCGFETHADEQAALNIARSWLFLRSQEYKKYQTNKTTGNTDKRAFVETWQSFYRKKLKEVWKPAV

SEQ ID NO: 34847 - protein, 978 aa, synthetic construct
  REGION 1..978: note = engineered CasX variant
QEIKRINKIRRRLVKDSNTKKAGKTGPMKTLLVRVMTPDLRERLENLRKKPENIPQPISNTSRANLNKLLTDYTEMKKAILHVYWEEFQKDPVGLMSRVAQPASKKIDQNKLKPEMDEKGNLTTAGFACSQCGQPLFVYKLEQVSEKGKAYTNYFGRCNVAEHEKLIKLAQLKPEKDSDEAVTYSLGKFGQRALDFYSIHVTKESTHPVKPLAQIAGNRYASTPVGKALSDACMGTIASFLSKYQDIIIEHQKVVKGNQKRLESLRELAGKENLEYPSVTLPPQPHTKEGVDAYNEVIARVRMWVNLNLWQKLKLSRDDAKPLLRLKGFPSFPLVERQANEVDWWDMVCNVKKLINEKKEDGKVFWQNLAGYKRQEALRPYLSSEEDRKKGKKFARYQLGDLLLHLEKKHGEDWGKVYDEAWERIDKKVEGLSKHIKLEEERRSEDAQSKAALTDWLRAKASFVIEGLKEADKDEFCRCELKLQKWYGDLRGKPFAIEAENSILDISGFSKQYNCAFIWQKDGVKKLNLYLIINYFKGGKLRFKKIKPEAFEANRFYTVINKKSGEIVPMEVNFNFDDPNLIILPLAFGKRQGREFIWNDLLSLETGSLQLANGRVIEKTLYNRRTRQDEPALFVALTFERREVLDSSNIKPMNLIGVDRGENIPAVIALTDPEGCPLSRFKDSLGNPTHILRIGESYKEKQRTIQAKKEVEQRRAGGYSRKYASKAKNLADDMVRNTARDLLYYAVTQDAMLIFENLSRGFGRQGKRTFMAERQYTRMEDWLTAKLAYEGLPSKTYLSKTLAQYTSKTCSNCGFTITSADYDRVLEKLKKTATGWMTTINGKELKVEGQITYYNRYKRQNVVKDLSVELDRLSEESVNNDISSWTKGRSGEALSLLKKRFSHRPVQEKFVCLNCGFETHADEQAALNIARSWLFLRSQEYKKYQTNKTTGNTDKRAFVETWQSFYRKKLKEVWKPAV

SEQ ID NO: 34848 - protein, 978 aa, synthetic construct
  REGION 1..978: note = engineered CasX variant
QEIKRINKIRRRLVKDSNTKKAGKTGPMKTLLVRVMTPDLRERLENLRKKPENIPQPISNTSRANLNKLLTDYTEMKKAILHVYWEEFQKDPVGLMSRVAQPASKKIDQNKLKPEMDEKGNLTTAGFACSQCGQPLFVYKLEQVSEKGKAYTNYFGRCNVAEHEKLIKLAQLKPEKDSDEAVTYSLGKFGQRALDFYSIHVTKESTHPVKPLAQIAGNRYASAPVGKALSDACMGTIASFLSKYQDIIIEHQKVVKGNQKRLESLRELAGKENLEYPSVTLPPQPHTKEGVDAYNEVIARVRMWVNLNLWQKLKLSRDDAKPLLRLKGFPSFPLVERQANEVDWWDMVCNVKKLINEKKEDGKVFWQNLAGYKRQEALRPYLSSEEDRKKGKKFARYQLGDLLLHLEKKHGEDWGKVYDEAWERIDKKVEGLSKHIKLEEERRSEDAQSKAALTDWLRAKASFVIEGLKEADKDEFCRCELKLQKWYGDLRGKPFAIEAENSILDISGFSKQYNCAFIWQKDGVKKLNLYLIINYFKGGKLRFKKIKPEAFEANRFYTVINKKSGEIVPMEVNFNFDDPNLIILPLAFGKRQGREFIWNDLLSLETGSLQLANGRVIEKTLYNRRTRQDEPALFVALTFERREVLDSSNIKPMNLIGVDRGENIPAVIALTDPEGCPLSRFKDSLGNPTHILRIGESYKEKQRTIQAKKEVEQRRAGGYSRKYASKAKNLADDMVRNTARDLLYYAVTQDAMLIFENLSRGFGRQGKRTFMAERQYTRMEDWLTAKLAYEGLPSKTYLSKTLAQYTSKTCSNCGFTITSADYDRVLEKLKKTATGWMTTINGKELKVEGQITYYNRYKRQNVVKDLSVELDRLSEESVNNDISSWTKGRSGEALSLLKKRFSHRPVQEKFVCLNCGFETHADEQAALNIARSWLFLRSQEYKKYQTNKTTGNTDKRAFVETWQSFYRKKLKEVWKPAV

SEQ ID NO: 34849 - protein, 978 aa, synthetic construct
  REGION 1..978: note = engineered CasX variant
QEIKRINKIRRRLVKDSNTKKAGKTGPMKTLLVRVMTPDLRERLENLRKKPENIPQPISNTSRANLNKLLTDYTEMKKAILHVYWEEFQKDPVGLMSRVAQPASKKIDQNKLKPEMDEKGNLTTAGFACSQCGQPLFVYKLEQVSEKGKAYTNYFGRCNVAEHEKLIKLAQLKPEKDSDEAVTYSLGKFGQRALDFYSIHVTKESTHPVKPLAQIAGNRYASVPVGKALSDACMGTIASFLSKYQDIIIEHQKVVKGNQKRLESLRELAGKENLEYPSVTLPPQPHTKEGVDAYNEVIARVRMWVNLNLWQKLKLSRDDAKPLLRLKGFPSFPLVERQANEVDWWDMVCNVKKLINEKKEDGKVFWQNLAGYKRQEALRPYLSSEEDRKKGKKFARYQLGDLLLHLEKKHGEDWGKVYDEAWERIDKKVEGLSKHIKLEEERRSEDAQSKAALTDWLRAKASFVIEGLKEADKDEFCRCELKLQKWYGDLRGKPFAIEAENSILDISGFSKQYNCAFIWQKDGVKKLNLYLIINYFKGGKLRFKKIKPEAFEANRFYTVINKKSGEIVPMEVNFNFDDPNLIILPLAFGKRQGREFIWNDLLSLETGSLQLANGRVIEKTLYNRRTRQDEPALFVALTFERREVLDSSNIKPMNLIGVDRGENIPAVIALTDPEGCPLSRFKDSLGNPTHILRIGESYKEKQRTIQAKKEVEQRRAGGYSRKYASKAKNLADDMVRNTARDLLYYAVTQDAMLIFENLSRGFGRQGKRTFMAERQYTRMEDWLTAKLAYEGLPSKTYLSKTLAQYTSKTCSNCGFTITSADYDRVLEKLKKTATGWMTTINGKELKVEGQITYYNRYKRQNVVKDLSVELDRLSEESVNNDISSWTKGRSGEALSLLKKRFSHRPVQEKFVCLNCGFETHADEQAALNIARSWLFLRSQEYKKYQTNKTTGNTDKRAFVETWQSFYRKKLKEVWKPAV

SEQ ID NO: 34850 - protein, 979 aa, synthetic construct
  REGION 1..979: note = engineered CasX variant
QEIKRINKIRRRLVKDSNTKKAGKTGPMKTLLVRVMTPDLRERLENLRKKPENIPQPISNTSRANLNKLLTDYTEMKKAILHVYWEEFQKDPVGLMSRVAQPASKKIDQNKLKPEMDEKGNLTTAGFACSQCGQPLFVYKLEQVSEKGKAYTNYFGRCNVAEHEKLIKKLAQLKPEKDSDEAVTYSLGKFGQRALDFYSIHVTKESTHPVKPLAQIAGNRYASGPVGKALSDACMGTIASFLSKYQDIIIEHQKVVKGNQKRLESLRELAGKENLEYPSVTLPPQPHTKEGVDAYNEVIARVRMWVNLNLWQKLKLSRDDAKPLLRLKGFPSFPLVERQANEVDWWDMVCNVKKLINEKKEDGKVFWQNLAGYKRQEALRPYLSSEEDRKKGKKFARYQLGDLLLHLEKKHGEDWGKVYDEAWERIDKKVEGLSKHIKLEEERRSEDAQSKAALTDWLRAKASFVIEGLKEADKDEFCRCELKLQKWYGDLRGKPFAIEAENSILDISGFSKQYNCAFIWQKDGVKKLNLYLIINYFKGGKLRFKKIKPEAFEANRFYTVINKKSGEIVPMEVNFNFDDPNLIILPLAFGKRQGREFIWNDLLSLETGSLQLANGRVIEKTLYNRRTRQDEPALFVALTFERREVLDSSNIKPMNLIGVDRGENIPAVIALTDPEGCPLSRFKDSLGNPTHILRIGESYKEKQRTIQAKKEVEQRRAGGYSRKYASKAKNLADDMVRNTARDLLYYAVTQDAMLIFENLSRGFGRQGKRTFMAERQYTRMEDWLTAKLAYEGLPSKTYLSKTLAQYTSKTCSNCGFTITSADYDRVLEKLKKTATGWMTTINGKELKVEGQITYYNRYKRQNVVKDLSVELDRLSEESVNNDISSWTKGRSGEALSLLKKRFSHRPVQEKFVCLNCGFETHADEQAALNIARSWLFLRSQEYKKYQTNKTTGNTDKRAFVETWQSFYRKKLKEVWKPAV

SEQ ID NO: 34851 - protein, 977 aa, synthetic construct
  REGION 1..977: note = engineered CasX variant
QEIKRINKIRRRLVKDSNTKKAGKTGPMKTLLVRVMTPDLRERLENLRKKPENIPQPISNTSRANLNKLLTDYTEMKKAILHVYWEEFQKDPVGLMSRVAQPASKKIDQNKLKPEMDEKGNLTTAGFACSQCGQPLFVYKLEQVSEKGKAYTNYFGRCNVAEHEKLIKLAQLKPEKDSDEAVTYSLGKFGQRALDFYSIHVTKESTHPVKPLAQIAGNRYASPVGKALSDACMGTIASFLSKYQDIIIEHQKVVKGNQKRLESLRELAGKENLEYPSVTLPPQPHTKEGVDAYNEVIARVRMWVNLNLWQKLKLSRDDAKPLLRLKGFPSFPLVERQANEVDWWDMVCNVKKLINEKKEDGKVFWQNLAGYKRQEALRPYLSSEEDRKKGKKFARYQLGDLLLHLEKKHGEDWGKVYDEAWERIDKKVEGLSKHIKLEEERRSEDAQSKAALTDWLRAKASFVIEGLKEADKDEFCRCELKLQKWYGDLRGKPFAIEAENSILDISGFSKQYNCAFIWQKDGVKKLNLYLIINYFKGGKLRFKKIKPEAFEANRFYTVINKKSGEIVPMEVNFNFDDPNLIILPLAFGKRQGREFIWNDLLSLETGSLQLANGRVIEKTLYNRRTRQDEPALFVALTFERREVLDSSNIKPMNLIGVDRGENIPAVIALTDPEGCPLSRFKDSLGNPTHILRIGESYKEKQRTIQAKKEVEQRRAGGYSRKYASKAKNLADDMVRNTARDLLYYAVTQDAMLIFENLSRGFGRQGKRTFMAERQYTRMEDWLTAKLAYEGLPSKTYLSKTLAQYTSKTCSNCGFTITSADYDRVLEKLKKTATGWMTTINGKELKVEGQITYYNRYKRQNVVKDLSVELDRLSEESVNNDISSWTKGRSGEALSLLKKRFSHRPVQEKFVCLNCGFETHADEQAALNIARSWLFLRSQEYKKYQTNKTTGNTDKRAFVETWQSFYRKKLKEVWKPAV

SEQ ID NO: 34852 - protein, 979 aa, synthetic construct
  REGION 1..979: note = engineered CasX variant
QEIKRINKIRRRLVKDSNTKKAGKTGPMKTLLVRVMTPDLRERLENLRKKPENIPQPISNTSRANLNKLLTDYTEMKKAILHVYWEEFQKDPVGLMSRVAQPASKKIDQNKLKPEMDEKGNLTTAGFACSQCGQPLFVYKLEQVSEKGKAYTNYFGRCNVAEHEKLILLYDQLKPEKDSDEAVTYSLGKFGQRALDFYSIHVTKESTHPVKPLAQIAGNRYASYPVGKALSDACMGTIASFLSKYQDIIIEHQKVVKGNQKRLESLRELAGKENLEYPSVTLPPQPHTKEGVDAYNEVIARVRMWVNLNLWQKLKLSRDDAKPLLRLKGFPSFPLVERQANEVDWWDMVCNVKKLINEKKEDGKVFWQNLAGYKRQEALRPYLSSEEDRKKGKKFARYQLGDLLLHLEKKHGEDWGKVYDEAWERIDKKVEGLSKHIKLEEERRSEDAQSKAALTDWLRAKASFVIEGLKEADKDEFCRCELKLQKWYGDLRGKPFAIEAENSILDISGFSKQYNCAFIWQKDGVKKLNLYLIINYFKGGKLRFKKIKPEAFEANRFYTVINKKSGEIVPMEVNFNFDDPNLIILPLAFGKRQGREFIWNDLLSLETGSLKLANGRVIEKTLYNRRTRQDEPALFVALTFERREVLDSSNIKPMNLIGVDRGENIPAVIALTDPEGCPLSRFKDSLGNPTHILRIGESYKEKQRTIQAKKEVEQRRAGGYSRKYASKAKNLADDMVRNTARDLLYYAVTQDAMLIFENLSRGFGRQGKRTFMAERQYTRMEDWLTAKLAYEGLPSKTYLSKTLAQYTSKTCSNCGFTITSADYDRVLEKLKKTATGWMTTINGKELKVEGQITYYNRYKRQNVVKDLSVELDRLSEESVNNDISSWTKGRSGEALSLLKKRFSHRPVQEKFVCLNCGFETHADEQAALNIARSWLFLRSQEYKKYQTNKTTGNTDKRAFVETWQSFYRKKLKEVWKPAV

SEQ ID NO: 34853 - protein, 979 aa, synthetic construct
  REGION 1..979: note = engineered CasX variant
QEIKRINKIRRRLVKDSNTKKAGKTGPMKTLLVRVMTPDLRERLENLRKKPENIPQPISNTSRANLNKLLTDYTEMKKAILHVYWEEFQKDPVGLMSRVAQPASKKIDQNKLKPEMDEKGNLTTAGFACSQCGQPLFVYKLEQVSEKGKAYTNYFGRCNVAEHEKLILLYDQLKPEKDSDEAVTYSLGKFGQRALDFYSIHVTKESTHPVKPLAQIAGNRYASHPVGKALSDACMGTIASFLSKYQDIIIEHQKVVKGNQKRLESLRELAGKENLEYPSVTLPPQPHTKEGVDAYNEVIARVRMWVNLNLWQKLKLSRDDAKPLLRLKGFPSFPLVERQANEVDWWDMVCNVKKLINEKKEDGKVFWQNLAGYKRQEALRPYLSSEEDRKKGKKFARYQLGDLLLHLEKKHGEDWGKVYDEAWERIDKKVEGLSKHIKLEEERRSEDAQSKAALTDWLRAKASFVIEGLKEADKDEFCRCELKLQKWYGDLRGKPFAIEAENSILDISGFSKQYNCAFIWQKDGVKKLNLYLIINYFKGGKLRFKKIKPEAFEANRFYTVINKKSGEIVPMEVNFNFDDPNLIILPLAFGKRQGREFIWNDLLSLETGSLKLANGRVIEKTLYNRRTRQDEPALFVALTFERREVLDSSNIKPMNLIGVDRGENIPAVIALTDPEGCPLSRFKDSLGNPTHILRIGESYKEKQRTIQAKKEVEQRRAGGYSRKYASKAKNLADDMVRNTARDLLYYAVTQDAMLIFENLSRGFGRQGKRTFMAERQYTRMEDWLTAKLAYEGLPSKTYLSKTLAQYTSKTCSNCGFTITSADYDRVLEKLKKTATGWMTTINGKELKVEGQITYYNRYKRQNVVKDLSVELDRLSEESVNNDISSWTKGRSGEALSLLKKRFSHRPVQEKFVCLNCGFETHADEQAALNIARSWLFLRSQEYKKYQTNKTTGNTDKRAFVETWQSFYRKKLKEVWKPAV

SEQ ID NO: 34854 - protein, 979 aa, synthetic construct
  REGION 1..979: note = engineered CasX variant
QEIKRINKIRRRLVKDSNTKKAGKTGPMKTLLVRVMTPDLRERLENLRKKPENIPQPISNTSRANLNKLLTDYTEMKKAILHVYWEEFQKDPVGLMSRVAQPASKKIDQNKLKPEMDEKGNLTTAGFACSQCGQPLFVYKLEQVSEKGKAYTNYFGRCNVAEHEKLILLYDQLKPEKDSDEAVTYSLGKFGQRALDFYSIHVTKESTHPVKPLAQIAGNRYASSPVGKALSDACMGTIASFLSKYQDIIIEHQKVVKGNQKRLESLRELAGKENLEYPSVTLPPQPHTKEGVDAYNEVIARVRMWVNLNLWQKLKLSRDDAKPLLRLKGFPSFPLVERQANEVDWWDMVCNVKKLINEKKEDGKVFWQNLAGYKRQEALRPYLSSEEDRKKGKKFARYQLGDLLLHLEKKHGEDWGKVYDEAWERIDKKVEGLSKHIKLEEERRSEDAQSKAALTDWLRAKASFVIEGLKEADKDEFCRCELKLQKWYGDLRGKPFAIEAENSILDISGFSKQYNCAFIWQKDGVKKLNLYLIINYFKGGKLRFKKIKPEAFEANRFYTVINKKSGEIVPMEVNFNFDDPNLIILPLAFGKRQGREFIWNDLLSLETGSLKLANGRVIEKTLYNRRTRQDEPALFVALTFERREVLDSSNIKPMNLIGVDRGENIPAVIALTDPEGCPLSRFKDSLGNPTHILRIGESYKEKQRTIQAKKEVEQRRAGGYSRKYASKAKNLADDMVRNTARDLLYYAVTQDAMLIFENLSRGFGRQGKRTFMAERQYTRMEDWLTAKLAYEGLPSKTYLSKTLAQYTSKTCSNCGFTITSADYDRVLEKLKKTATGWMTTINGKELKVEGQITYYNRYKRQNVVKDLSVELDRLSEESVNNDISSWTKGRSGEALSLLKKRFSHRPVQEKFVCLNCGFETHADEQAALNIARSWLFLRSQEYKKYQTNKTTGNTDKRAFVETWQSFYRKKLKEVWKPAV

SEQ ID NO: 34855 - protein, 979 aa, synthetic construct
  REGION 1..979: note = engineered CasX variant
QEIKRINKIRRRLVKDSNTKKAGKTGPMKTLLVRVMTPDLRERLENLRKKPENIPQPISNTSRANLNKLLTDYTEMKKAILHVYWEEFQKDPVGLMSRVAQPASKKIDQNKLKPEMDEKGNLTTAGFACSQCGQPLFVYKLEQVSEKGKAYTNYFGRCNVAEHEKLILLYDQLKPEKDSDEAVTYSLGKFGQRALDFYSIHVTKESTHPVKPLAQIAGNRYASTPVGKALSDACMGTIASFLSKYQDIIIEHQKVVKGNQKRLESLRELAGKENLEYPSVTLPPQPHTKEGVDAYNEVIARVRMWVNLNLWQKLKLSRDDAKPLLRLKGFPSFPLVERQANEVDWWDMVCNVKKLINEKKEDGKVFWQNLAGYKRQEALRPYLSSEEDRKKGKKFARYQLGDLLLHLEKKHGEDWGKVYDEAWERIDKKVEGLSKHIKLEEERRSEDAQSKAALTDWLRAKASFVIEGLKEADKDEFCRCELKLQKWYGDLRGKPFAIEAENSILDISGFSKQYNCAFIWQKDGVKKLNLYLIINYFKGGKLRFKKIKPEAFEANRFYTVINKKSGEIVPMEVNFNFDDPNLIILPLAFGKRQGREFIWNDLLSLETGSLKLANGRVIEKTLYNRRTRQDEPALFVALTFERREVLDSSNIKPMNLIGVDRGENIPAVIALTDPEGCPLSRFKDSLGNPTHILRIGESYKEKQRTIQAKKEVEQRRAGGYSRKYASKAKNLADDMVRNTARDLLYYAVTQDAMLIFENLSRGFGRQGKRTFMAERQYTRMEDWLTAKLAYEGLPSKTYLSKTLAQYTSKTCSNCGFTITSADYDRVLEKLKKTATGWMTTINGKELKVEGQITYYNRYKRQNVVKDLSVELDRLSEESVNNDISSWTKGRSGEALSLLKKRFSHRPVQEKFVCLNCGFETHADEQAALNIARSWLFLRSQEYKKYQTNKTTGNTDKRAFVETWQSFYRKKLKEVWKPAV

SEQ ID NO: 34856 - protein, 979 aa, synthetic construct
  REGION 1..979: note = engineered CasX variant
QEIKRINKIRRRLVKDSNTKKAGKTGPMKTLLVRVMTPDLRERLENLRKKPENIPQPISNTSRANLNKLLTDYTEMKKAILHVYWEEFQKDPVGLMSRVAQPASKKIDQNKLKPEMDEKGNLTTAGFACSQCGQPLFVYKLEQVSEKGKAYTNYFGRCNVAEHEKLILLYDQLKPEKDSDEAVTYSLGKFGQRALDFYSIHVTKESTHPVKPLAQIAGNRYASAPVGKALSDACMGTIASFLSKYQDIIIEHQKVVKGNQKRLESLRELAGKENLEYPSVTLPPQPHTKEGVDAYNEVIARVRMWVNLNLWQKLKLSRDDAKPLLRLKGFPSFPLVERQANEVDWWDMVCNVKKLINEKKEDGKVFWQNLAGYKRQEALRPYLSSEEDRKKGKKFARYQLGDLLLHLEKKHGEDWGKVYDEAWERIDKKVEGLSKHIKLEEERRSEDAQSKAALTDWLRAKASFVIEGLKEADKDEFCRCELKLQKWYGDLRGKPFAIEAENSILDISGFSKQYNCAFIWQKDGVKKLNLYLIINYFKGGKLRFKKIKPEAFEANRFYTVINKKSGEIVPMEVNFNFDDPNLIILPLAFGKRQGREFIWNDLLSLETGSLKLANGRVIEKTLYNRRTRQDEPALFVALTFERREVLDSSNIKPMNLIGVDRGENIPAVIALTDPEGCPLSRFKDSLGNPTHILRIGESYKEKQRTIQAKKEVEQRRAGGYSRKYASKAKNLADDMVRNTARDLLYYAVTQDAMLIFENLSRGFGRQGKRTFMAERQYTRMEDWLTAKLAYEGLPSKTYLSKTLAQYTSKTCSNCGFTITSADYDRVLEKLKKTATGWMTTINGKELKVEGQITYYNRYKRQNVVKDLSVELDRLSEESVNNDISSWTKGRSGEALSLLKKRFSHRPVQEKFVCLNCGFETHADEQAALNIARSWLFLRSQEYKKYQTNKTTGNTDKRAFVETWQSFYRKKLKEVWKPAV

SEQ ID NO: 34857 - protein, 979 aa, synthetic construct
  REGION 1..979: note = engineered CasX variant
QEIKRINKIRRRLVKDSNTKKAGKTGPMKTLLVRVMTPDLRERLENLRKKPENIPQPISNTSRANLNKLLTDYTEMKKAILHVYWEEFQKDPVGLMSRVAQPASKKIDQNKLKPEMDEKGNLTTAGFACSQCGQPLFVYKLEQVSEKGKAYTNYFGRCNVAEHEKLILLYDQLKPEKDSDEAVTYSLGKFGQRALDFYSIHVTKESTHPVKPLAQIAGNRYASVPVGKALSDACMGTIASFLSKYQDIIIEHQKVVKGNQKRLESLRELAGKENLEYPSVTLPPQPHTKEGVDAYNEVIARVRMWVNLNLWQKLKLSRDDAKPLLRLKGFPSFPLVERQANEVDWWDMVCNVKKLINEKKEDGKVFWQNLAGYKRQEALRPYLSSEEDRKKGKKFARYQLGDLLLHLEKKHGEDWGKVYDEAWERIDKKVEGLSKHIKLEEERRSEDAQSKAALTDWLRAKASFVIEGLKEADKDEFCRCELKLQKWYGDLRGKPFAIEAENSILDISGFSKQYNCAFIWQKDGVKKLNLYLIINYFKGGKLRFKKIKPEAFEANRFYTVINKKSGEIVPMEVNFNFDDPNLIILPLAFGKRQGREFIWNDLLSLETGSLKLANGRVIEKTLYNRRTRQDEPALFVALTFERREVLDSSNIKPMNLIGVDRGENIPAVIALTDPEGCPLSRFKDSLGNPTHILRIGESYKEKQRTIQAKKEVEQRRAGGYSRKYASKAKNLADDMVRNTARDLLYYAVTQDAMLIFENLSRGFGRQGKRTFMAERQYTRMEDWLTAKLAYEGLPSKTYLSKTLAQYTSKTCSNCGFTITSADYDRVLEKLKKTATGWMTTINGKELKVEGQITYYNRYKRQNVVKDLSVELDRLSEESVNNDISSWTKGRSGEALSLLKKRFSHRPVQEKFVCLNCGFETHADEQAALNIARSWLFLRSQEYKKYQTNKTTGNTDKRAFVETWQSFYRKKLKEVWKPAV

SEQ ID NO: 34858 - protein, 979 aa, synthetic construct
  REGION 1..979: note = engineered CasX variant
QEIKRINKIRRRLVKDSNTKKAGKTGPMKTLLVRVMTPDLRERLENLRKKPENIPQPISNTSRANLNKLLTDYTEMKKAILHVYWEEFQKDPVGLMSRVAQPASKKIDQNKLKPEMDEKGNLTTAGFACSQCGQPLFVYKLEQVSEKGKAYTNYFGRCNVAEHEKLIKLYDQLKPEKDSDEAVTYSLGKFGQRALDFYSIHVTKESTHPVKPLAQIAGNRYASGPVGKALSDACMGTIASFLSKYQDIIIEHQKVVKGNQKRLESLRELAGKENLEYPSVTLPPQPHTKEGVDAYNEVIARVRMWVNLNLWQKLKLSRDDAKPLLRLKGFPSFPLVERQANEVDWWDMVCNVKKLINEKKEDGKVFWQNLAGYKRQEALRPYLSSEEDRKKGKKFARYQLGDLLLHLEKKHGEDWGKVYDEAWERIDKKVEGLSKHIKLEEERRSEDAQSKAALTDWLRAKASFVIEGLKEADKDEFCRCELKLQKWYGDLRGKPFAIEAENSILDISGFSKQYNCAFIWQKDGVKKLNLYLIINYFKGGKLRFKKIKPEAFEANRFYTVINKKSGEIVPMEVNFNFDDPNLIILPLAFGKRQGREFIWNDLLSLETGSLKLANGRVIEKTLYNRRTRQDEPALFVALTFERREVLDSSNIKPMNLIGVDRGENIPAVIALTDPEGCPLSRFKDSLGNPTHILRIGESYKEKQRTIQAKKEVEQRRAGGYSRKYASKAKNLADDMVRNTARDLLYYAVTQDAMLIFENLSRGFGRQGKRTFMAERQYTRMEDWLTAKLAYEGLPSKTYLSKTLAQYTSKTCSNCGFTITSADYDRVLEKLKKTATGWMTTINGKELKVEGQITYYNRYKRQNVVKDLSVELDRLSEESVNNDISSWTKGRSGEALSLLKKRFSHRPVQEKFVCLNCGFETHADEQAALNIARSWLFLRSQEYKKYQTNKTTGNTDKRAFVETWQSFYRKKLKEVWKPAV

SEQ ID NO: 34859 - protein, 978 aa, synthetic construct
  REGION 1..978: note = engineered CasX variant
QEIKRINKIRRRLVKDSNTKKAGKTGPMKTLLVRVMTPDLRERLENLRKKPENIPQPISNTSRANLNKLLTDYTEMKKAILHVYWEEFQKDPVGLMSRVAQPASKKIDQNKLKPEMDEKGNLTTAGFACSQCGQPLFVYKLEQVSEKGKAYTNYFGRCNVAEHEKLILLYDQLKPEKDSDEAVTYSLGKFGQRALDFYSIHVTKESTHPVKPLAQIAGNRYASPVGKALSDACMGTIASFLSKYQDIIIEHQKVVKGNQKRLESLRELAGKENLEYPSVTLPPQPHTKEGVDAYNEVIARVRMWVNLNLWQKLKLSRDDAKPLLRLKGFPSFPLVERQANEVDWWDMVCNVKKLINEKKEDGKVFWQNLAGYKRQEALRPYLSSEEDRKKGKKFARYQLGDLLLHLEKKHGEDWGKVYDEAWERIDKKVEGLSKHIKLEEERRSEDAQSKAALTDWLRAKASFVIEGLKEADKDEFCRCELKLQKWYGDLRGKPFAIEAENSILDISGFSKQYNCAFIWQKDGVKKLNLYLIINYFKGGKLRFKKIKPEAFEANRFYTVINKKSGEIVPMEVNFNFDDPNLIILPLAFGKRQGREFIWNDLLSLETGSLKLANGRVIEKTLYNRRTRQDEPALFVALTFERREVLDSSNIKPMNLIGVDRGENIPAVIALTDPEGCPLSRFKDSLGNPTHILRIGESYKEKQRTIQAKKEVEQRRAGGYSRKYASKAKNLADDMVRNTARDLLYYAVTQDAMLIFENLSRGFGRQGKRTFMAERQYTRMEDWLTAKLAYEGLPSKTYLSKTLAQYTSKTCSNCGFTITSADYDRVLEKLKKTATGWMTTINGKELKVEGQITYYNRYKRQNVVKDLSVELDRLSEESVNNDISSWTKGRSGEALSLLKKRFSHRPVQEKFVCLNCGFETHADEQAALNIARSWLFLRSQEYKKYQTNKTTGNTDKRAFVETWQSFYRKKLKEVWKPAV

SEQ ID NO: 34860 - protein, 979 aa, synthetic construct
  REGION 1..979: note = engineered CasX variant
QEIKRINKIRRRLVKDSNTKKAGKTGPMKTLLVRVMTPDLRERLENLRKKPENIPQPISNTSRANLNKLLTDYTEMKKAILHVYWEEFQKDPVGLMSRVAQPASKKIDQNKLKPEMDEKGNLTTAGFACSQCGQPLFVYKLEQVSEKGKAYTNYFGRCNVAEHEKLILLYSQLKPEKDSDEAVTYSLGKFGQRALDFYSIHVTKESTHPVKPLAQIAGNRYASYPVGKALSDACMGTIASFLSKYQDIIIEHQKVVKGNQKRLESLRELAGKENLEYPSVTLPPQPHTKEGVDAYNEVIARVRMWVNLNLWQKLKLSRDDAKPLLRLKGFPSFPLVERQANEVDWWDMVCNVKKLINEKKEDGKVFWQNLAGYKRQEALRPYLSSEEDRKKGKKFARYQLGDLLLHLEKKHGEDWGKVYDEAWERIDKKVEGLSKHIKLEEERRSEDAQSKAALTDWLRAKASFVIEGLKEADKDEFCRCELKLQKWYGDLRGKPFAIEAENSILDISGFSKQYNCAFIWQKDGVKKLNLYLIINYFKGGKLRFKKIKPEAFEANRFYTVINKKSGEIVPMEVNFNFDDPNLIILPLAFGKRQGREFIWNDLLSLETGSLKLANGRVIEKTLYNRRTRQDEPALFVALTFERREVLDSSNIKPMNLIGVDRGENIPAVIALTDPEGCPLSRFKDSLGNPTHILRIGESYKEKQRTIQAKKEVEQRRAGGYSRKYASKAKNLADDMVRNTARDLLYYAVTQDAMLIFENLSRGFGRQGKRTFMAERQYTRMEDWLTAKLAYEGLPSKTYLSKTLAQYTSKTCSNCGFTITSADYDRVLEKLKKTATGWMTTINGKELKVEGQITYYNRYKRQNVVKDLSVELDRLSEESVNNDISSWTKGRSGEALSLLKKRFSHRPVQEKFVCLNCGFETHADEQAALNIARSWLFLRSQEYKKYQTNKTTGNTDKRAFVETWQSFYRKKLKEVWKPAV

SEQ ID NO: 34861 - protein, 979 aa, synthetic construct
  REGION 1..979: note = engineered CasX variant
QEIKRINKIRRRLVKDSNTKKAGKTGPMKTLLVRVMTPDLRERLENLRKKPENIPQPISNTSRANLNKLLTDYTEMKKAILHVYWEEFQKDPVGLMSRVAQPASKKIDQNKLKPEMDEKGNLTTAGFACSQCGQPLFVYKLEQVSEKGKAYTNYFGRCNVAEHEKLILLYSQLKPEKDSDEAVTYSLGKFGQRALDFYSIHVTKESTHPVKPLAQIAGNRYASHPVGKALSDACMGTIASFLSKYQDIIIEHQKVVKGNQKRLESLRELAGKENLEYPSVTLPPQPHTKEGVDAYNEVIARVRMWVNLNLWQKLKLSRDDAKPLLRLKGFPSFPLVERQANEVDWWDMVCNVKKLINEKKEDGKVFWQNLAGYKRQEALRPYLSSEEDRKKGKKFARYQLGDLLLHLEKKHGEDWGKVYDEAWERIDKKVEGLSKHIKLEEERRSEDAQSKAALTDWLRAKASFVIEGLKEADKDEFCRCELKLQKWYGDLRGKPFAIEAENSILDISGFSKQYNCAFIWQKDGVKKLNLYLIINYFKGGKLRFKKIKPEAFEANRFYTVINKKSGEIVPMEVNFNFDDPNLIILPLAFGKRQGREFIWNDLLSLETGSLKLANGRVIEKTLYNRRTRQDEPALFVALTFERREVLDSSNIKPMNLIGVDRGENIPAVIALTDPEGCPLSRFKDSLGNPTHILRIGESYKEKQRTIQAKKEVEQRRAGGYSRKYASKAKNLADDMVRNTARDLLYYAVTQDAMLIFENLSRGFGRQGKRTFMAERQYTRMEDWLTAKLAYEGLPSKTYLSKTLAQYTSKTCSNCGFTITSADYDRVLEKLKKTATGWMTTINGKELKVEGQITYYNRYKRQNVVKDLSVELDRLSEESVNNDISSWTKGRSGEALSLLKKRFSHRPVQEKFVCLNCGFETHADEQAALNIARSWLFLRSQEYKKYQTNKTTGNTDKRAFVETWQSFYRKKLKEVWKPAV

SEQ ID NO: 34862 - protein, 979 aa, synthetic construct
  REGION 1..979: note = engineered CasX variant
QEIKRINKIRRRLVKDSNTKKAGKTGPMKTLLVRVMTPDLRERLENLRKKPENIPQPISNTSRANLNKLLTDYTEMKKAILHVYWEEFQKDPVGLMSRVAQPASKKIDQNKLKPEMDEKGNLTTAGFACSQCGQPLFVYKLEQVSEKGKAYTNYFGRCNVAEHEKLILLYSQLKPEKDSDEAVTYSLGKFGQRALDFYSIHVTKESTHPVKPLAQIAGNRYASSPVGKALSDACMGTIASFLSKYQDIIIEHQKVVKGNQKRLESLRELAGKENLEYPSVTLPPQPHTKEGVDAYNEVIARVRMWVNLNLWQKLKLSRDDAKPLLRLKGFPSFPLVERQANEVDWWDMVCNVKKLINEKKEDGKVFWQNLAGYKRQEALRPYLSSEEDRKKGKKFARYQLGDLLLHLEKKHGEDWGKVYDEAWERIDKKVEGLSKHIKLEEERRSEDAQSKAALTDWLRAKASFVIEGLKEADKDEFCRCELKLQKWYGDLRGKPFAIEAENSILDISGFSKQYNCAFIWQKDGVKKLNLYLIINYFKGGKLRFKKIKPEAFEANRFYTVINKKSGEIVPMEVNFNFDDPNLIILPLAFGKRQGREFIWNDLLSLETGSLKLANGRVIEKTLYNRRTRQDEPALFVALTFERREVLDSSNIKPMNLIGVDRGENIPAVIALTDPEGCPLSRFKDSLGNPTHILRIGESYKEKQRTIQAKKEVEQRRAGGYSRKYASKAKNLADDMVRNTARDLLYYAVTQDAMLIFENLSRGFGRQGKRTFMAERQYTRMEDWLTAKLAYEGLPSKTYLSKTLAQYTSKTCSNCGFTITSADYDRVLEKLKKTATGWMTTINGKELKVEGQITYYNRYKRQNVVKDLSVELDRLSEESVNNDISSWTKGRSGEALSLLKKRFSHRPVQEKFVCLNCGFETHADEQAALNIARSWLFLRSQEYKKYQTNKTTGNTDKRAFVETWQSFYRKKLKEVWKPAV

SEQ ID NO: 34863 - protein, 979 aa, synthetic construct
  REGION 1..979: note = engineered CasX variant
QEIKRINKIRRRLVKDSNTKKAGKTGPMKTLLVRVMTPDLRERLENLRKKPENIPQPISNTSRANLNKLLTDYTEMKKAILHVYWEEFQKDPVGLMSRVAQPASKKIDQNKLKPEMDEKGNLTTAGFACSQCGQPLFVYKLEQVSEKGKAYTNYFGRCNVAEHEKLILLYSQLKPEKDSDEAVTYSLGKFGQRALDFYSIHVTKESTHPVKPLAQIAGNRYASTPVGKALSDACMGTIASFLSKYQDIIIEHQKVVKGNQKRLESLRELAGKENLEYPSVTLPPQPHTKEGVDAYNEVIARVRMWVNLNLWQKLKLSRDDAKPLLRLKGFPSFPLVERQANEVDWWDMVCNVKKLINEKKEDGKVFWQNLAGYKRQEALRPYLSSEEDRKKGKKFARYQLGDLLLHLEKKHGEDWGKVYDEAWERIDKKVEGLSKHIKLEEERRSEDAQSKAALTDWLRAKASFVIEGLKEADKDEFCRCELKLQKWYGDLRGKPFAIEAENSILDISGFSKQYNCAFIWQKDGVKKLNLYLIINYFKGGKLRFKKIKPEAFEANRFYTVINKKSGEIVPMEVNFNFDDPNLIILPLAFGKRQGREFIWNDLLSLETGSLKLANGRVIEKTLYNRRTRQDEPALFVALTFERREVLDSSNIKPMNLIGVDRGENIPAVIALTDPEGCPLSRFKDSLGNPTHILRIGESYKEKQRTIQAKKEVEQRRAGGYSRKYASKAKNLADDMVRNTARDLLYYAVTQDAMLIFENLSRGFGRQGKRTFMAERQYTRMEDWLTAKLAYEGLPSKTYLSKTLAQYTSKTCSNCGFTITSADYDRVLEKLKKTATGWMTTINGKELKVEGQITYYNRYKRQNVVKDLSVELDRLSEESVNNDISSWTKGRSGEALSLLKKRFSHRPVQEKFVCLNCGFETHADEQAALNIARSWLFLRSQEYKKYQTNKTTGNTDKRAFVETWQSFYRKKLKEVWKPAV

SEQ ID NO: 34864 - protein, 979 aa, synthetic construct
  REGION 1..979: note = engineered CasX variant
QEIKRINKIRRRLVKDSNTKKAGKTGPMKTLLVRVMTPDLRERLENLRKKPENIPQPISNTSRANLNKLLTDYTEMKKAILHVYWEEFQKDPVGLMSRVAQPASKKIDQNKLKPEMDEKGNLTTAGFACSQCGQPLFVYKLEQVSEKGKAYTNYFGRCNVAEHEKLILLYSQLKPEKDSDEAVTYSLGKFGQRALDFYSIHVTKESTHPVKPLAQIAGNRYASAPVGKALSDACMGTIASFLSKYQDIIIEHQKVVKGNQKRLESLRELAGKENLEYPSVTLPPQPHTKEGVDAYNEVIARVRMWVNLNLWQKLKLSRDDAKPLLRLKGFPSFPLVERQANEVDWWDMVCNVKKLINEKKEDGKVFWQNLAGYKRQEALRPYLSSEEDRKKGKKFARYQLGDLLLHLEKKHGEDWGKVYDEAWERIDKKVEGLSKHIKLEEERRSEDAQSKAALTDWLRAKASFVIEGLKEADKDEFCRCELKLQKWYGDLRGKPFAIEAENSILDISGFSKQYNCAFIWQKDGVKKLNLYLIINYFKGGKLRFKKIKPEAFEANRFYTVINKKSGEIVPMEVNFNFDDPNLIILPLAFGKRQGREFIWNDLLSLETGSLKLANGRVIEKTLYNRRTRQDEPALFVALTFERREVLDSSNIKPMNLIGVDRGENIPAVIALTDPEGCPLSRFKDSLGNPTHILRIGESYKEKQRTIQAKKEVEQRRAGGYSRKYASKAKNLADDMVRNTARDLLYYAVTQDAMLIFENLSRGFGRQGKRTFMAERQYTRMEDWLTAKLAYEGLPSKTYLSKTLAQYTSKTCSNCGFTITSADYDRVLEKLKKTATGWMTTINGKELKVEGQITYYNRYKRQNVVKDLSVELDRLSEESVNNDISSWTKGRSGEALSLLKKRFSHRPVQEKFVCLNCGFETHADEQAALNIARSWLFLRSQEYKKYQTNKTTGNTDKRAFVETWQSFYRKKLKEVWKPAV

SEQ ID NO: 34865 - protein, 979 aa, synthetic construct
  REGION 1..979: note = engineered CasX variant
QEIKRINKIRRRLVKDSNTKKAGKTGPMKTLLVRVMTPDLRERLENLRKKPENIPQPISNTSRANLNKLLTDYTEMKKAILHVYWEEFQKDPVGLMSRVAQPASKKIDQNKLKPEMDEKGNLTTAGFACSQCGQPLFVYKLEQVSEKGKAYTNYFGRCNVAEHEKLILLYSQLKPEKDSDEAVTYSLGKFGQRALDFYSIHVTKESTHPVKPLAQIAGNRYASVPVGKALSDACMGTIASFLSKYQDIIIEHQKVVKGNQKRLESLRELAGKENLEYPSVTLPPQPHTKEGVDAYNEVIARVRMWVNLNLWQKLKLSRDDAKPLLRLKGFPSFPLVERQANEVDWWDMVCNVKKLINEKKEDGKVFWQNLAGYKRQEALRPYLSSEEDRKKGKKFARYQLGDLLLHLEKKHGEDWGKVYDEAWERIDKKVEGLSKHIKLEEERRSEDAQSKAALTDWLRAKASFVIEGLKEADKDEFCRCELKLQKWYGDLRGKPFAIEAENSILDISGFSKQYNCAFIWQKDGVKKLNLYLIINYFKGGKLRFKKIKPEAFEANRFYTVINKKSGEIVPMEVNFNFDDPNLIILPLAFGKRQGREFIWNDLLSLETGSLKLANGRVIEKTLYNRRTRQDEPALFVALTFERREVLDSSNIKPMNLIGVDRGENIPAVIALTDPEGCPLSRFKDSLGNPTHILRIGESYKEKQRTIQAKKEVEQRRAGGYSRKYASKAKNLADDMVRNTARDLLYYAVTQDAMLIFENLSRGFGRQGKRTFMAERQYTRMEDWLTAKLAYEGLPSKTYLSKTLAQYTSKTCSNCGFTITSADYDRVLEKLKKTATGWMTTINGKELKVEGQITYYNRYKRQNVVKDLSVELDRLSEESVNNDISSWTKGRSGEALSLLKKRFSHRPVQEKFVCLNCGFETHADEQAALNIARSWLFLRSQEYKKYQTNKTTGNTDKRAFVETWQSFYRKKLKEVWKPAV

SEQ ID NO: 34866 - protein, 979 aa, synthetic construct
  REGION 1..979: note = engineered CasX variant
QEIKRINKIRRRLVKDSNTKKAGKTGPMKTLLVRVMTPDLRERLENLRKKPENIPQPISNTSRANLNKLLTDYTEMKKAILHVYWEEFQKDPVGLMSRVAQPASKKIDQNKLKPEMDEKGNLTTAGFACSQCGQPLFVYKLEQVSEKGKAYTNYFGRCNVAEHEKLIKLYSQLKPEKDSDEAVTYSLGKFGQRALDFYSIHVTKESTHPVKPLAQIAGNRYASGPVGKALSDACMGTIASFLSKYQDIIIEHQKVVKGNQKRLESLRELAGKENLEYPSVTLPPQPHTKEGVDAYNEVIARVRMWVNLNLWQKLKLSRDDAKPLLRLKGFPSFPLVERQANEVDWWDMVCNVKKLINEKKEDGKVFWQNLAGYKRQEALRPYLSSEEDRKKGKKFARYQLGDLLLHLEKKHGEDWGKVYDEAWERIDKKVEGLSKHIKLEEERRSEDAQSKAALTDWLRAKASFVIEGLKEADKDEFCRCELKLQKWYGDLRGKPFAIEAENSILDISGFSKQYNCAFIWQKDGVKKLNLYLIINYFKGGKLRFKKIKPEAFEANRFYTVINKKSGEIVPMEVNFNFDDPNLIILPLAFGKRQGREFIWNDLLSLETGSLKLANGRVIEKTLYNRRTRQDEPALFVALTFERREVLDSSNIKPMNLIGVDRGENIPAVIALTDPEGCPLSRFKDSLGNPTHILRIGESYKEKQRTIQAKKEVEQRRAGGYSRKYASKAKNLADDMVRNTARDLLYYAVTQDAMLIFENLSRGFGRQGKRTFMAERQYTRMEDWLTAKLAYEGLPSKTYLSKTLAQYTSKTCSNCGFTITSADYDRVLEKLKKTATGWMTTINGKELKVEGQITYYNRYKRQNVVKDLSVELDRLSEESVNNDISSWTKGRSGEALSLLKKRFSHRPVQEKFVCLNCGFETHADEQAALNIARSWLFLRSQEYKKYQTNKTTGNTDKRAFVETWQSFYRKKLKEVWKPAV

SEQ ID NO: 34867 - protein, 978 aa, synthetic construct
  REGION 1..978: note = engineered CasX variant
QEIKRINKIRRRLVKDSNTKKAGKTGPMKTLLVRVMTPDLRERLENLRKKPENIPQPISNTSRANLNKLLTDYTEMKKAILHVYWEEFQKDPVGLMSRVAQPASKKIDQNKLKPEMDEKGNLTTAGFACSQCGQPLFVYKLEQVSEKGKAYTNYFGRCNVAEHEKLILLYSQLKPEKDSDEAVTYSLGKFGQRALDFYSIHVTKESTHPVKPLAQIAGNRYASPVGKALSDACMGTIASFLSKYQDIIIEHQKVVKGNQKRLESLRELAGKENLEYPSVTLPPQPHTKEGVDAYNEVIARVRMWVNLNLWQKLKLSRDDAKPLLRLKGFPSFPLVERQANEVDWWDMVCNVKKLINEKKEDGKVFWQNLAGYKRQEALRPYLSSEEDRKKGKKFARYQLGDLLLHLEKKHGEDWGKVYDEAWERIDKKVEGLSKHIKLEEERRSEDAQSKAALTDWLRAKASFVIEGLKEADKDEFCRCELKLQKWYGDLRGKPFAIEAENSILDISGFSKQYNCAFIWQKDGVKKLNLYLIINYFKGGKLRFKKIKPEAFEANRFYTVINKKSGEIVPMEVNFNFDDPNLIILPLAFGKRQGREFIWNDLLSLETGSLKLANGRVIEKTLYNRRTRQDEPALFVALTFERREVLDSSNIKPMNLIGVDRGENIPAVIALTDPEGCPLSRFKDSLGNPTHILRIGESYKEKQRTIQAKKEVEQRRAGGYSRKYASKAKNLADDMVRNTARDLLYYAVTQDAMLIFENLSRGFGRQGKRTFMAERQYTRMEDWLTAKLAYEGLPSKTYLSKTLAQYTSKTCSNCGFTITSADYDRVLEKLKKTATGWMTTINGKELKVEGQITYYNRYKRQNVVKDLSVELDRLSEESVNNDISSWTKGRSGEALSLLKKRFSHRPVQEKFVCLNCGFETHADEQAALNIARSWLFLRSQEYKKYQTNKTTGNTDKRAFVETWQSFYRKKLKEVWKPAV

SEQ ID NO: 34868 - protein, 978 aa, synthetic construct
  REGION 1..978: note = engineered CasX variant
QEIKRINKIRRRLVKDSNTKKAGKTGPMKTLLVRVMTPDLRERLENLRKKPENIPQPISNTSRANLNKLLTDYTEMKKAILHVYWEEFQKDPVGLMSRVAQPASKKIDQNKLKPEMDEKGNLTTAGFACSQCGQPLFVYKLEQVSEKGKAYTNYFGRCNVAEHEKLILLYQLKPEKDSDEAVTYSLGKFGQRALDFYSIHVTKESTHPVKPLAQIAGNRYASYPVGKALSDACMGTIASFLSKYQDIIIEHQKVVKGNQKRLESLRELAGKENLEYPSVTLPPQPHTKEGVDAYNEVIARVRMWVNLNLWQKLKLSRDDAKPLLRLKGFPSFPLVERQANEVDWWDMVCNVKKLINEKKEDGKVFWQNLAGYKRQEALRPYLSSEEDRKKGKKFARYQLGDLLLHLEKKHGEDWGKVYDEAWERIDKKVEGLSKHIKLEEERRSEDAQSKAALTDWLRAKASFVIEGLKEADKDEFCRCELKLQKWYGDLRGKPFAIEAENSILDISGFSKQYNCAFIWQKDGVKKLNLYLIINYFKGGKLRFKKIKPEAFEANRFYTVINKKSGEIVPMEVNFNFDDPNLIILPLAFGKRQGREFIWNDLLSLETGSLKLANGRVIEKTLYNRRTRQDEPALFVALTFERREVLDSSNIKPMNLIGVDRGENIPAVIALTDPEGCPLSRFKDSLGNPTHILRIGESYKEKQRTIQAKKEVEQRRAGGYSRKYASKAKNLADDMVRNTARDLLYYAVTQDAMLIFENLSRGFGRQGKRTFMAERQYTRMEDWLTAKLAYEGLPSKTYLSKTLAQYTSKTCSNCGFTITSADYDRVLEKLKKTATGWMTTINGKELKVEGQITYYNRYKRQNVVKDLSVELDRLSEESVNNDISSWTKGRSGEALSLLKKRFSHRPVQEKFVCLNCGFETHADEQAALNIARSWLFLRSQEYKKYQTNKTTGNTDKRAFVETWQSFYRKKLKEVWKPAV

SEQ ID NO: 34869 - protein, 978 aa, synthetic construct
  REGION 1..978: note = engineered CasX variant
QEIKRINKIRRRLVKDSNTKKAGKTGPMKTLLVRVMTPDLRERLENLRKKPENIPQPISNTSRANLNKLLTDYTEMKKAILHVYWEEFQKDPVGLMSRVAQPASKKIDQNKLKPEMDEKGNLTTAGFACSQCGQPLFVYKLEQVSEKGKAYTNYFGRCNVAEHEKLILLYQLKPEKDSDEAVTYSLGKFGQRALDFYSIHVTKESTHPVKPLAQIAGNRYASHPVGKALSDACMGTIASFLSKYQDIIIEHQKVVKGNQKRLESLRELAGKENLEYPSVTLPPQPHTKEGVDAYNEVIARVRMWVNLNLWQKLKLSRDDAKPLLRLKGFPSFPLVERQANEVDWWDMVCNVKKLINEKKEDGKVFWQNLAGYKRQEALRPYLSSEEDRKKGKKFARYQLGDLLLHLEKKHGEDWGKVYDEAWERIDKKVEGLSKHIKLEEERRSEDAQSKAALTDWLRAKASFVIEGLKEADKDEFCRCELKLQKWYGDLRGKPFAIEAENSILDISGFSKQYNCAFIWQKDGVKKLNLYLIINYFKGGKLRFKKIKPEAFEANRFYTVINKKSGEIVPMEVNFNFDDPNLIILPLAFGKRQGREFIWNDLLSLETGSLKLANGRVIEKTLYNRRTRQDEPALFVALTFERREVLDSSNIKPMNLIGVDRGENIPAVIALTDPEGCPLSRFKDSLGNPTHILRIGESYKEKQRTIQAKKEVEQRRAGGYSRKYASKAKNLADDMVRNTARDLLYYAVTQDAMLIFENLSRGFGRQGKRTFMAERQYTRMEDWLTAKLAYEGLPSKTYLSKTLAQYTSKTCSNCGFTITSADYDRVLEKLKKTATGWMTTINGKELKVEGQITYYNRYKRQNVVKDLSVELDRLSEESVNNDISSWTKGRSGEALSLLKKRFSHRPVQEKFVCLNCGFETHADEQAALNIARSWLFLRSQEYKKYQTNKTTGNTDKRAFVETWQSFYRKKLKEVWKPAV

SEQ ID NO: 34870 - protein, 978 aa, synthetic construct
  REGION 1..978: note = engineered CasX variant
QEIKRINKIRRRLVKDSNTKKAGKTGPMKTLLVRVMTPDLRERLENLRKKPENIPQPISNTSRANLNKLLTDYTEMKKAILHVYWEEFQKDPVGLMSRVAQPASKKIDQNKLKPEMDEKGNLTTAGFACSQCGQPLFVYKLEQVSEKGKAYTNYFGRCNVAEHEKLILLYQLKPEKDSDEAVTYSLGKFGQRALDFYSIHVTKESTHPVKPLAQIAGNRYASTPVGKALSDACMGTIASFLSKYQDIIIEHQKVVKGNQKRLESLRELAGKENLEYPSVTLPPQPHTKEGVDAYNEVIARVRMWVNLNLWQKLKLSRDDAKPLLRLKGFPSFPLVERQANEVDWWDMVCNVKKLINEKKEDGKVFWQNLAGYKRQEALRPYLSSEEDRKKGKKFARYQLGDLLLHLEKKHGEDWGKVYDEAWERIDKKVEGLSKHIKLEEERRSEDAQSKAALTDWLRAKASFVIEGLKEADKDEFCRCELKLQKWYGDLRGKPFAIEAENSILDISGFSKQYNCAFIWQKDGVKKLNLYLIINYFKGGKLRFKKIKPEAFEANRFYTVINKKSGEIVPMEVNFNFDDPNLIILPLAFGKRQGREFIWNDLLSLETGSLKLANGRVIEKTLYNRRTRQDEPALFVALTFERREVLDSSNIKPMNLIGVDRGENIPAVIALTDPEGCPLSRFKDSLGNPTHILRIGESYKEKQRTIQAKKEVEQRRAGGYSRKYASKAKNLADDMVRNTARDLLYYAVTQDAMLIFENLSRGFGRQGKRTFMAERQYTRMEDWLTAKLAYEGLPSKTYLSKTLAQYTSKTCSNCGFTITSADYDRVLEKLKKTATGWMTTINGKELKVEGQITYYNRYKRQNVVKDLSVELDRLSEESVNNDISSWTKGRSGEALSLLKKRFSHRPVQEKFVCLNCGFETHADEQAALNIARSWLFLRSQEYKKYQTNKTTGNTDKRAFVETWQSFYRKKLKEVWKPAV

SEQ ID NO: 34871 - protein, 978 aa, synthetic construct
  REGION 1..978: note = engineered CasX variant
QEIKRINKIRRRLVKDSNTKKAGKTGPMKTLLVRVMTPDLRERLENLRKKPENIPQPISNTSRANLNKLLTDYTEMKKAILHVYWEEFQKDPVGLMSRVAQPASKKIDQNKLKPEMDEKGNLTTAGFACSQCGQPLFVYKLEQVSEKGKAYTNYFGRCNVAEHEKLILLYQLKPEKDSDEAVTYSLGKFGQRALDFYSIHVTKESTHPVKPLAQIAGNRYASAPVGKALSDACMGTIASFLSKYQDIIIEHQKVVKGNQKRLESLRELAGKENLEYPSVTLPPQPHTKEGVDAYNEVIARVRMWVNLNLWQKLKLSRDDAKPLLRLKGFPSFPLVERQANEVDWWDMVCNVKKLINEKKEDGKVFWQNLAGYKRQEALRPYLSSEEDRKKGKKFARYQLGDLLLHLEKKHGEDWGKVYDEAWERIDKKVEGLSKHIKLEEERRSEDAQSKAALTDWLRAKASFVIEGLKEADKDEFCRCELKLQKWYGDLRGKPFAIEAENSILDISGFSKQYNCAFIWQKDGVKKLNLYLIINYFKGGKLRFKKIKPEAFEANRFYTVINKKSGEIVPMEVNFNFDDPNLIILPLAFGKRQGREFIWNDLLSLETGSLKLANGRVIEKTLYNRRTRQDEPALFVALTFERREVLDSSNIKPMNLIGVDRGENIPAVIALTDPEGCPLSRFKDSLGNPTHILRIGESYKEKQRTIQAKKEVEQRRAGGYSRKYASKAKNLADDMVRNTARDLLYYAVTQDAMLIFENLSRGFGRQGKRTFMAERQYTRMEDWLTAKLAYEGLPSKTYLSKTLAQYTSKTCSNCGFTITSADYDRVLEKLKKTATGWMTTINGKELKVEGQITYYNRYKRQNVVKDLSVELDRLSEESVNNDISSWTKGRSGEALSLLKKRFSHRPVQEKFVCLNCGFETHADEQAALNIARSWLFLRSQEYKKYQTNKTTGNTDKRAFVETWQSFYRKKLKEVWKPAV

SEQ ID NO: 34872 - protein, 978 aa, synthetic construct
  REGION 1..978: note = engineered CasX variant
QEIKRINKIRRRLVKDSNTKKAGKTGPMKTLLVRVMTPDLRERLENLRKKPENIPQPISNTSRANLNKLLTDYTEMKKAILHVYWEEFQKDPVGLMSRVAQPASKKIDQNKLKPEMDEKGNLTTAGFACSQCGQPLFVYKLEQVSEKGKAYTNYFGRCNVAEHEKLILLYQLKPEKDSDEAVTYSLGKFGQRALDFYSIHVTKESTHPVKPLAQIAGNRYASVPVGKALSDACMGTIASFLSKYQDIIIEHQKVVKGNQKRLESLRELAGKENLEYPSVTLPPQPHTKEGVDAYNEVIARVRMWVNLNLWQKLKLSRDDAKPLLRLKGFPSFPLVERQANEVDWWDMVCNVKKLINEKKEDGKVFWQNLAGYKRQEALRPYLSSEEDRKKGKKFARYQLGDLLLHLEKKHGEDWGKVYDEAWERIDKKVEGLSKHIKLEEERRSEDAQSKAALTDWLRAKASFVIEGLKEADKDEFCRCELKLQKWYGDLRGKPFAIEAENSILDISGFSKQYNCAFIWQKDGVKKLNLYLIINYFKGGKLRFKKIKPEAFEANRFYTVINKKSGEIVPMEVNFNFDDPNLIILPLAFGKRQGREFIWNDLLSLETGSLKLANGRVIEKTLYNRRTRQDEPALFVALTFERREVLDSSNIKPMNLIGVDRGENIPAVIALTDPEGCPLSRFKDSLGNPTHILRIGESYKEKQRTIQAKKEVEQRRAGGYSRKYASKAKNLADDMVRNTARDLLYYAVTQDAMLIFENLSRGFGRQGKRTFMAERQYTRMEDWLTAKLAYEGLPSKTYLSKTLAQYTSKTCSNCGFTITSADYDRVLEKLKKTATGWMTTINGKELKVEGQITYYNRYKRQNVVKDLSVELDRLSEESVNNDISSWTKGRSGEALSLLKKRFSHRPVQEKFVCLNCGFETHADEQAALNIARSWLFLRSQEYKKYQTNKTTGNTDKRAFVETWQSFYRKKLKEVWKPAV

SEQ ID NO: 34873 - protein, 978 aa, synthetic construct
  REGION 1..978: note = engineered CasX variant
QEIKRINKIRRRLVKDSNTKKAGKTGPMKTLLVRVMTPDLRERLENLRKKPENIPQPISNTSRANLNKLLTDYTEMKKAILHVYWEEFQKDPVGLMSRVAQPASKKIDQNKLKPEMDEKGNLTTAGFACSQCGQPLFVYKLEQVSEKGKAYTNYFGRCNVAEHEKLILLYQLKPEKDSDEAVTYSLGKFGQRALDFYSIHVTKESTHPVKPLAQIAGNRYASYPVGKALSDACMGTIASFLSKYQDIIIEHQKVVKGNQKRLESLRELAGKENLEYPSVTLPPQPHTSEGVDAYNEVIARVRMWVNLNLWQKLKLSRDDAKPLLRLKGFPSFPLVERQANEVDWWDMVCNVKKLINEKKEDGKVFWQNLAGYKRQEALRPYLSSEEDRKKGKKFARYQLGDLLLHLEKKHGEDWGKVYDEAWERIDKKVEGLSKHIKLEEERRSEDAQSKAALTDWLRAKASFVIEGLKEADKDEFCRCELKLQKWYGDLRGKPFAIEAENSILDISGFSKQYNCAFIWQKDGVKKLNLYLIINYFKGGKLRFKKIKPEAFEANRFYTVINKKSGEIVPMEVNFNFDDPNLIILPLAFGKRQGREFIWNDLLSLETGSLKLANGRVIEKTLYNRRTRQDEPALFVALTFERREVLDSSNIKPMNLIGVDRGENIPAVIALTDPEGCPLSRFKDSLGNPTHILRIGESYKEKQRTIQAKKEVEQRRAGGYSRKYASKAKNLADDMVRNTARDLLYYAVTQDAMLIFENLSRGFGRQGKRTFMAERQYTRMEDWLTAKLAYEGLPSKTYLSKTLAQYTSKTCSNCGFTITSADYDRVLEKLKKTATGWMTTINGKELKVEGQITYYNRYKRQNVVKDLSVELDRLSEESVNNDISSWTKGRSGEALSLLKKRFSHRPVQEKFVCLNCGFETHADEQAALNIARSWLFLRSQEYKKYQTNKTTGNTDKRAFVETWQSFYRKKLKEVWKPAV

SEQ ID NO: 34874 - protein, 978 aa, synthetic construct
  REGION 1..978: note = engineered CasX variant
QEIKRINKIRRRLVKDSNTKKAGKTGPMKTLLVRVMTPDLRERLENLRKKPENIPQPISNTSRANLNKLLTDYTEMKKAILHVYWEEFQKDPVGLMSRVAQPASKKIDQNKLKPEMDEKGNLTTAGFACSQCGQPLFVYKLEQVSEKGKAYTNYFGRCNVAEHEKLILLYQLKPEKDSDEAVTYSLGKFGQRALDFYSIHVTKESTHPVKPLAQIAGNRYASHPVGKALSDACMGTIASFLSKYQDIIIEHQKVVKGNQKRLESLRELAGKENLEYPSVTLPPQPHTSEGVDAYNEVIARVRMWVNLNLWQKLKLSRDDAKPLLRLKGFPSFPLVERQANEVDWWDMVCNVKKLINEKKEDGKVFWQNLAGYKRQEALRPYLSSEEDRKKGKKFARYQLGDLLLHLEKKHGEDWGKVYDEAWERIDKKVEGLSKHIKLEEERRSEDAQSKAALTDWLRAKASFVIEGLKEADKDEFCRCELKLQKWYGDLRGKPFAIEAENSILDISGFSKQYNCAFIWQKDGVKKLNLYLIINYFKGGKLRFKKIKPEAFEANRFYTVINKKSGEIVPMEVNFNFDDPNLIILPLAFGKRQGREFIWNDLLSLETGSLKLANGRVIEKTLYNRRTRQDEPALFVALTFERREVLDSSNIKPMNLIGVDRGENIPAVIALTDPEGCPLSRFKDSLGNPTHILRIGESYKEKQRTIQAKKEVEQRRAGGYSRKYASKAKNLADDMVRNTARDLLYYAVTQDAMLIFENLSRGFGRQGKRTFMAERQYTRMEDWLTAKLAYEGLPSKTYLSKTLAQYTSKTCSNCGFTITSADYDRVLEKLKKTATGWMTTINGKELKVEGQITYYNRYKRQNVVKDLSVELDRLSEESVNNDISSWTKGRSGEALSLLKKRFSHRPVQEKFVCLNCGFETHADEQAALNIARSWLFLRSQEYKKYQTNKTTGNTDKRAFVETWQSFYRKKLKEVWKPAV

SEQ ID NO: 34875 - protein, 978 aa, synthetic construct
  REGION 1..978: note = engineered CasX variant
QEIKRINKIRRRLVKDSNTKKAGKTGPMKTLLVRVMTPDLRERLENLRKKPENIPQPISNTSRANLNKLLTDYTEMKKAILHVYWEEFQKDPVGLMSRVAQPASKKIDQNKLKPEMDEKGNLTTAGFACSQCGQPLFVYKLEQVSEKGKAYTNYFGRCNVAEHEKLILLYQLKPEKDSDEAVTYSLGKFGQRALDFYSIHVTKESTHPVKPLAQIAGNRYASSPVGKALSDACMGTIASFLSKYQDIIIEHQKVVKGNQKRLESLRELAGKENLEYPSVTLPPQPHTSEGVDAYNEVIARVRMWVNLNLWQKLKLSRDDAKPLLRLKGFPSFPLVERQANEVDWWDMVCNVKKLINEKKEDGKVFWQNLAGYKRQEALRPYLSSEEDRKKGKKFARYQLGDLLLHLEKKHGEDWGKVYDEAWERIDKKVEGLSKHIKLEEERRSEDAQSKAALTDWLRAKASFVIEGLKEADKDEFCRCELKLQKWYGDLRGKPFAIEAENSILDISGFSKQYNCAFIWQKDGVKKLNLYLIINYFKGGKLRFKKIKPEAFEANRFYTVINKKSGEIVPMEVNFNFDDPNLIILPLAFGKRQGREFIWNDLLSLETGSLKLANGRVIEKTLYNRRTRQDEPALFVALTFERREVLDSSNIKPMNLIGVDRGENIPAVIALTDPEGCPLSRFKDSLGNPTHILRIGESYKEKQRTIQAKKEVEQRRAGGYSRKYASKAKNLADDMVRNTARDLLYYAVTQDAMLIFENLSRGFGRQGKRTFMAERQYTRMEDWLTAKLAYEGLPSKTYLSKTLAQYTSKTCSNCGFTITSADYDRVLEKLKKTATGWMTTINGKELKVEGQITYYNRYKRQNVVKDLSVELDRLSEESVNNDISSWTKGRSGEALSLLKKRFSHRPVQEKFVCLNCGFETHADEQAALNIARSWLFLRSQEYKKYQTNKTTGNTDKRAFVETWQSFYRKKLKEVWKPAV

SEQ ID NO: 34876 - protein, 978 aa, synthetic construct
  REGION 1..978: note = engineered CasX variant
QEIKRINKIRRRLVKDSNTKKAGKTGPMKTLLVRVMTPDLRERLENLRKKPENIPQPISNTSRANLNKLLTDYTEMKKAILHVYWEEFQKDPVGLMSRVAQPASKKIDQNKLKPEMDEKGNLTTAGFACSQCGQPLFVYKLEQVSEKGKAYTNYFGRCNVAEHEKLILLYQLKPEKDSDEAVTYSLGKFGQRALDFYSIHVTKESTHPVKPLAQIAGNRYASTPVGKALSDACMGTIASFLSKYQDIIIEHQKVVKGNQKRLESLRELAGKENLEYPSVTLPPQPHTSEGVDAYNEVIARVRMWVNLNLWQKLKLSRDDAKPLLRLKGFPSFPLVERQANEVDWWDMVCNVKKLINEKKEDGKVFWQNLAGYKRQEALRPYLSSEEDRKKGKKFARYQLGDLLLHLEKKHGEDWGKVYDEAWERIDKKVEGLSKHIKLEEERRSEDAQSKAALTDWLRAKASFVIEGLKEADKDEFCRCELKLQKWYGDLRGKPFAIEAENSILDISGFSKQYNCAFIWQKDGVKKLNLYLIINYFKGGKLRFKKIKPEAFEANRFYTVINKKSGEIVPMEVNFNFDDPNLIILPLAFGKRQGREFIWNDLLSLETGSLKLANGRVIEKTLYNRRTRQDEPALFVALTFERREVLDSSNIKPMNLIGVDRGENIPAVIALTDPEGCPLSRFKDSLGNPTHILRIGESYKEKQRTIQAKKEVEQRRAGGYSRKYASKAKNLADDMVRNTARDLLYYAVTQDAMLIFENLSRGFGRQGKRTFMAERQYTRMEDWLTAKLAYEGLPSKTYLSKTLAQYTSKTCSNCGFTITSADYDRVLEKLKKTATGWMTTINGKELKVEGQITYYNRYKRQNVVKDLSVELDRLSEESVNNDISSWTKGRSGEALSLLKKRFSHRPVQEKFVCLNCGFETHADEQAALNIARSWLFLRSQEYKKYQTNKTTGNTDKRAFVETWQSFYRKKLKEVWKPAV

SEQ ID NO: 34877 - protein, 978 aa, synthetic construct
  REGION 1..978: note = engineered CasX variant
QEIKRINKIRRRLVKDSNTKKAGKTGPMKTLLVRVMTPDLRERLENLRKKPENIPQPISNTSRANLNKLLTDYTEMKKAILHVYWEEFQKDPVGLMSRVAQPASKKIDQNKLKPEMDEKGNLTTAGFACSQCGQPLFVYKLEQVSEKGKAYTNYFGRCNVAEHEKLILLYQLKPEKDSDEAVTYSLGKFGQRALDFYSIHVTKESTHPVKPLAQIAGNRYASAPVGKALSDACMGTIASFLSKYQDIIIEHQKVVKGNQKRLESLRELAGKENLEYPSVTLPPQPHTSEGVDAYNEVIARVRMWVNLNLWQKLKLSRDDAKPLLRLKGFPSFPLVERQANEVDWWDMVCNVKKLINEKKEDGKVFWQNLAGYKRQEALRPYLSSEEDRKKGKKFARYQLGDLLLHLEKKHGEDWGKVYDEAWERIDKKVEGLSKHIKLEEERRSEDAQSKAALTDWLRAKASFVIEGLKEADKDEFCRCELKLQKWYGDLRGKPFAIEAENSILDISGFSKQYNCAFIWQKDGVKKLNLYLIINYFKGGKLRFKKIKPEAFEANRFYTVINKKSGEIVPMEVNFNFDDPNLIILPLAFGKRQGREFIWNDLLSLETGSLKLANGRVIEKTLYNRRTRQDEPALFVALTFERREVLDSSNIKPMNLIGVDRGENIPAVIALTDPEGCPLSRFKDSLGNPTHILRIGESYKEKQRTIQAKKEVEQRRAGGYSRKYASKAKNLADDMVRNTARDLLYYAVTQDAMLIFENLSRGFGRQGKRTFMAERQYTRMEDWLTAKLAYEGLPSKTYLSKTLAQYTSKTCSNCGFTITSADYDRVLEKLKKTATGWMTTINGKELKVEGQITYYNRYKRQNVVKDLSVELDRLSEESVNNDISSWTKGRSGEALSLLKKRFSHRPVQEKFVCLNCGFETHADEQAALNIARSWLFLRSQEYKKYQTNKTTGNTDKRAFVETWQSFYRKKLKEVWKPAV

SEQ ID NO: 34878 - protein, 978 aa, synthetic construct
  REGION 1..978: note = engineered CasX variant
QEIKRINKIRRRLVKDSNTKKAGKTGPMKTLLVRVMTPDLRERLENLRKKPENIPQPISNTSRANLNKLLTDYTEMKKAILHVYWEEFQKDPVGLMSRVAQPASKKIDQNKLKPEMDEKGNLTTAGFACSQCGQPLFVYKLEQVSEKGKAYTNYFGRCNVAEHEKLILLYQLKPEKDSDEAVTYSLGKFGQRALDFYSIHVTKESTHPVKPLAQIAGNRYASVPVGKALSDACMGTIASFLSKYQDIIIEHQKVVKGNQKRLESLRELAGKENLEYPSVTLPPQPHTSEGVDAYNEVIARVRMWVNLNLWQKLKLSRDDAKPLLRLKGFPSFPLVERQANEVDWWDMVCNVKKLINEKKEDGKVFWQNLAGYKRQEALRPYLSSEEDRKKGKKFARYQLGDLLLHLEKKHGEDWGKVYDEAWERIDKKVEGLSKHIKLEEERRSEDAQSKAALTDWLRAKASFVIEGLKEADKDEFCRCELKLQKWYGDLRGKPFAIEAENSILDISGFSKQYNCAFIWQKDGVKKLNLYLIINYFKGGKLRFKKIKPEAFEANRFYTVINKKSGEIVPMEVNFNFDDPNLIILPLAFGKRQGREFIWNDLLSLETGSLKLANGRVIEKTLYNRRTRQDEPALFVALTFERREVLDSSNIKPMNLIGVDRGENIPAVIALTDPEGCPLSRFKDSLGNPTHILRIGESYKEKQRTIQAKKEVEQRRAGGYSRKYASKAKNLADDMVRNTARDLLYYAVTQDAMLIFENLSRGFGRQGKRTFMAERQYTRMEDWLTAKLAYEGLPSKTYLSKTLAQYTSKTCSNCGFTITSADYDRVLEKLKKTATGWMTTINGKELKVEGQITYYNRYKRQNVVKDLSVELDRLSEESVNNDISSWTKGRSGEALSLLKKRFSHRPVQEKFVCLNCGFETHADEQAALNIARSWLFLRSQEYKKYQTNKTTGNTDKRAFVETWQSFYRKKLKEVWKPAV

SEQ ID NO: 34879 - protein, 978 aa, synthetic construct
  REGION 1..978: note = engineered CasX variant
QEIKRINKIRRRLVKDSNTKKAGKTGPMKTLLVRVMTPDLRERLENLRKKPENIPQPISNTSRANLNKLLTDYTEMKKAILHVYWEEFQKDPVGLMSRVAQPASKKIDQNKLKPEMDEKGNLTTAGFACSQCGQPLFVYKLEQVSEKGKAYTNYFGRCNVAEHEKLIKLYQLKPEKDSDEAVTYSLGKFGQRALDFYSIHVTKESTHPVKPLAQIAGNRYASGPVGKALSDACMGTIASFLSKYQDIIIEHQKVVKGNQKRLESLRELAGKENLEYPSVTLPPQPHTSEGVDAYNEVIARVRMWVNLNLWQKLKLSRDDAKPLLRLKGFPSFPLVERQANEVDWWDMVCNVKKLINEKKEDGKVFWQNLAGYKRQEALRPYLSSEEDRKKGKKFARYQLGDLLLHLEKKHGEDWGKVYDEAWERIDKKVEGLSKHIKLEEERRSEDAQSKAALTDWLRAKASFVIEGLKEADKDEFCRCELKLQKWYGDLRGKPFAIEAENSILDISGFSKQYNCAFIWQKDGVKKLNLYLIINYFKGGKLRFKKIKPEAFEANRFYTVINKKSGEIVPMEVNFNFDDPNLIILPLAFGKRQGREFIWNDLLSLETGSLKLANGRVIEKTLYNRRTRQDEPALFVALTFERREVLDSSNIKPMNLIGVDRGENIPAVIALTDPEGCPLSRFKDSLGNPTHILRIGESYKEKQRTIQAKKEVEQRRAGGYSRKYASKAKNLADDMVRNTARDLLYYAVTQDAMLIFENLSRGFGRQGKRTFMAERQYTRMEDWLTAKLAYEGLPSKTYLSKTLAQYTSKTCSNCGFTITSADYDRVLEKLKKTATGWMTTINGKELKVEGQITYYNRYKRQNVVKDLSVELDRLSEESVNNDISSWTKGRSGEALSLLKKRFSHRPVQEKFVCLNCGFETHADEQAALNIARSWLFLRSQEYKKYQTNKTTGNTDKRAFVETWQSFYRKKLKEVWKPAV

SEQ ID NO: 34880 - protein, 977 aa, synthetic construct
  REGION 1..977: note = engineered CasX variant
QEIKRINKIRRRLVKDSNTKKAGKTGPMKTLLVRVMTPDLRERLENLRKKPENIPQPISNTSRANLNKLLTDYTEMKKAILHVYWEEFQKDPVGLMSRVAQPASKKIDQNKLKPEMDEKGNLTTAGFACSQCGQPLFVYKLEQVSEKGKAYTNYFGRCNVAEHEKLILLYQLKPEKDSDEAVTYSLGKFGQRALDFYSIHVTKESTHPVKPLAQIAGNRYASPVGKALSDACMGTIASFLSKYQDIIIEHQKVVKGNQKRLESLRELAGKENLEYPSVTLPPQPHTSEGVDAYNEVIARVRMWVNLNLWQKLKLSRDDAKPLLRLKGFPSFPLVERQANEVDWWDMVCNVKKLINEKKEDGKVFWQNLAGYKRQEALRPYLSSEEDRKKGKKFARYQLGDLLLHLEKKHGEDWGKVYDEAWERIDKKVEGLSKHIKLEEERRSEDAQSKAALTDWLRAKASFVIEGLKEADKDEFCRCELKLQKWYGDLRGKPFAIEAENSILDISGFSKQYNCAFIWQKDGVKKLNLYLIINYFKGGKLRFKKIKPEAFEANRFYTVINKKSGEIVPMEVNFNFDDPNLIILPLAFGKRQGREFIWNDLLSLETGSLKLANGRVIEKTLYNRRTRQDEPALFVALTFERREVLDSSNIKPMNLIGVDRGENIPAVIALTDPEGCPLSRFKDSLGNPTHILRIGESYKEKQRTIQAKKEVEQRRAGGYSRKYASKAKNLADDMVRNTARDLLYYAVTQDAMLIFENLSRGFGRQGKRTFMAERQYTRMEDWLTAKLAYEGLPSKTYLSKTLAQYTSKTCSNCGFTITSADYDRVLEKLKKTATGWMTTINGKELKVEGQITYYNRYKRQNVVKDLSVELDRLSEESVNNDISSWTKGRSGEALSLLKKRFSHRPVQEKFVCLNCGFETHADEQAALNIARSWLFLRSQEYKKYQTNKTTGNTDKRAFVETWQSFYRKKLKEVWKPAV

SEQ ID NO: 34881 - protein, 978 aa, synthetic construct
  REGION 1..978: note = engineered CasX variant
QEIKRINKIRRRLVKDSNTKKAGKTGPMKTLLVRVMTPDLRERLENLRKKPENIPQPISNTSRANLNKLLTDYTEMKKAILHVYWEEFQKDPVGLMSRVAQPASKKIDQNKLKPEMDEKGNLTTAGFACSQCGQPLFVYKLEQVSEKGKAYTNYFGRCNVAEHEKLILLYQLKPEKDSDEAVTYSLGKFGQRALDFYSIHVTKESTHPVKPLAQIAGNRYASYPVGKALSDACMGTIASFLSKYQDIIIEHQKVVKGNQKRLESLRELAGKENLEYPSVTLPPQPHTKEGLDAYNEVIARVRMWVNLNLWQKLKLSRDDAKPLLRLKGFPSFPLVERQANEVDWWDMVCNVKKLINEKKEDGKVFWQNLAGYKRQEALRPYLSSEEDRKKGKKFARYQLGDLLLHLEKKHGEDWGKVYDEAWERIDKKVEGLSKHIKLEEERRSEDAQSKAALTDWLRAKASFVIEGLKEADKDEFCRCELKLQKWYGDLRGKPFAIEAENSILDISGFSKQYNCAFIWQKDGVKKLNLYLIINYFKGGKLRFKKIKPEAFEANRFYTVINKKSGEIVPMEVNFNFDDPNLIILPLAFGKRQGREFIWNDLLSLETGSLKLANGRVIEKTLYNRRTRQDEPALFVALTFERREVLDSSNIKPMNLIGVDRGENIPAVIALTDPEGCPLSRFKDSLGNPTHILRIGESYKEKQRTIQAKKEVEQRRAGGYSRKYASKAKNLADDMVRNTARDLLYYAVTQDAMLIFENLSRGFGRQGKRTFMAERQYTRMEDWLTAKLAYEGLPSKTYLSKTLAQYTSKTCSNCGFTITSADYDRVLEKLKKTATGWMTTINGKELKVEGQITYYNRYKRQNVVKDLSVELDRLSEESVNNDISSWTKGRSGEALSLLKKRFSHRPVQEKFVCLNCGFETHADEQAALNIARSWLFLRSQEYKKYQTNKTTGNTDKRAFVETWQSFYRKKLKEVWKPAV

SEQ ID NO: 34882 - protein, 978 aa, synthetic construct
  REGION 1..978: note = engineered CasX variant
QEIKRINKIRRRLVKDSNTKKAGKTGPMKTLLVRVMTPDLRERLENLRKKPENIPQPISNTSRANLNKLLTDYTEMKKAILHVYWEEFQKDPVGLMSRVAQPASKKIDQNKLKPEMDEKGNLTTAGFACSQCGQPLFVYKLEQVSEKGKAYTNYFGRCNVAEHEKLILLYQLKPEKDSDEAVTYSLGKFGQRALDFYSIHVTKESTHPVKPLAQIAGNRYASHPVGKALSDACMGTIASFLSKYQDIIIEHQKVVKGNQKRLESLRELAGKENLEYPSVTLPPQPHTKEGLDAYNEVIARVRMWVNLNLWQKLKLSRDDAKPLLRLKGFPSFPLVERQANEVDWWDMVCNVKKLINEKKEDGKVFWQNLAGYKRQEALRPYLSSEEDRKKGKKFARYQLGDLLLHLEKKHGEDWGKVYDEAWERIDKKVEGLSKHIKLEEERRSEDAQSKAALTDWLRAKASFVIEGLKEADKDEFCRCELKLQKWYGDLRGKPFAIEAENSILDISGFSKQYNCAFIWQKDGVKKLNLYLIINYFKGGKLRFKKIKPEAFEANRFYTVINKKSGEIVPMEVNFNFDDPNLIILPLAFGKRQGREFIWNDLLSLETGSLKLANGRVIEKTLYNRRTRQDEPALFVALTFERREVLDSSNIKPMNLIGVDRGENIPAVIALTDPEGCPLSRFKDSLGNPTHILRIGESYKEKQRTIQAKKEVEQRRAGGYSRKYASKAKNLADDMVRNTARDLLYYAVTQDAMLIFENLSRGFGRQGKRTFMAERQYTRMEDWLTAKLAYEGLPSKTYLSKTLAQYTSKTCSNCGFTITSADYDRVLEKLKKTATGWMTTINGKELKVEGQITYYNRYKRQNVVKDLSVELDRLSEESVNNDISSWTKGRSGEALSLLKKRFSHRPVQEKFVCLNCGFETHADEQAALNIARSWLFLRSQEYKKYQTNKTTGNTDKRAFVETWQSFYRKKLKEVWKPAV

SEQ ID NO: 34883 - protein, 978 aa, synthetic construct
  REGION 1..978: note = engineered CasX variant
QEIKRINKIRRRLVKDSNTKKAGKTGPMKTLLVRVMTPDLRERLENLRKKPENIPQPISNTSRANLNKLLTDYTEMKKAILHVYWEEFQKDPVGLMSRVAQPASKKIDQNKLKPEMDEKGNLTTAGFACSQCGQPLFVYKLEQVSEKGKAYTNYFGRCNVAEHEKLILLYQLKPEKDSDEAVTYSLGKFGQRALDFYSIHVTKESTHPVKPLAQIAGNRYASSPVGKALSDACMGTIASFLSKYQDIIIEHQKVVKGNQKRLESLRELAGKENLEYPSVTLPPQPHTKEGLDAYNEVIARVRMWVNLNLWQKLKLSRDDAKPLLRLKGFPSFPLVERQANEVDWWDMVCNVKKLINEKKEDGKVFWQNLAGYKRQEALRPYLSSEEDRKKGKKFARYQLGDLLLHLEKKHGEDWGKVYDEAWERIDKKVEGLSKHIKLEEERRSEDAQSKAALTDWLRAKASFVIEGLKEADKDEFCRCELKLQKWYGDLRGKPFAIEAENSILDISGFSKQYNCAFIWQKDGVKKLNLYLIINYFKGGKLRFKKIKPEAFEANRFYTVINKKSGEIVPMEVNFNFDDPNLIILPLAFGKRQGREFIWNDLLSLETGSLKLANGRVIEKTLYNRRTRQDEPALFVALTFERREVLDSSNIKPMNLIGVDRGENIPAVIALTDPEGCPLSRFKDSLGNPTHILRIGESYKEKQRTIQAKKEVEQRRAGGYSRKYASKAKNLADDMVRNTARDLLYYAVTQDAMLIFENLSRGFGRQGKRTFMAERQYTRMEDWLTAKLAYEGLPSKTYLSKTLAQYTSKTCSNCGFTITSADYDRVLEKLKKTATGWMTTINGKELKVEGQITYYNRYKRQNVVKDLSVELDRLSEESVNNDISSWTKGRSGEALSLLKKRFSHRPVQEKFVCLNCGFETHADEQAALNIARSWLFLRSQEYKKYQTNKTTGNTDKRAFVETWQSFYRKKLKEVWKPAV

SEQ ID NO: 34884 - protein, 978 aa, synthetic construct
  REGION 1..978: note = engineered CasX variant
QEIKRINKIRRRLVKDSNTKKAGKTGPMKTLLVRVMTPDLRERLENLRKKPENIPQPISNTSRANLNKLLTDYTEMKKAILHVYWEEFQKDPVGLMSRVAQPASKKIDQNKLKPEMDEKGNLTTAGFACSQCGQPLFVYKLEQVSEKGKAYTNYFGRCNVAEHEKLILLYQLKPEKDSDEAVTYSLGKFGQRALDFYSIHVTKESTHPVKPLAQIAGNRYASTPVGKALSDACMGTIASFLSKYQDIIIEHQKVVKGNQKRLESLRELAGKENLEYPSVTLPPQPHTKEGLDAYNEVIARVRMWVNLNLWQKLKLSRDDAKPLLRLKGFPSFPLVERQANEVDWWDMVCNVKKLINEKKEDGKVFWQNLAGYKRQEALRPYLSSEEDRKKGKKFARYQLGDLLLHLEKKHGEDWGKVYDEAWERIDKKVEGLSKHIKLEEERRSEDAQSKAALTDWLRAKASFVIEGLKEADKDEFCRCELKLQKWYGDLRGKPFAIEAENSILDISGFSKQYNCAFIWQKDGVKKLNLYLIINYFKGGKLRFKKIKPEAFEANRFYTVINKKSGEIVPMEVNFNFDDPNLIILPLAFGKRQGREFIWNDLLSLETGSLKLANGRVIEKTLYNRRTRQDEPALFVALTFERREVLDSSNIKPMNLIGVDRGENIPAVIALTDPEGCPLSRFKDSLGNPTHILRIGESYKEKQRTIQAKKEVEQRRAGGYSRKYASKAKNLADDMVRNTARDLLYYAVTQDAMLIFENLSRGFGRQGKRTFMAERQYTRMEDWLTAKLAYEGLPSKTYLSKTLAQYTSKTCSNCGFTITSADYDRVLEKLKKTATGWMTTINGKELKVEGQITYYNRYKRQNVVKDLSVELDRLSEESVNNDISSWTKGRSGEALSLLKKRFSHRPVQEKFVCLNCGFETHADEQAALNIARSWLFLRSQEYKKYQTNKTTGNTDKRAFVETWQSFYRKKLKEVWKPAV

SEQ ID NO: 34885 - protein, 978 aa, synthetic construct
  REGION 1..978: note = engineered CasX variant
QEIKRINKIRRRLVKDSNTKKAGKTGPMKTLLVRVMTPDLRERLENLRKKPENIPQPISNTSRANLNKLLTDYTEMKKAILHVYWEEFQKDPVGLMSRVAQPASKKIDQNKLKPEMDEKGNLTTAGFACSQCGQPLFVYKLEQVSEKGKAYTNYFGRCNVAEHEKLILLYQLKPEKDSDEAVTYSLGKFGQRALDFYSIHVTKESTHPVKPLAQIAGNRYASAPVGKALSDACMGTIASFLSKYQDIIIEHQKVVKGNQKRLESLRELAGKENLEYPSVTLPPQPHTKEGLDAYNEVIARVRMWVNLNLWQKLKLSRDDAKPLLRLKGFPSFPLVERQANEVDWWDMVCNVKKLINEKKEDGKVFWQNLAGYKRQEALRPYLSSEEDRKKGKKFARYQLGDLLLHLEKKHGEDWGKVYDEAWERIDKKVEGLSKHIKLEEERRSEDAQSKAALTDWLRAKASFVIEGLKEADKDEFCRCELKLQKWYGDLRGKPFAIEAENSILDISGFSKQYNCAFIWQKDGVKKLNLYLIINYFKGGKLRFKKIKPEAFEANRFYTVINKKSGEIVPMEVNFNFDDPNLIILPLAFGKRQGREFIWNDLLSLETGSLKLANGRVIEKTLYNRRTRQDEPALFVALTFERREVLDSSNIKPMNLIGVDRGENIPAVIALTDPEGCPLSRFKDSLGNPTHILRIGESYKEKQRTIQAKKEVEQRRAGGYSRKYASKAKNLADDMVRNTARDLLYYAVTQDAMLIFENLSRGFGRQGKRTFMAERQYTRMEDWLTAKLAYEGLPSKTYLSKTLAQYTSKTCSNCGFTITSADYDRVLEKLKKTATGWMTTINGKELKVEGQITYYNRYKRQNVVKDLSVELDRLSEESVNNDISSWTKGRSGEALSLLKKRFSHRPVQEKFVCLNCGFETHADEQAALNIARSWLFLRSQEYKKYQTNKTTGNTDKRAFVETWQSFYRKKLKEVWKPAV

SEQ ID NO: 34886 - protein, 978 aa, synthetic construct
  REGION 1..978: note = engineered CasX variant
QEIKRINKIRRRLVKDSNTKKAGKTGPMKTLLVRVMTPDLRERLENLRKKPENIPQPISNTSRANLNKLLTDYTEMKKAILHVYWEEFQKDPVGLMSRVAQPASKKIDQNKLKPEMDEKGNLTTAGFACSQCGQPLFVYKLEQVSEKGKAYTNYFGRCNVAEHEKLILLYQLKPEKDSDEAVTYSLGKFGQRALDFYSIHVTKESTHPVKPLAQIAGNRYASVPVGKALSDACMGTIASFLSKYQDIIIEHQKVVKGNQKRLESLRELAGKENLEYPSVTLPPQPHTKEGLDAYNEVIARVRMWVNLNLWQKLKLSRDDAKPLLRLKGFPSFPLVERQANEVDWWDMVCNVKKLINEKKEDGKVFWQNLAGYKRQEALRPYLSSEEDRKKGKKFARYQLGDLLLHLEKKHGEDWGKVYDEAWERIDKKVEGLSKHIKLEEERRSEDAQSKAALTDWLRAKASFVIEGLKEADKDEFCRCELKLQKWYGDLRGKPFAIEAENSILDISGFSKQYNCAFIWQKDGVKKLNLYLIINYFKGGKLRFKKIKPEAFEANRFYTVINKKSGEIVPMEVNFNFDDPNLIILPLAFGKRQGREFIWNDLLSLETGSLKLANGRVIEKTLYNRRTRQDEPALFVALTFERREVLDSSNIKPMNLIGVDRGENIPAVIALTDPEGCPLSRFKDSLGNPTHILRIGESYKEKQRTIQAKKEVEQRRAGGYSRKYASKAKNLADDMVRNTARDLLYYAVTQDAMLIFENLSRGFGRQGKRTFMAERQYTRMEDWLTAKLAYEGLPSKTYLSKTLAQYTSKTCSNCGFTITSADYDRVLEKLKKTATGWMTTINGKELKVEGQITYYNRYKRQNVVKDLSVELDRLSEESVNNDISSWTKGRSGEALSLLKKRFSHRPVQEKFVCLNCGFETHADEQAALNIARSWLFLRSQEYKKYQTNKTTGNTDKRAFVETWQSFYRKKLKEVWKPAV

SEQ ID NO: 34887 - protein, 978 aa, synthetic construct
  REGION 1..978: note = engineered CasX variant
QEIKRINKIRRRLVKDSNTKKAGKTGPMKTLLVRVMTPDLRERLENLRKKPENIPQPISNTSRANLNKLLTDYTEMKKAILHVYWEEFQKDPVGLMSRVAQPASKKIDQNKLKPEMDEKGNLTTAGFACSQCGQPLFVYKLEQVSEKGKAYTNYFGRCNVAEHEKLIKLYQLKPEKDSDEAVTYSLGKFGQRALDFYSIHVTKESTHPVKPLAQIAGNRYASGPVGKALSDACMGTIASFLSKYQDIIIEHQKVVKGNQKRLESLRELAGKENLEYPSVTLPPQPHTKEGLDAYNEVIARVRMWVNLNLWQKLKLSRDDAKPLLRLKGFPSFPLVERQANEVDWWDMVCNVKKLINEKKEDGKVFWQNLAGYKRQEALRPYLSSEEDRKKGKKFARYQLGDLLLHLEKKHGEDWGKVYDEAWERIDKKVEGLSKHIKLEEERRSEDAQSKAALTDWLRAKASFVIEGLKEADKDEFCRCELKLQKWYGDLRGKPFAIEAENSILDISGFSKQYNCAFIWQKDGVKKLNLYLIINYFKGGKLRFKKIKPEAFEANRFYTVINKKSGEIVPMEVNFNFDDPNLIILPLAFGKRQGREFIWNDLLSLETGSLKLANGRVIEKTLYNRRTRQDEPALFVALTFERREVLDSSNIKPMNLIGVDRGENIPAVIALTDPEGCPLSRFKDSLGNPTHILRIGESYKEKQRTIQAKKEVEQRRAGGYSRKYASKAKNLADDMVRNTARDLLYYAVTQDAMLIFENLSRGFGRQGKRTFMAERQYTRMEDWLTAKLAYEGLPSKTYLSKTLAQYTSKTCSNCGFTITSADYDRVLEKLKKTATGWMTTINGKELKVEGQITYYNRYKRQNVVKDLSVELDRLSEESVNNDISSWTKGRSGEALSLLKKRFSHRPVQEKFVCLNCGFETHADEQAALNIARSWLFLRSQEYKKYQTNKTTGNTDKRAFVETWQSFYRKKLKEVWKPAV

SEQ ID NO: 34888 - protein, 977 aa, synthetic construct
  REGION 1..977: note = engineered CasX variant
QEIKRINKIRRRLVKDSNTKKAGKTGPMKTLLVRVMTPDLRERLENLRKKPENIPQPISNTSRANLNKLLTDYTEMKKAILHVYWEEFQKDPVGLMSRVAQPASKKIDQNKLKPEMDEKGNLTTAGFACSQCGQPLFVYKLEQVSEKGKAYTNYFGRCNVAEHEKLILLYQLKPEKDSDEAVTYSLGKFGQRALDFYSIHVTKESTHPVKPLAQIAGNRYASPVGKALSDACMGTIASFLSKYQDIIIEHQKVVKGNQKRLESLRELAGKENLEYPSVTLPPQPHTKEGLDAYNEVIARVRMWVNLNLWQKLKLSRDDAKPLLRLKGFPSFPLVERQANEVDWWDMVCNVKKLINEKKEDGKVFWQNLAGYKRQEALRPYLSSEEDRKKGKKFARYQLGDLLLHLEKKHGEDWGKVYDEAWERIDKKVEGLSKHIKLEEERRSEDAQSKAALTDWLRAKASFVIEGLKEADKDEFCRCELKLQKWYGDLRGKPFAIEAENSILDISGFSKQYNCAFIWQKDGVKKLNLYLIINYFKGGKLRFKKIKPEAFEANRFYTVINKKSGEIVPMEVNFNFDDPNLIILPLAFGKRQGREFIWNDLLSLETGSLKLANGRVIEKTLYNRRTRQDEPALFVALTFERREVLDSSNIKPMNLIGVDRGENIPAVIALTDPEGCPLSRFKDSLGNPTHILRIGESYKEKQRTIQAKKEVEQRRAGGYSRKYASKAKNLADDMVRNTARDLLYYAVTQDAMLIFENLSRGFGRQGKRTFMAERQYTRMEDWLTAKLAYEGLPSKTYLSKTLAQYTSKTCSNCGFTITSADYDRVLEKLKKTATGWMTTINGKELKVEGQITYYNRYKRQNVVKDLSVELDRLSEESVNNDISSWTKGRSGEALSLLKKRFSHRPVQEKFVCLNCGFETHADEQAALNIARSWLFLRSQEYKKYQTNKTTGNTDKRAFVETWQSFYRKKLKEVWKPAV

SEQ ID NO: 34889 - protein, 978 aa, synthetic construct
  REGION 1..978: note = engineered CasX variant
QEIKRINKIRRRLVKDSNTKKAGKTGPMKTLLVRVMTPDLRERLENLRKKPENIPQPISNTSRANLNKLLTDYTEMKKAILHVYWEEFQKDPVGLMSRVAQPASKKIDQNKLKPEMDEKGNLTTAGFACSQCGQPLFVYKLEQVSEKGKAYTNYFGRCNVAEHEKLILLYQLKPEKDSDEAVTYSLGKFGQRALDFYSIHVTKESTHPVKPLAQIAGNRYASYPVGKALSDACMGTIASFLSKYQDIIIEHQKVVKGNQKRLESLRELAGKENLEYPSVTLPPQPHTKEGVDAYNEVIARVRTWVNLNLWQKLKLSRDDAKPLLRLKGFPSFPLVERQANEVDWWDMVCNVKKLINEKKEDGKVFWQNLAGYKRQEALRPYLSSEEDRKKGKKFARYQLGDLLLHLEKKHGEDWGKVYDEAWERIDKKVEGLSKHIKLEEERRSEDAQSKAALTDWLRAKASFVIEGLKEADKDEFCRCELKLQKWYGDLRGKPFAIEAENSILDISGFSKQYNCAFIWQKDGVKKLNLYLIINYFKGGKLRFKKIKPEAFEANRFYTVINKKSGEIVPMEVNFNFDDPNLIILPLAFGKRQGREFIWNDLLSLETGSLKLANGRVIEKTLYNRRTRQDEPALFVALTFERREVLDSSNIKPMNLIGVDRGENIPAVIALTDPEGCPLSRFKDSLGNPTHILRIGESYKEKQRTIQAKKEVEQRRAGGYSRKYASKAKNLADDMVRNTARDLLYYAVTQDAMLIFENLSRGFGRQGKRTFMAERQYTRMEDWLTAKLAYEGLPSKTYLSKTLAQYTSKTCSNCGFTITSADYDRVLEKLKKTATGWMTTINGKELKVEGQITYYNRYKRQNVVKDLSVELDRLSEESVNNDISSWTKGRSGEALSLLKKRFSHRPVQEKFVCLNCGFETHADEQAALNIARSWLFLRSQEYKKYQTNKTTGNTDKRAFVETWQSFYRKKLKEVWKPAV

SEQ ID NO: 34890 - protein, 978 aa, synthetic construct
  REGION 1..978: note = engineered CasX variant
QEIKRINKIRRRLVKDSNTKKAGKTGPMKTLLVRVMTPDLRERLENLRKKPENIPQPISNTSRANLNKLLTDYTEMKKAILHVYWEEFQKDPVGLMSRVAQPASKKIDQNKLKPEMDEKGNLTTAGFACSQCGQPLFVYKLEQVSEKGKAYTNYFGRCNVAEHEKLILLYQLKPEKDSDEAVTYSLGKFGQRALDFYSIHVTKESTHPVKPLAQIAGNRYASHPVGKALSDACMGTIASFLSKYQDIIIEHQKVVKGNQKRLESLRELAGKENLEYPSVTLPPQPHTKEGVDAYNEVIARVRTWVNLNLWQKLKLSRDDAKPLLRLKGFPSFPLVERQANEVDWWDMVCNVKKLINEKKEDGKVFWQNLAGYKRQEALRPYLSSEEDRKKGKKFARYQLGDLLLHLEKKHGEDWGKVYDEAWERIDKKVEGLSKHIKLEEERRSEDAQSKAALTDWLRAKASFVIEGLKEADKDEFCRCELKLQKWYGDLRGKPFAIEAENSILDISGFSKQYNCAFIWQKDGVKKLNLYLIINYFKGGKLRFKKIKPEAFEANRFYTVINKKSGEIVPMEVNFNFDDPNLIILPLAFGKRQGREFIWNDLLSLETGSLKLANGRVIEKTLYNRRTRQDEPALFVALTFERREVLDSSNIKPMNLIGVDRGENIPAVIALTDPEGCPLSRFKDSLGNPTHILRIGESYKEKQRTIQAKKEVEQRRAGGYSRKYASKAKNLADDMVRNTARDLLYYAVTQDAMLIFENLSRGFGRQGKRTFMAERQYTRMEDWLTAKLAYEGLPSKTYLSKTLAQYTSKTCSNCGFTITSADYDRVLEKLKKTATGWMTTINGKELKVEGQITYYNRYKRQNVVKDLSVELDRLSEESVNNDISSWTKGRSGEALSLLKKRFSHRPVQEKFVCLNCGFETHADEQAALNIARSWLFLRSQEYKKYQTNKTTGNTDKRAFVETWQSFYRKKLKEVWKPAV

SEQ ID NO: 34891 - protein, 978 aa, synthetic construct
  REGION 1..978: note = engineered CasX variant
QEIKRINKIRRRLVKDSNTKKAGKTGPMKTLLVRVMTPDLRERLENLRKKPENIPQPISNTSRANLNKLLTDYTEMKKAILHVYWEEFQKDPVGLMSRVAQPASKKIDQNKLKPEMDEKGNLTTAGFACSQCGQPLFVYKLEQVSEKGKAYTNYFGRCNVAEHEKLILLYQLKPEKDSDEAVTYSLGKFGQRALDFYSIHVTKESTHPVKPLAQIAGNRYASSPVGKALSDACMGTIASFLSKYQDIIIEHQKVVKGNQKRLESLRELAGKENLEYPSVTLPPQPHTKEGVDAYNEVIARVRTWVNLNLWQKLKLSRDDAKPLLRLKGFPSFPLVERQANEVDWWDMVCNVKKLINEKKEDGKVFWQNLAGYKRQEALRPYLSSEEDRKKGKKFARYQLGDLLLHLEKKHGEDWGKVYDEAWERIDKKVEGLSKHIKLEEERRSEDAQSKAALTDWLRAKASFVIEGLKEADKDEFCRCELKLQKWYGDLRGKPFAIEAENSILDISGFSKQYNCAFIWQKDGVKKLNLYLIINYFKGGKLRFKKIKPEAFEANRFYTVINKKSGEIVPMEVNFNFDDPNLIILPLAFGKRQGREFIWNDLLSLETGSLKLANGRVIEKTLYNRRTRQDEPALFVALTFERREVLDSSNIKPMNLIGVDRGENIPAVIALTDPEGCPLSRFKDSLGNPTHILRIGESYKEKQRTIQAKKEVEQRRAGGYSRKYASKAKNLADDMVRNTARDLLYYAVTQDAMLIFENLSRGFGRQGKRTFMAERQYTRMEDWLTAKLAYEGLPSKTYLSKTLAQYTSKTCSNCGFTITSADYDRVLEKLKKTATGWMTTINGKELKVEGQITYYNRYKRQNVVKDLSVELDRLSEESVNNDISSWTKGRSGEALSLLKKRFSHRPVQEKFVCLNCGFETHADEQAALNIARSWLFLRSQEYKKYQTNKTTGNTDKRAFVETWQSFYRKKLKEVWKPAV

SEQ ID NO: 34892 - protein, 978 aa, synthetic construct
  REGION 1..978: note = engineered CasX variant
QEIKRINKIRRRLVKDSNTKKAGKTGPMKTLLVRVMTPDLRERLENLRKKPENIPQPISNTSRANLNKLLTDYTEMKKAILHVYWEEFQKDPVGLMSRVAQPASKKIDQNKLKPEMDEKGNLTTAGFACSQCGQPLFVYKLEQVSEKGKAYTNYFGRCNVAEHEKLILLYQLKPEKDSDEAVTYSLGKFGQRALDFYSIHVTKESTHPVKPLAQIAGNRYASTPVGKALSDACMGTIASFLSKYQDIIIEHQKVVKGNQKRLESLRELAGKENLEYPSVTLPPQPHTKEGVDAYNEVIARVRTWVNLNLWQKLKLSRDDAKPLLRLKGFPSFPLVERQANEVDWWDMVCNVKKLINEKKEDGKVFWQNLAGYKRQEALRPYLSSEEDRKKGKKFARYQLGDLLLHLEKKHGEDWGKVYDEAWERIDKKVEGLSKHIKLEEERRSEDAQSKAALTDWLRAKASFVIEGLKEADKDEFCRCELKLQKWYGDLRGKPFAIEAENSILDISGFSKQYNCAFIWQKDGVKKLNLYLIINYFKGGKLRFKKIKPEAFEANRFYTVINKKSGEIVPMEVNFNFDDPNLIILPLAFGKRQGREFIWNDLLSLETGSLKLANGRVIEKTLYNRRTRQDEPALFVALTFERREVLDSSNIKPMNLIGVDRGENIPAVIALTDPEGCPLSRFKDSLGNPTHILRIGESYKEKQRTIQAKKEVEQRRAGGYSRKYASKAKNLADDMVRNTARDLLYYAVTQDAMLIFENLSRGFGRQGKRTFMAERQYTRMEDWLTAKLAYEGLPSKTYLSKTLAQYTSKTCSNCGFTITSADYDRVLEKLKKTATGWMTTINGKELKVEGQITYYNRYKRQNVVKDLSVELDRLSEESVNNDISSWTKGRSGEALSLLKKRFSHRPVQEKFVCLNCGFETHADEQAALNIARSWLFLRSQEYKKYQTNKTTGNTDKRAFVETWQSFYRKKLKEVWKPAV

SEQ ID NO: 34893 - protein, 978 aa, synthetic construct
  REGION 1..978: note = engineered CasX variant
QEIKRINKIRRRLVKDSNTKKAGKTGPMKTLLVRVMTPDLRERLENLRKKPENIPQPISNTSRANLNKLLTDYTEMKKAILHVYWEEFQKDPVGLMSRVAQPASKKIDQNKLKPEMDEKGNLTTAGFACSQCGQPLFVYKLEQVSEKGKAYTNYFGRCNVAEHEKLILLYQLKPEKDSDEAVTYSLGKFGQRALDFYSIHVTKESTHPVKPLAQIAGNRYASAPVGKALSDACMGTIASFLSKYQDIIIEHQKVVKGNQKRLESLRELAGKENLEYPSVTLPPQPHTKEGVDAYNEVIARVRTWVNLNLWQKLKLSRDDAKPLLRLKGFPSFPLVERQANEVDWWDMVCNVKKLINEKKEDGKVFWQNLAGYKRQEALRPYLSSEEDRKKGKKFARYQLGDLLLHLEKKHGEDWGKVYDEAWERIDKKVEGLSKHIKLEEERRSEDAQSKAALTDWLRAKASFVIEGLKEADKDEFCRCELKLQKWYGDLRGKPFAIEAENSILDISGFSKQYNCAFIWQKDGVKKLNLYLIINYFKGGKLRFKKIKPEAFEANRFYTVINKKSGEIVPMEVNFNFDDPNLIILPLAFGKRQGREFIWNDLLSLETGSLKLANGRVIEKTLYNRRTRQDEPALFVALTFERREVLDSSNIKPMNLIGVDRGENIPAVIALTDPEGCPLSRFKDSLGNPTHILRIGESYKEKQRTIQAKKEVEQRRAGGYSRKYASKAKNLADDMVRNTARDLLYYAVTQDAMLIFENLSRGFGRQGKRTFMAERQYTRMEDWLTAKLAYEGLPSKTYLSKTLAQYTSKTCSNCGFTITSADYDRVLEKLKKTATGWMTTINGKELKVEGQITYYNRYKRQNVVKDLSVELDRLSEESVNNDISSWTKGRSGEALSLLKKRFSHRPVQEKFVCLNCGFETHADEQAALNIARSWLFLRSQEYKKYQTNKTTGNTDKRAFVETWQSFYRKKLKEVWKPAV

SEQ ID NO: 34894 - protein, 978 aa, synthetic construct
  REGION 1..978: note = engineered CasX variant
QEIKRINKIRRRLVKDSNTKKAGKTGPMKTLLVRVMTPDLRERLENLRKKPENIPQPISNTSRANLNKLLTDYTEMKKAILHVYWEEFQKDPVGLMSRVAQPASKKIDQNKLKPEMDEKGNLTTAGFACSQCGQPLFVYKLEQVSEKGKAYTNYFGRCNVAEHEKLILLYQLKPEKDSDEAVTYSLGKFGQRALDFYSIHVTKESTHPVKPLAQIAGNRYASVPVGKALSDACMGTIASFLSKYQDIIIEHQKVVKGNQKRLESLRELAGKENLEYPSVTLPPQPHTKEGVDAYNEVIARVRTWVNLNLWQKLKLSRDDAKPLLRLKGFPSFPLVERQANEVDWWDMVCNVKKLINEKKEDGKVFWQNLAGYKRQEALRPYLSSEEDRKKGKKFARYQLGDLLLHLEKKHGEDWGKVYDEAWERIDKKVEGLSKHIKLEEERRSEDAQSKAALTDWLRAKASFVIEGLKEADKDEFCRCELKLQKWYGDLRGKPFAIEAENSILDISGFSKQYNCAFIWQKDGVKKLNLYLIINYFKGGKLRFKKIKPEAFEANRFYTVINKKSGEIVPMEVNFNFDDPNLIILPLAFGKRQGREFIWNDLLSLETGSLKLANGRVIEKTLYNRRTRQDEPALFVALTFERREVLDSSNIKPMNLIGVDRGENIPAVIALTDPEGCPLSRFKDSLGNPTHILRIGESYKEKQRTIQAKKEVEQRRAGGYSRKYASKAKNLADDMVRNTARDLLYYAVTQDAMLIFENLSRGFGRQGKRTFMAERQYTRMEDWLTAKLAYEGLPSKTYLSKTLAQYTSKTCSNCGFTITSADYDRVLEKLKKTATGWMTTINGKELKVEGQITYYNRYKRQNVVKDLSVELDRLSEESVNNDISSWTKGRSGEALSLLKKRFSHRPVQEKFVCLNCGFETHADEQAALNIARSWLFLRSQEYKKYQTNKTTGNTDKRAFVETWQSFYRKKLKEVWKPAV

SEQ ID NO: 34895 - protein, 978 aa, synthetic construct
  REGION 1..978: note = engineered CasX variant
QEIKRINKIRRRLVKDSNTKKAGKTGPMKTLLVRVMTPDLRERLENLRKKPENIPQPISNTSRANLNKLLTDYTEMKKAILHVYWEEFQKDPVGLMSRVAQPASKKIDQNKLKPEMDEKGNLTTAGFACSQCGQPLFVYKLEQVSEKGKAYTNYFGRCNVAEHEKLIKLYQLKPEKDSDEAVTYSLGKFGQRALDFYSIHVTKESTHPVKPLAQIAGNRYASGPVGKALSDACMGTIASFLSKYQDIIIEHQKVVKGNQKRLESLRELAGKENLEYPSVTLPPQPHTKEGVDAYNEVIARVRTWVNLNLWQKLKLSRDDAKPLLRLKGFPSFPLVERQANEVDWWDMVCNVKKLINEKKEDGKVFWQNLAGYKRQEALRPYLSSEEDRKKGKKFARYQLGDLLLHLEKKHGEDWGKVYDEAWERIDKKVEGLSKHIKLEEERRSEDAQSKAALTDWLRAKASFVIEGLKEADKDEFCRCELKLQKWYGDLRGKPFAIEAENSILDISGFSKQYNCAFIWQKDGVKKLNLYLIINYFKGGKLRFKKIKPEAFEANRFYTVINKKSGEIVPMEVNFNFDDPNLIILPLAFGKRQGREFIWNDLLSLETGSLKLANGRVIEKTLYNRRTRQDEPALFVALTFERREVLDSSNIKPMNLIGVDRGENIPAVIALTDPEGCPLSRFKDSLGNPTHILRIGESYKEKQRTIQAKKEVEQRRAGGYSRKYASKAKNLADDMVRNTARDLLYYAVTQDAMLIFENLSRGFGRQGKRTFMAERQYTRMEDWLTAKLAYEGLPSKTYLSKTLAQYTSKTCSNCGFTITSADYDRVLEKLKKTATGWMTTINGKELKVEGQITYYNRYKRQNVVKDLSVELDRLSEESVNNDISSWTKGRSGEALSLLKKRFSHRPVQEKFVCLNCGFETHADEQAALNIARSWLFLRSQEYKKYQTNKTTGNTDKRAFVETWQSFYRKKLKEVWKPAV

SEQ ID NO: 34896 - protein, 977 aa, synthetic construct
  REGION 1..977: note = engineered CasX variant
QEIKRINKIRRRLVKDSNTKKAGKTGPMKTLLVRVMTPDLRERLENLRKKPENIPQPISNTSRANLNKLLTDYTEMKKAILHVYWEEFQKDPVGLMSRVAQPASKKIDQNKLKPEMDEKGNLTTAGFACSQCGQPLFVYKLEQVSEKGKAYTNYFGRCNVAEHEKLILLYQLKPEKDSDEAVTYSLGKFGQRALDFYSIHVTKESTHPVKPLAQIAGNRYASPVGKALSDACMGTIASFLSKYQDIIIEHQKVVKGNQKRLESLRELAGKENLEYPSVTLPPQPHTKEGVDAYNEVIARVRTWVNLNLWQKLKLSRDDAKPLLRLKGFPSFPLVERQANEVDWWDMVCNVKKLINEKKEDGKVFWQNLAGYKRQEALRPYLSSEEDRKKGKKFARYQLGDLLLHLEKKHGEDWGKVYDEAWERIDKKVEGLSKHIKLEEERRSEDAQSKAALTDWLRAKASFVIEGLKEADKDEFCRCELKLQKWYGDLRGKPFAIEAENSILDISGFSKQYNCAFIWQKDGVKKLNLYLIINYFKGGKLRFKKIKPEAFEANRFYTVINKKSGEIVPMEVNFNFDDPNLIILPLAFGKRQGREFIWNDLLSLETGSLKLANGRVIEKTLYNRRTRQDEPALFVALTFERREVLDSSNIKPMNLIGVDRGENIPAVIALTDPEGCPLSRFKDSLGNPTHILRIGESYKEKQRTIQAKKEVEQRRAGGYSRKYASKAKNLADDMVRNTARDLLYYAVTQDAMLIFENLSRGFGRQGKRTFMAERQYTRMEDWLTAKLAYEGLPSKTYLSKTLAQYTSKTCSNCGFTITSADYDRVLEKLKKTATGWMTTINGKELKVEGQITYYNRYKRQNVVKDLSVELDRLSEESVNNDISSWTKGRSGEALSLLKKRFSHRPVQEKFVCLNCGFETHADEQAALNIARSWLFLRSQEYKKYQTNKTTGNTDKRAFVETWQSFYRKKLKEVWKPAV

SEQ ID NO: 34897 - protein, 978 aa, synthetic construct
  REGION 1..978: note = engineered CasX variant
QEIKRINKIRRRLVKDSNTKKAGKTGPMKTLLVRVMTPDLRERLENLRKKPENIPQPISNTSRANLNKLLTDYTEMKKAILHVYWEEFQKDPVGLMSRVAQPASKKIDQNKLKPEMDEKGNLTTAGFACSQCGQPLFVYKLEQVSEKGKAYTNYFGRCNVAEHEKLILLYQLKPEKDSDEAVTYSLGKFGQRALDFYSIHVTKESTHPVKPLAQIAGNRYASYPVGKALSDACMGTIASFLSKYQDIIIEHQKVVKGNQKRLESLRELAGKENLEYPSVTLPPQPHTKEGVDAYNEVIARVRWWVNLNLWQKLKLSRDDAKPLLRLKGFPSFPLVERQANEVDWWDMVCNVKKLINEKKEDGKVFWQNLAGYKRQEALRPYLSSEEDRKKGKKFARYQLGDLLLHLEKKHGEDWGKVYDEAWERIDKKVEGLSKHIKLEEERRSEDAQSKAALTDWLRAKASFVIEGLKEADKDEFCRCELKLQKWYGDLRGKPFAIEAENSILDISGFSKQYNCAFIWQKDGVKKLNLYLIINYFKGGKLRFKKIKPEAFEANRFYTVINKKSGEIVPMEVNFNFDDPNLIILPLAFGKRQGREFIWNDLLSLETGSLKLANGRVIEKTLYNRRTRQDEPALFVALTFERREVLDSSNIKPMNLIGVDRGENIPAVIALTDPEGCPLSRFKDSLGNPTHILRIGESYKEKQRTIQAKKEVEQRRAGGYSRKYASKAKNLADDMVRNTARDLLYYAVTQDAMLIFENLSRGFGRQGKRTFMAERQYTRMEDWLTAKLAYEGLPSKTYLSKTLAQYTSKTCSNCGFTITSADYDRVLEKLKKTATGWMTTINGKELKVEGQITYYNRYKRQNVVKDLSVELDRLSEESVNNDISSWTKGRSGEALSLLKKRFSHRPVQEKFVCLNCGFETHADEQAALNIARSWLFLRSQEYKKYQTNKTTGNTDKRAFVETWQSFYRKKLKEVWKPAV

SEQ ID NO: 34898 - protein, 978 aa, synthetic construct
  REGION 1..978: note = engineered CasX variant
QEIKRINKIRRRLVKDSNTKKAGKTGPMKTLLVRVMTPDLRERLENLRKKPENIPQPISNTSRANLNKLLTDYTEMKKAILHVYWEEFQKDPVGLMSRVAQPASKKIDQNKLKPEMDEKGNLTTAGFACSQCGQPLFVYKLEQVSEKGKAYTNYFGRCNVAEHEKLILLYQLKPEKDSDEAVTYSLGKFGQRALDFYSIHVTKESTHPVKPLAQIAGNRYASHPVGKALSDACMGTIASFLSKYQDIIIEHQKVVKGNQKRLESLRELAGKENLEYPSVTLPPQPHTKEGVDAYNEVIARVRWWVNLNLWQKLKLSRDDAKPLLRLKGFPSFPLVERQANEVDWWDMVCNVKKLINEKKEDGKVFWQNLAGYKRQEALRPYLSSEEDRKKGKKFARYQLGDLLLHLEKKHGEDWGKVYDEAWERIDKKVEGLSKHIKLEEERRSEDAQSKAALTDWLRAKASFVIEGLKEADKDEFCRCELKLQKWYGDLRGKPFAIEAENSILDISGFSKQYNCAFIWQKDGVKKLNLYLIINYFKGGKLRFKKIKPEAFEANRFYTVINKKSGEIVPMEVNFNFDDPNLIILPLAFGKRQGREFIWNDLLSLETGSLKLANGRVIEKTLYNRRTRQDEPALFVALTFERREVLDSSNIKPMNLIGVDRGENIPAVIALTDPEGCPLSRFKDSLGNPTHILRIGESYKEKQRTIQAKKEVEQRRAGGYSRKYASKAKNLADDMVRNTARDLLYYAVTQDAMLIFENLSRGFGRQGKRTFMAERQYTRMEDWLTAKLAYEGLPSKTYLSKTLAQYTSKTCSNCGFTITSADYDRVLEKLKKTATGWMTTINGKELKVEGQITYYNRYKRQNVVKDLSVELDRLSEESVNNDISSWTKGRSGEALSLLKKRFSHRPVQEKFVCLNCGFETHADEQAALNIARSWLFLRSQEYKKYQTNKTTGNTDKRAFVETWQSFYRKKLKEVWKPAV

SEQ ID NO: 34899 - protein, 978 aa, synthetic construct
  REGION 1..978: note = engineered CasX variant
QEIKRINKIRRRLVKDSNTKKAGKTGPMKTLLVRVMTPDLRERLENLRKKPENIPQPISNTSRANLNKLLTDYTEMKKAILHVYWEEFQKDPVGLMSRVAQPASKKIDQNKLKPEMDEKGNLTTAGFACSQCGQPLFVYKLEQVSEKGKAYTNYFGRCNVAEHEKLILLYQLKPEKDSDEAVTYSLGKFGQRALDFYSIHVTKESTHPVKPLAQIAGNRYASSPVGKALSDACMGTIASFLSKYQDIIIEHQKVVKGNQKRLESLRELAGKENLEYPSVTLPPQPHTKEGVDAYNEVIARVRWWVNLNLWQKLKLSRDDAKPLLRLKGFPSFPLVERQANEVDWWDMVCNVKKLINEKKEDGKVFWQNLAGYKRQEALRPYLSSEEDRKKGKKFARYQLGDLLLHLEKKHGEDWGKVYDEAWERIDKKVEGLSKHIKLEEERRSEDAQSKAALTDWLRAKASFVIEGLKEADKDEFCRCELKLQKWYGDLRGKPFAIEAENSILDISGFSKQYNCAFIWQKDGVKKLNLYLIINYFKGGKLRFKKIKPEAFEANRFYTVINKKSGEIVPMEVNFNFDDPNLIILPLAFGKRQGREFIWNDLLSLETGSLKLANGRVIEKTLYNRRTRQDEPALFVALTFERREVLDSSNIKPMNLIGVDRGENIPAVIALTDPEGCPLSRFKDSLGNPTHILRIGESYKEKQRTIQAKKEVEQRRAGGYSRKYASKAKNLADDMVRNTARDLLYYAVTQDAMLIFENLSRGFGRQGKRTFMAERQYTRMEDWLTAKLAYEGLPSKTYLSKTLAQYTSKTCSNCGFTITSADYDRVLEKLKKTATGWMTTINGKELKVEGQITYYNRYKRQNVVKDLSVELDRLSEESVNNDISSWTKGRSGEALSLLKKRFSHRPVQEKFVCLNCGFETHADEQAALNIARSWLFLRSQEYKKYQTNKTTGNTDKRAFVETWQSFYRKKLKEVWKPAV

SEQ ID NO: 34900 - protein, 978 aa, synthetic construct
  REGION 1..978: note = engineered CasX variant
QEIKRINKIRRRLVKDSNTKKAGKTGPMKTLLVRVMTPDLRERLENLRKKPENIPQPISNTSRANLNKLLTDYTEMKKAILHVYWEEFQKDPVGLMSRVAQPASKKIDQNKLKPEMDEKGNLTTAGFACSQCGQPLFVYKLEQVSEKGKAYTNYFGRCNVAEHEKLILLYQLKPEKDSDEAVTYSLGKFGQRALDFYSIHVTKESTHPVKPLAQIAGNRYASTPVGKALSDACMGTIASFLSKYQDIIIEHQKVVKGNQKRLESLRELAGKENLEYPSVTLPPQPHTKEGVDAYNEVIARVRWWVNLNLWQKLKLSRDDAKPLLRLKGFPSFPLVERQANEVDWWDMVCNVKKLINEKKEDGKVFWQNLAGYKRQEALRPYLSSEEDRKKGKKFARYQLGDLLLHLEKKHGEDWGKVYDEAWERIDKKVEGLSKHIKLEEERRSEDAQSKAALTDWLRAKASFVIEGLKEADKDEFCRCELKLQKWYGDLRGKPFAIEAENSILDISGFSKQYNCAFIWQKDGVKKLNLYLIINYFKGGKLRFKKIKPEAFEANRFYTVINKKSGEIVPMEVNFNFDDPNLIILPLAFGKRQGREFIWNDLLSLETGSLKLANGRVIEKTLYNRRTRQDEPALFVALTFERREVLDSSNIKPMNLIGVDRGENIPAVIALTDPEGCPLSRFKDSLGNPTHILRIGESYKEKQRTIQAKKEVEQRRAGGYSRKYASKAKNLADDMVRNTARDLLYYAVTQDAMLIFENLSRGFGRQGKRTFMAERQYTRMEDWLTAKLAYEGLPSKTYLSKTLAQYTSKTCSNCGFTITSADYDRVLEKLKKTATGWMTTINGKELKVEGQITYYNRYKRQNVVKDLSVELDRLSEESVNNDISSWTKGRSGEALSLLKKRFSHRPVQEKFVCLNCGFETHADEQAALNIARSWLFLRSQEYKKYQTNKTTGNTDKRAFVETWQSFYRKKLKEVWKPAV

SEQ ID NO: 34901 - protein, 978 aa, synthetic construct
  REGION 1..978: note = engineered CasX variant
QEIKRINKIRRRLVKDSNTKKAGKTGPMKTLLVRVMTPDLRERLENLRKKPENIPQPISNTSRANLNKLLTDYTEMKKAILHVYWEEFQKDPVGLMSRVAQPASKKIDQNKLKPEMDEKGNLTTAGFACSQCGQPLFVYKLEQVSEKGKAYTNYFGRCNVAEHEKLILLYQLKPEKDSDEAVTYSLGKFGQRALDFYSIHVTKESTHPVKPLAQIAGNRYASAPVGKALSDACMGTIASFLSKYQDIIIEHQKVVKGNQKRLESLRELAGKENLEYPSVTLPPQPHTKEGVDAYNEVIARVRWWVNLNLWQKLKLSRDDAKPLLRLKGFPSFPLVERQANEVDWWDMVCNVKKLINEKKEDGKVFWQNLAGYKRQEALRPYLSSEEDRKKGKKFARYQLGDLLLHLEKKHGEDWGKVYDEAWERIDKKVEGLSKHIKLEEERRSEDAQSKAALTDWLRAKASFVIEGLKEADKDEFCRCELKLQKWYGDLRGKPFAIEAENSILDISGFSKQYNCAFIWQKDGVKKLNLYLIINYFKGGKLRFKKIKPEAFEANRFYTVINKKSGEIVPMEVNFNFDDPNLIILPLAFGKRQGREFIWNDLLSLETGSLKLANGRVIEKTLYNRRTRQDEPALFVALTFERREVLDSSNIKPMNLIGVDRGENIPAVIALTDPEGCPLSRFKDSLGNPTHILRIGESYKEKQRTIQAKKEVEQRRAGGYSRKYASKAKNLADDMVRNTARDLLYYAVTQDAMLIFENLSRGFGRQGKRTFMAERQYTRMEDWLTAKLAYEGLPSKTYLSKTLAQYTSKTCSNCGFTITSADYDRVLEKLKKTATGWMTTINGKELKVEGQITYYNRYKRQNVVKDLSVELDRLSEESVNNDISSWTKGRSGEALSLLKKRFSHRPVQEKFVCLNCGFETHADEQAALNIARSWLFLRSQEYKKYQTNKTTGNTDKRAFVETWQSFYRKKLKEVWKPAV

SEQ ID NO: 34902 - protein, 978 aa, synthetic construct
  REGION 1..978: note = engineered CasX variant
QEIKRINKIRRRLVKDSNTKKAGKTGPMKTLLVRVMTPDLRERLENLRKKPENIPQPISNTSRANLNKLLTDYTEMKKAILHVYWEEFQKDPVGLMSRVAQPASKKIDQNKLKPEMDEKGNLTTAGFACSQCGQPLFVYKLEQVSEKGKAYTNYFGRCNVAEHEKLILLYQLKPEKDSDEAVTYSLGKFGQRALDFYSIHVTKESTHPVKPLAQIAGNRYASVPVGKALSDACMGTIASFLSKYQDIIIEHQKVVKGNQKRLESLRELAGKENLEYPSVTLPPQPHTKEGVDAYNEVIARVRWWVNLNLWQKLKLSRDDAKPLLRLKGFPSFPLVERQANEVDWWDMVCNVKKLINEKKEDGKVFWQNLAGYKRQEALRPYLSSEEDRKKGKKFARYQLGDLLLHLEKKHGEDWGKVYDEAWERIDKKVEGLSKHIKLEEERRSEDAQSKAALTDWLRAKASFVIEGLKEADKDEFCRCELKLQKWYGDLRGKPFAIEAENSILDISGFSKQYNCAFIWQKDGVKKLNLYLIINYFKGGKLRFKKIKPEAFEANRFYTVINKKSGEIVPMEVNFNFDDPNLIILPLAFGKRQGREFIWNDLLSLETGSLKLANGRVIEKTLYNRRTRQDEPALFVALTFERREVLDSSNIKPMNLIGVDRGENIPAVIALTDPEGCPLSRFKDSLGNPTHILRIGESYKEKQRTIQAKKEVEQRRAGGYSRKYASKAKNLADDMVRNTARDLLYYAVTQDAMLIFENLSRGFGRQGKRTFMAERQYTRMEDWLTAKLAYEGLPSKTYLSKTLAQYTSKTCSNCGFTITSADYDRVLEKLKKTATGWMTTINGKELKVEGQITYYNRYKRQNVVKDLSVELDRLSEESVNNDISSWTKGRSGEALSLLKKRFSHRPVQEKFVCLNCGFETHADEQAALNIARSWLFLRSQEYKKYQTNKTTGNTDKRAFVETWQSFYRKKLKEVWKPAV

SEQ ID NO: 34903 - protein, 978 aa, synthetic construct
  REGION 1..978: note = engineered CasX variant
QEIKRINKIRRRLVKDSNTKKAGKTGPMKTLLVRVMTPDLRERLENLRKKPENIPQPISNTSRANLNKLLTDYTEMKKAILHVYWEEFQKDPVGLMSRVAQPASKKIDQNKLKPEMDEKGNLTTAGFACSQCGQPLFVYKLEQVSEKGKAYTNYFGRCNVAEHEKLIKLYQLKPEKDSDEAVTYSLGKFGQRALDFYSIHVTKESTHPVKPLAQIAGNRYASGPVGKALSDACMGTIASFLSKYQDIIIEHQKVVKGNQKRLESLRELAGKENLEYPSVTLPPQPHTKEGVDAYNEVIARVRWWVNLNLWQKLKLSRDDAKPLLRLKGFPSFPLVERQANEVDWWDMVCNVKKLINEKKEDGKVFWQNLAGYKRQEALRPYLSSEEDRKKGKKFARYQLGDLLLHLEKKHGEDWGKVYDEAWERIDKKVEGLSKHIKLEEERRSEDAQSKAALTDWLRAKASFVIEGLKEADKDEFCRCELKLQKWYGDLRGKPFAIEAENSILDISGFSKQYNCAFIWQKDGVKKLNLYLIINYFKGGKLRFKKIKPEAFEANRFYTVINKKSGEIVPMEVNFNFDDPNLIILPLAFGKRQGREFIWNDLLSLETGSLKLANGRVIEKTLYNRRTRQDEPALFVALTFERREVLDSSNIKPMNLIGVDRGENIPAVIALTDPEGCPLSRFKDSLGNPTHILRIGESYKEKQRTIQAKKEVEQRRAGGYSRKYASKAKNLADDMVRNTARDLLYYAVTQDAMLIFENLSRGFGRQGKRTFMAERQYTRMEDWLTAKLAYEGLPSKTYLSKTLAQYTSKTCSNCGFTITSADYDRVLEKLKKTATGWMTTINGKELKVEGQITYYNRYKRQNVVKDLSVELDRLSEESVNNDISSWTKGRSGEALSLLKKRFSHRPVQEKFVCLNCGFETHADEQAALNIARSWLFLRSQEYKKYQTNKTTGNTDKRAFVETWQSFYRKKLKEVWKPAV

SEQ ID NO: 34904 - protein, 977 aa, synthetic construct
  REGION 1..977: note = engineered CasX variant
QEIKRINKIRRRLVKDSNTKKAGKTGPMKTLLVRVMTPDLRERLENLRKKPENIPQPISNTSRANLNKLLTDYTEMKKAILHVYWEEFQKDPVGLMSRVAQPASKKIDQNKLKPEMDEKGNLTTAGFACSQCGQPLFVYKLEQVSEKGKAYTNYFGRCNVAEHEKLILLYQLKPEKDSDEAVTYSLGKFGQRALDFYSIHVTKESTHPVKPLAQIAGNRYASPVGKALSDACMGTIASFLSKYQDIIIEHQKVVKGNQKRLESLRELAGKENLEYPSVTLPPQPHTKEGVDAYNEVIARVRWWVNLNLWQKLKLSRDDAKPLLRLKGFPSFPLVERQANEVDWWDMVCNVKKLINEKKEDGKVFWQNLAGYKRQEALRPYLSSEEDRKKGKKFARYQLGDLLLHLEKKHGEDWGKVYDEAWERIDKKVEGLSKHIKLEEERRSEDAQSKAALTDWLRAKASFVIEGLKEADKDEFCRCELKLQKWYGDLRGKPFAIEAENSILDISGFSKQYNCAFIWQKDGVKKLNLYLIINYFKGGKLRFKKIKPEAFEANRFYTVINKKSGEIVPMEVNFNFDDPNLIILPLAFGKRQGREFIWNDLLSLETGSLKLANGRVIEKTLYNRRTRQDEPALFVALTFERREVLDSSNIKPMNLIGVDRGENIPAVIALTDPEGCPLSRFKDSLGNPTHILRIGESYKEKQRTIQAKKEVEQRRAGGYSRKYASKAKNLADDMVRNTARDLLYYAVTQDAMLIFENLSRGFGRQGKRTFMAERQYTRMEDWLTAKLAYEGLPSKTYLSKTLAQYTSKTCSNCGFTITSADYDRVLEKLKKTATGWMTTINGKELKVEGQITYYNRYKRQNVVKDLSVELDRLSEESVNNDISSWTKGRSGEALSLLKKRFSHRPVQEKFVCLNCGFETHADEQAALNIARSWLFLRSQEYKKYQTNKTTGNTDKRAFVETWQSFYRKKLKEVWKPAV

SEQ ID NO: 34905 - protein, 979 aa, synthetic construct
  REGION 1..979: note = engineered CasX variant
QEIKRINKIRRRLVKDSNTKKAGKTGPMKTLLVRVMTPDLRERLENLRKKPENIPQPISNTSRANLNKLLTDYTEMKKAILHVYWEEFQKDPVGLMSRVAQPASKKIDQNKLKPEMDEKGNLTTAGFACSQCGQPLFVYKLEQVSEKGKAYTNYFGRCNVAEHEKLILLYQLKPEKDSDEAVTYSLGKFGQRALDFYSIHVTKESTHPVKPLAQIAGNRYASYPVGKALSDACMGTIASFLSKYQDIIIEHQKVVKGNQKRLESLRELAGKENLEYPSVTLPPQPHTKEGVDAYNEVIARVRMWVNLNLWQKLKLSRDDAKPLLRLKGFPSFPLVERQQANEVDWWDMVCNVKKLINEKKEDGKVFWQNLAGYKRQEALRPYLSSEEDRKKGKKFARYQLGDLLLHLEKKHGEDWGKVYDEAWERIDKKVEGLSKHIKLEEERRSEDAQSKAALTDWLRAKASFVIEGLKEADKDEFCRCELKLQKWYGDLRGKPFAIEAENSILDISGFSKQYNCAFIWQKDGVKKLNLYLIINYFKGGKLRFKKIKPEAFEANRFYTVINKKSGEIVPMEVNFNFDDPNLIILPLAFGKRQGREFIWNDLLSLETGSLKLANGRVIEKTLYNRRTRQDEPALFVALTFERREVLDSSNIKPMNLIGVDRGENIPAVIALTDPEGCPLSRFKDSLGNPTHILRIGESYKEKQRTIQAKKEVEQRRAGGYSRKYASKAKNLADDMVRNTARDLLYYAVTQDAMLIFENLSRGFGRQGKRTFMAERQYTRMEDWLTAKLAYEGLPSKTYLSKTLAQYTSKTCSNCGFTITSADYDRVLEKLKKTATGWMTTINGKELKVEGQITYYNRYKRQNVVKDLSVELDRLSEESVNNDISSWTKGRSGEALSLLKKRFSHRPVQEKFVCLNCGFETHADEQAALNIARSWLFLRSQEYKKYQTNKTTGNTDKRAFVETWQSFYRKKLKEVWKPAV

SEQ ID NO: 34906 - protein, 979 aa, synthetic construct
  REGION 1..979: note = engineered CasX variant
QEIKRINKIRRRLVKDSNTKKAGKTGPMKTLLVRVMTPDLRERLENLRKKPENIPQPISNTSRANLNKLLTDYTEMKKAILHVYWEEFQKDPVGLMSRVAQPASKKIDQNKLKPEMDEKGNLTTAGFACSQCGQPLFVYKLEQVSEKGKAYTNYFGRCNVAEHEKLILLYQLKPEKDSDEAVTYSLGKFGQRALDFYSIHVTKESTHPVKPLAQIAGNRYASHPVGKALSDACMGTIASFLSKYQDIIIEHQKVVKGNQKRLESLRELAGKENLEYPSVTLPPQPHTKEGVDAYNEVIARVRMWVNLNLWQKLKLSRDDAKPLLRLKGFPSFPLVERQQANEVDWWDMVCNVKKLINEKKEDGKVFWQNLAGYKRQEALRPYLSSEEDRKKGKKFARYQLGDLLLHLEKKHGEDWGKVYDEAWERIDKKVEGLSKHIKLEEERRSEDAQSKAALTDWLRAKASFVIEGLKEADKDEFCRCELKLQKWYGDLRGKPFAIEAENSILDISGFSKQYNCAFIWQKDGVKKLNLYLIINYFKGGKLRFKKIKPEAFEANRFYTVINKKSGEIVPMEVNFNFDDPNLIILPLAFGKRQGREFIWNDLLSLETGSLKLANGRVIEKTLYNRRTRQDEPALFVALTFERREVLDSSNIKPMNLIGVDRGENIPAVIALTDPEGCPLSRFKDSLGNPTHILRIGESYKEKQRTIQAKKEVEQRRAGGYSRKYASKAKNLADDMVRNTARDLLYYAVTQDAMLIFENLSRGFGRQGKRTFMAERQYTRMEDWLTAKLAYEGLPSKTYLSKTLAQYTSKTCSNCGFTITSADYDRVLEKLKKTATGWMTTINGKELKVEGQITYYNRYKRQNVVKDLSVELDRLSEESVNNDISSWTKGRSGEALSLLKKRFSHRPVQEKFVCLNCGFETHADEQAALNIARSWLFLRSQEYKKYQTNKTTGNTDKRAFVETWQSFYRKKLKEVWKPAV

SEQ ID NO: 34907 - protein, 979 aa, synthetic construct
  REGION 1..979: note = engineered CasX variant
QEIKRINKIRRRLVKDSNTKKAGKTGPMKTLLVRVMTPDLRERLENLRKKPENIPQPISNTSRANLNKLLTDYTEMKKAILHVYWEEFQKDPVGLMSRVAQPASKKIDQNKLKPEMDEKGNLTTAGFACSQCGQPLFVYKLEQVSEKGKAYTNYFGRCNVAEHEKLILLYQLKPEKDSDEAVTYSLGKFGQRALDFYSIHVTKESTHPVKPLAQIAGNRYASSPVGKALSDACMGTIASFLSKYQDIIIEHQKVVKGNQKRLESLRELAGKENLEYPSVTLPPQPHTKEGVDAYNEVIARVRMWVNLNLWQKLKLSRDDAKPLLRLKGFPSFPLVERQQANEVDWWDMVCNVKKLINEKKEDGKVFWQNLAGYKRQEALRPYLSSEEDRKKGKKFARYQLGDLLLHLEKKHGEDWGKVYDEAWERIDKKVEGLSKHIKLEEERRSEDAQSKAALTDWLRAKASFVIEGLKEADKDEFCRCELKLQKWYGDLRGKPFAIEAENSILDISGFSKQYNCAFIWQKDGVKKLNLYLIINYFKGGKLRFKKIKPEAFEANRFYTVINKKSGEIVPMEVNFNFDDPNLIILPLAFGKRQGREFIWNDLLSLETGSLKLANGRVIEKTLYNRRTRQDEPALFVALTFERREVLDSSNIKPMNLIGVDRGENIPAVIALTDPEGCPLSRFKDSLGNPTHILRIGESYKEKQRTIQAKKEVEQRRAGGYSRKYASKAKNLADDMVRNTARDLLYYAVTQDAMLIFENLSRGFGRQGKRTFMAERQYTRMEDWLTAKLAYEGLPSKTYLSKTLAQYTSKTCSNCGFTITSADYDRVLEKLKKTATGWMTTINGKELKVEGQITYYNRYKRQNVVKDLSVELDRLSEESVNNDISSWTKGRSGEALSLLKKRFSHRPVQEKFVCLNCGFETHADEQAALNIARSWLFLRSQEYKKYQTNKTTGNTDKRAFVETWQSFYRKKLKEVWKPAV

SEQ ID NO: 34908 - protein, 979 aa, synthetic construct
  REGION 1..979: note = engineered CasX variant
QEIKRINKIRRRLVKDSNTKKAGKTGPMKTLLVRVMTPDLRERLENLRKKPENIPQPISNTSRANLNKLLTDYTEMKKAILHVYWEEFQKDPVGLMSRVAQPASKKIDQNKLKPEMDEKGNLTTAGFACSQCGQPLFVYKLEQVSEKGKAYTNYFGRCNVAEHEKLILLYQLKPEKDSDEAVTYSLGKFGQRALDFYSIHVTKESTHPVKPLAQIAGNRYASTPVGKALSDACMGTIASFLSKYQDIIIEHQKVVKGNQKRLESLRELAGKENLEYPSVTLPPQPHTKEGVDAYNEVIARVRMWVNLNLWQKLKLSRDDAKPLLRLKGFPSFPLVERQQANEVDWWDMVCNVKKLINEKKEDGKVFWQNLAGYKRQEALRPYLSSEEDRKKGKKFARYQLGDLLLHLEKKHGEDWGKVYDEAWERIDKKVEGLSKHIKLEEERRSEDAQSKAALTDWLRAKASFVIEGLKEADKDEFCRCELKLQKWYGDLRGKPFAIEAENSILDISGFSKQYNCAFIWQKDGVKKLNLYLIINYFKGGKLRFKKIKPEAFEANRFYTVINKKSGEIVPMEVNFNFDDPNLIILPLAFGKRQGREFIWNDLLSLETGSLKLANGRVIEKTLYNRRTRQDEPALFVALTFERREVLDSSNIKPMNLIGVDRGENIPAVIALTDPEGCPLSRFKDSLGNPTHILRIGESYKEKQRTIQAKKEVEQRRAGGYSRKYASKAKNLADDMVRNTARDLLYYAVTQDAMLIFENLSRGFGRQGKRTFMAERQYTRMEDWLTAKLAYEGLPSKTYLSKTLAQYTSKTCSNCGFTITSADYDRVLEKLKKTATGWMTTINGKELKVEGQITYYNRYKRQNVVKDLSVELDRLSEESVNNDISSWTKGRSGEALSLLKKRFSHRPVQEKFVCLNCGFETHADEQAALNIARSWLFLRSQEYKKYQTNKTTGNTDKRAFVETWQSFYRKKLKEVWKPAV

SEQ ID NO: 34909 - protein, 979 aa, synthetic construct
  REGION 1..979: note = engineered CasX variant
QEIKRINKIRRRLVKDSNTKKAGKTGPMKTLLVRVMTPDLRERLENLRKKPENIPQPISNTSRANLNKLLTDYTEMKKAILHVYWEEFQKDPVGLMSRVAQPASKKIDQNKLKPEMDEKGNLTTAGFACSQCGQPLFVYKLEQVSEKGKAYTNYFGRCNVAEHEKLILLYQLKPEKDSDEAVTYSLGKFGQRALDFYSIHVTKESTHPVKPLAQIAGNRYASAPVGKALSDACMGTIASFLSKYQDIIIEHQKVVKGNQKRLESLRELAGKENLEYPSVTLPPQPHTKEGVDAYNEVIARVRMWVNLNLWQKLKLSRDDAKPLLRLKGFPSFPLVERQQANEVDWWDMVCNVKKLINEKKEDGKVFWQNLAGYKRQEALRPYLSSEEDRKKGKKFARYQLGDLLLHLEKKHGEDWGKVYDEAWERIDKKVEGLSKHIKLEEERRSEDAQSKAALTDWLRAKASFVIEGLKEADKDEFCRCELKLQKWYGDLRGKPFAIEAENSILDISGFSKQYNCAFIWQKDGVKKLNLYLIINYFKGGKLRFKKIKPEAFEANRFYTVINKKSGEIVPMEVNFNFDDPNLIILPLAFGKRQGREFIWNDLLSLETGSLKLANGRVIEKTLYNRRTRQDEPALFVALTFERREVLDSSNIKPMNLIGVDRGENIPAVIALTDPEGCPLSRFKDSLGNPTHILRIGESYKEKQRTIQAKKEVEQRRAGGYSRKYASKAKNLADDMVRNTARDLLYYAVTQDAMLIFENLSRGFGRQGKRTFMAERQYTRMEDWLTAKLAYEGLPSKTYLSKTLAQYTSKTCSNCGFTITSADYDRVLEKLKKTATGWMTTINGKELKVEGQITYYNRYKRQNVVKDLSVELDRLSEESVNNDISSWTKGRSGEALSLLKKRFSHRPVQEKFVCLNCGFETHADEQAALNIARSWLFLRSQEYKKYQTNKTTGNTDKRAFVETWQSFYRKKLKEVWKPAV

SEQ ID NO: 34910 - protein, 979 aa, synthetic construct
  REGION 1..979: note = engineered CasX variant
QEIKRINKIRRRLVKDSNTKKAGKTGPMKTLLVRVMTPDLRERLENLRKKPENIPQPISNTSRANLNKLLTDYTEMKKAILHVYWEEFQKDPVGLMSRVAQPASKKIDQNKLKPEMDEKGNLTTAGFACSQCGQPLFVYKLEQVSEKGKAYTNYFGRCNVAEHEKLILLYQLKPEKDSDEAVTYSLGKFGQRALDFYSIHVTKESTHPVKPLAQIAGNRYASVPVGKALSDACMGTIASFLSKYQDIIIEHQKVVKGNQKRLESLRELAGKENLEYPSVTLPPQPHTKEGVDAYNEVIARVRMWVNLNLWQKLKLSRDDAKPLLRLKGFPSFPLVERQQANEVDWWDMVCNVKKLINEKKEDGKVFWQNLAGYKRQEALRPYLSSEEDRKKGKKFARYQLGDLLLHLEKKHGEDWGKVYDEAWERIDKKVEGLSKHIKLEEERRSEDAQSKAALTDWLRAKASFVIEGLKEADKDEFCRCELKLQKWYGDLRGKPFAIEAENSILDISGFSKQYNCAFIWQKDGVKKLNLYLIINYFKGGKLRFKKIKPEAFEANRFYTVINKKSGEIVPMEVNFNFDDPNLIILPLAFGKRQGREFIWNDLLSLETGSLKLANGRVIEKTLYNRRTRQDEPALFVALTFERREVLDSSNIKPMNLIGVDRGENIPAVIALTDPEGCPLSRFKDSLGNPTHILRIGESYKEKQRTIQAKKEVEQRRAGGYSRKYASKAKNLADDMVRNTARDLLYYAVTQDAMLIFENLSRGFGRQGKRTFMAERQYTRMEDWLTAKLAYEGLPSKTYLSKTLAQYTSKTCSNCGFTITSADYDRVLEKLKKTATGWMTTINGKELKVEGQITYYNRYKRQNVVKDLSVELDRLSEESVNNDISSWTKGRSGEALSLLKKRFSHRPVQEKFVCLNCGFETHADEQAALNIARSWLFLRSQEYKKYQTNKTTGNTDKRAFVETWQSFYRKKLKEVWKPAV

SEQ ID NO: 34911 - protein, 979 aa, synthetic construct
  REGION 1..979: note = engineered CasX variant
QEIKRINKIRRRLVKDSNTKKAGKTGPMKTLLVRVMTPDLRERLENLRKKPENIPQPISNTSRANLNKLLTDYTEMKKAILHVYWEEFQKDPVGLMSRVAQPASKKIDQNKLKPEMDEKGNLTTAGFACSQCGQPLFVYKLEQVSEKGKAYTNYFGRCNVAEHEKLIKLYQLKPEKDSDEAVTYSLGKFGQRALDFYSIHVTKESTHPVKPLAQIAGNRYASGPVGKALSDACMGTIASFLSKYQDIIIEHQKVVKGNQKRLESLRELAGKENLEYPSVTLPPQPHTKEGVDAYNEVIARVRMWVNLNLWQKLKLSRDDAKPLLRLKGFPSFPLVERQQANEVDWWDMVCNVKKLINEKKEDGKVFWQNLAGYKRQEALRPYLSSEEDRKKGKKFARYQLGDLLLHLEKKHGEDWGKVYDEAWERIDKKVEGLSKHIKLEEERRSEDAQSKAALTDWLRAKASFVIEGLKEADKDEFCRCELKLQKWYGDLRGKPFAIEAENSILDISGFSKQYNCAFIWQKDGVKKLNLYLIINYFKGGKLRFKKIKPEAFEANRFYTVINKKSGEIVPMEVNFNFDDPNLIILPLAFGKRQGREFIWNDLLSLETGSLKLANGRVIEKTLYNRRTRQDEPALFVALTFERREVLDSSNIKPMNLIGVDRGENIPAVIALTDPEGCPLSRFKDSLGNPTHILRIGESYKEKQRTIQAKKEVEQRRAGGYSRKYASKAKNLADDMVRNTARDLLYYAVTQDAMLIFENLSRGFGRQGKRTFMAERQYTRMEDWLTAKLAYEGLPSKTYLSKTLAQYTSKTCSNCGFTITSADYDRVLEKLKKTATGWMTTINGKELKVEGQITYYNRYKRQNVVKDLSVELDRLSEESVNNDISSWTKGRSGEALSLLKKRFSHRPVQEKFVCLNCGFETHADEQAALNIARSWLFLRSQEYKKYQTNKTTGNTDKRAFVETWQSFYRKKLKEVWKPAV

SEQ ID NO: 34912 - protein, 978 aa, synthetic construct
  REGION 1..978: note = engineered CasX variant
QEIKRINKIRRRLVKDSNTKKAGKTGPMKTLLVRVMTPDLRERLENLRKKPENIPQPISNTSRANLNKLLTDYTEMKKAILHVYWEEFQKDPVGLMSRVAQPASKKIDQNKLKPEMDEKGNLTTAGFACSQCGQPLFVYKLEQVSEKGKAYTNYFGRCNVAEHEKLILLYQLKPEKDSDEAVTYSLGKFGQRALDFYSIHVTKESTHPVKPLAQIAGNRYASPVGKALSDACMGTIASFLSKYQDIIIEHQKVVKGNQKRLESLRELAGKENLEYPSVTLPPQPHTKEGVDAYNEVIARVRMWVNLNLWQKLKLSRDDAKPLLRLKGFPSFPLVERQQANEVDWWDMVCNVKKLINEKKEDGKVFWQNLAGYKRQEALRPYLSSEEDRKKGKKFARYQLGDLLLHLEKKHGEDWGKVYDEAWERIDKKVEGLSKHIKLEEERRSEDAQSKAALTDWLRAKASFVIEGLKEADKDEFCRCELKLQKWYGDLRGKPFAIEAENSILDISGFSKQYNCAFIWQKDGVKKLNLYLIINYFKGGKLRFKKIKPEAFEANRFYTVINKKSGEIVPMEVNFNFDDPNLIILPLAFGKRQGREFIWNDLLSLETGSLKLANGRVIEKTLYNRRTRQDEPALFVALTFERREVLDSSNIKPMNLIGVDRGENIPAVIALTDPEGCPLSRFKDSLGNPTHILRIGESYKEKQRTIQAKKEVEQRRAGGYSRKYASKAKNLADDMVRNTARDLLYYAVTQDAMLIFENLSRGFGRQGKRTFMAERQYTRMEDWLTAKLAYEGLPSKTYLSKTLAQYTSKTCSNCGFTITSADYDRVLEKLKKTATGWMTTINGKELKVEGQITYYNRYKRQNVVKDLSVELDRLSEESVNNDISSWTKGRSGEALSLLKKRFSHRPVQEKFVCLNCGFETHADEQAALNIARSWLFLRSQEYKKYQTNKTTGNTDKRAFVETWQSFYRKKLKEVWKPAV

SEQ ID NO: 34913 - protein, 979 aa, synthetic construct
  REGION 1..979: note = engineered CasX variant
QEIKRINKIRRRLVKDSNTKKAGKTGPMKTLLVRVMTPDLRERLENLRKKPENIPQPISNTSRANLNKLLTDYTEMKKAILHVYWEEFQKDPVGLMSRVAQPASKKIDQNKLKPEMDEKGNLTTAGFACSQCGQPLFVYKLEQVSEKGKAYTNYFGRCNVAEHEKLILLYQLKPEKDSDEAVTYSLGKFGQRALDFYSIHVTKESTHPVKPLAQIAGNRYASYPVGKALSDACMGTIASFLSKYQDIIIEHQKVVKGNQKRLESLRELAGKENLEYPSVTLPPQPHTKEGVDAYNEVIARVRMWVNLNLWQKLKLSRDDAKPLLRLKGFPSFPLVERQANAEVDWWDMVCNVKKLINEKKEDGKVFWQNLAGYKRQEALRPYLSSEEDRKKGKKFARYQLGDLLLHLEKKHGEDWGKVYDEAWERIDKKVEGLSKHIKLEEERRSEDAQSKAALTDWLRAKASFVIEGLKEADKDEFCRCELKLQKWYGDLRGKPFAIEAENSILDISGFSKQYNCAFIWQKDGVKKLNLYLIINYFKGGKLRFKKIKPEAFEANRFYTVINKKSGEIVPMEVNFNFDDPNLIILPLAFGKRQGREFIWNDLLSLETGSLKLANGRVIEKTLYNRRTRQDEPALFVALTFERREVLDSSNIKPMNLIGVDRGENIPAVIALTDPEGCPLSRFKDSLGNPTHILRIGESYKEKQRTIQAKKEVEQRRAGGYSRKYASKAKNLADDMVRNTARDLLYYAVTQDAMLIFENLSRGFGRQGKRTFMAERQYTRMEDWLTAKLAYEGLPSKTYLSKTLAQYTSKTCSNCGFTITSADYDRVLEKLKKTATGWMTTINGKELKVEGQITYYNRYKRQNVVKDLSVELDRLSEESVNNDISSWTKGRSGEALSLLKKRFSHRPVQEKFVCLNCGFETHADEQAALNIARSWLFLRSQEYKKYQTNKTTGNTDKRAFVETWQSFYRKKLKEVWKPAV

SEQ ID NO: 34914 - protein, 979 aa, synthetic construct
  REGION 1..979: note = engineered CasX variant
QEIKRINKIRRRLVKDSNTKKAGKTGPMKTLLVRVMTPDLRERLENLRKKPENIPQPISNTSRANLNKLLTDYTEMKKAILHVYWEEFQKDPVGLMSRVAQPASKKIDQNKLKPEMDEKGNLTTAGFACSQCGQPLFVYKLEQVSEKGKAYTNYFGRCNVAEHEKLILLYQLKPEKDSDEAVTYSLGKFGQRALDFYSIHVTKESTHPVKPLAQIAGNRYASHPVGKALSDACMGTIASFLSKYQDIIIEHQKVVKGNQKRLESLRELAGKENLEYPSVTLPPQPHTKEGVDAYNEVIARVRMWVNLNLWQKLKLSRDDAKPLLRLKGFPSFPLVERQANAEVDWWDMVCNVKKLINEKKEDGKVFWQNLAGYKRQEALRPYLSSEEDRKKGKKFARYQLGDLLLHLEKKHGEDWGKVYDEAWERIDKKVEGLSKHIKLEEERRSEDAQSKAALTDWLRAKASFVIEGLKEADKDEFCRCELKLQKWYGDLRGKPFAIEAENSILDISGFSKQYNCAFIWQKDGVKKLNLYLIINYFKGGKLRFKKIKPEAFEANRFYTVINKKSGEIVPMEVNFNFDDPNLIILPLAFGKRQGREFIWNDLLSLETGSLKLANGRVIEKTLYNRRTRQDEPALFVALTFERREVLDSSNIKPMNLIGVDRGENIPAVIALTDPEGCPLSRFKDSLGNPTHILRIGESYKEKQRTIQAKKEVEQRRAGGYSRKYASKAKNLADDMVRNTARDLLYYAVTQDAMLIFENLSRGFGRQGKRTFMAERQYTRMEDWLTAKLAYEGLPSKTYLSKTLAQYTSKTCSNCGFTITSADYDRVLEKLKKTATGWMTTINGKELKVEGQITYYNRYKRQNVVKDLSVELDRLSEESVNNDISSWTKGRSGEALSLLKKRFSHRPVQEKFVCLNCGFETHADEQAALNIARSWLFLRSQEYKKYQTNKTTGNTDKRAFVETWQSFYRKKLKEVWKPAV

SEQ ID NO: 34915 - protein, 979 aa, synthetic construct
  REGION 1..979: note = engineered CasX variant
QEIKRINKIRRRLVKDSNTKKAGKTGPMKTLLVRVMTPDLRERLENLRKKPENIPQPISNTSRANLNKLLTDYTEMKKAILHVYWEEFQKDPVGLMSRVAQPASKKIDQNKLKPEMDEKGNLTTAGFACSQCGQPLFVYKLEQVSEKGKAYTNYFGRCNVAEHEKLILLYQLKPEKDSDEAVTYSLGKFGQRALDFYSIHVTKESTHPVKPLAQIAGNRYASSPVGKALSDACMGTIASFLSKYQDIIIEHQKVVKGNQKRLESLRELAGKENLEYPSVTLPPQPHTKEGVDAYNEVIARVRMWVNLNLWQKLKLSRDDAKPLLRLKGFPSFPLVERQANAEVDWWDMVCNVKKLINEKKEDGKVFWQNLAGYKRQEALRPYLSSEEDRKKGKKFARYQLGDLLLHLEKKHGEDWGKVYDEAWERIDKKVEGLSKHIKLEEERRSEDAQSKAALTDWLRAKASFVIEGLKEADKDEFCRCELKLQKWYGDLRGKPFAIEAENSILDISGFSKQYNCAFIWQKDGVKKLNLYLIINYFKGGKLRFKKIKPEAFEANRFYTVINKKSGEIVPMEVNFNFDDPNLIILPLAFGKRQGREFIWNDLLSLETGSLKLANGRVIEKTLYNRRTRQDEPALFVALTFERREVLDSSNIKPMNLIGVDRGENIPAVIALTDPEGCPLSRFKDSLGNPTHILRIGESYKEKQRTIQAKKEVEQRRAGGYSRKYASKAKNLADDMVRNTARDLLYYAVTQDAMLIFENLSRGFGRQGKRTFMAERQYTRMEDWLTAKLAYEGLPSKTYLSKTLAQYTSKTCSNCGFTITSADYDRVLEKLKKTATGWMTTINGKELKVEGQITYYNRYKRQNVVKDLSVELDRLSEESVNNDISSWTKGRSGEALSLLKKRFSHRPVQEKFVCLNCGFETHADEQAALNIARSWLFLRSQEYKKYQTNKTTGNTDKRAFVETWQSFYRKKLKEVWKPAV

SEQ ID NO: 34916 - protein, 979 aa, synthetic construct
  REGION 1..979: note = engineered CasX variant
QEIKRINKIRRRLVKDSNTKKAGKTGPMKTLLVRVMTPDLRERLENLRKKPENIPQPISNTSRANLNKLLTDYTEMKKAILHVYWEEFQKDPVGLMSRVAQPASKKIDQNKLKPEMDEKGNLTTAGFACSQCGQPLFVYKLEQVSEKGKAYTNYFGRCNVAEHEKLILLYQLKPEKDSDEAVTYSLGKFGQRALDFYSIHVTKESTHPVKPLAQIAGNRYASTPVGKALSDACMGTIASFLSKYQDIIIEHQKVVKGNQKRLESLRELAGKENLEYPSVTLPPQPHTKEGVDAYNEVIARVRMWVNLNLWQKLKLSRDDAKPLLRLKGFPSFPLVERQANAEVDWWDMVCNVKKLINEKKEDGKVFWQNLAGYKRQEALRPYLSSEEDRKKGKKFARYQLGDLLLHLEKKHGEDWGKVYDEAWERIDKKVEGLSKHIKLEEERRSEDAQSKAALTDWLRAKASFVIEGLKEADKDEFCRCELKLQKWYGDLRGKPFAIEAENSILDISGFSKQYNCAFIWQKDGVKKLNLYLIINYFKGGKLRFKKIKPEAFEANRFYTVINKKSGEIVPMEVNFNFDDPNLIILPLAFGKRQGREFIWNDLLSLETGSLKLANGRVIEKTLYNRRTRQDEPALFVALTFERREVLDSSNIKPMNLIGVDRGENIPAVIALTDPEGCPLSRFKDSLGNPTHILRIGESYKEKQRTIQAKKEVEQRRAGGYSRKYASKAKNLADDMVRNTARDLLYYAVTQDAMLIFENLSRGFGRQGKRTFMAERQYTRMEDWLTAKLAYEGLPSKTYLSKTLAQYTSKTCSNCGFTITSADYDRVLEKLKKTATGWMTTINGKELKVEGQITYYNRYKRQNVVKDLSVELDRLSEESVNNDISSWTKGRSGEALSLLKKRFSHRPVQEKFVCLNCGFETHADEQAALNIARSWLFLRSQEYKKYQTNKTTGNTDKRAFVETWQSFYRKKLKEVWKPAV
